United States Patent Application Publication US 2006/0040262 A1 - sequence listing, part 7

SEQ ID NO: 631 - DNA, 30191 bp, Mus musculus
  misc_feature (1)...(30191): n = A,T,C or G
ctgttatctcttcatctagatccaggccagttctttatctcagtggcctccagggtcctgaacctctgcctctgcagctcaagtctgacctggggtttgactctgtagcagagtctctatcagacctctgacagggttaatcgtgggacacacccctcccctactcgttttgcttccctatcatctggttctctttggaactctttaaagtactgtgatgcctctttaaccctttttaacagttctgtaatacacacacacacacacacacacacacacagagaatgagagagagagagagagagagagagagagagagagagagagagagagagagagagaacattttactatgcagtgtgtgatctgagaacgaacattaatagttgtacaagctggagttatcacagagaaaggagcctcccttgaggaaatgcctccatgagatccagctgtaatgcattttctcagttagtaatcagtgggggaggacccagaccattgtgggtggtgtcatcccagggctgctggccctgggttctattataaagcaggcttatcaagtcaggagtcaacacccctccatggactctgcatcagctcctgcctccaagttcctggcccgtgtgagttcttgtcctgacgtcctttggtgatgaacagcaatatggaagtataagcttgaatatacccctttctccccaacttgtttcttgattacgttttgtgcaggaatagaaaccctaagataatagttaaggcccaaataagagaacatatgttttctttggccaaggaaatcaggacaacttggcaaattgctgccaacaaaatcaatatcccacataatcatttgttgagattcaatacattttgacattggaaagacacagctctctcgtgacagtatttcaccatgagtagactacaatataattttttttctactgttgatatacatttgggaaatgttacagataatgctgttatgggcattcttgtgcatatatcttggccaacatttataagaatttcagctgggggtatatccgagaagttgaatttctgaccccatgtcaatagaaatagacccttccagtcagcccactgaagtggaaacttctcatttctttgggaaattagttatgccaaatgatgtttggctggagcacacagttgaaggggatgtcttgctaaagcagacatgggaaagaatgtttggatatagtaaacacatgaaaggacccatgatgaaggagtataaatatgaccggacagacagtgggagatgagcactgagccttggtttggtttgttctgcctcgttactctttgctaataacacacatgtattggtcctccttacatagaattgttgagctcaacttgtggtaatgcaaccattgagagacacttgcctaagaactgcttgtaaggttcctgtgccagtttgccacttctgaggccttgccgcgggccagttggcgaacctggcaagtttcttcgggattgaattacagctgcctggtgtctgcctgccagactgggctgtagctgctgattcatatgtggtgtttgctacaggactgcactgctgccaaagaagatcgagcctgcccccaaagaactattgctgaacaaatccactacccccatatcctaataacttttctcttccactacctctgctgggtggtggtcaaaaggagaggtcgaacccttattaaaactaggtttcaaaaaaatgtatgcttacaacctactcagtctccctgcagattatgcaagcttctgctttctccctacccttagccttgtcaggcttttaaacacatttcagcaatttctgaagtgaggttaatttgcatcttgagaatggtcatcacgtttagcgacttagcacggggcatacacaccttagaactcctagcagggaaatgtgttagcccgcacaggctgggttagcttccttctgccccagcttgcttctacaccttttcttcccagagtgttgatgtattctgggtgctctgcaggtcaaactctgcaccagttcctttgggtccagctagcaacagttaattcctacaatcatttcttcctcttaactgctgtcatttataaagtccttttaacttctgaactccgttaaccacacacatttggttcacataatgctgtgttagcaaggttgatttaagtctgataaatgccatcatttgacctgctcgctaaaattatgatttactacgtctttcatatattattattttcacatagtgtgtctgataattctaagatacattatccctcgttgtttttctttacaaaaaagtttcttgattaaactagaattctagatggattttagaaagagacttctgttacagtcctgtagggattttggctggaagctctgactcactagactaagcgagaacagaccatttaaccttatttgcttgcttaagaataaggaatgcttttaatgtttttaatgactcttatctttcccacgacattgtctcatagtttattgccagtgtgttggaaaggtgttgattttatgtttgtcttgagtctagtcactttatggaatttgcttagatttaatagcctttcagtcagcaacttagcttttctaggcattgcacgagtgtgtcaggaagttttactgtcagtcttgccagtatttatgattagttttctgagtctatcctacagatagcctttccctcctccctccctccctgaggaactcggacacagagccatgccaataccagttaactcctttatcactggctacatttccagcccttgatgtttctttaaaaaaaaaaaaaatcagaatagtctattgcttctaggagtcaaaaatcccttcttgacaacatccatttacctcctcaaatgaacatgcctgtctcacacattggttcttaatattctcttcagcttattgctgtccctcaaaatccatcaggtgtccttgctgattaattcatcttccaggtttccacttaagaaaattacctcctctgtgaagcccttcctcagatagatctacattcctccttccatgcatttttttattctctacatttttcacattacaataatctattacattacacattgttggtttgcttatttatgaattaattaaaaatgtctccaaggatagaaataatgtttgctgataacacttggtttcttagttcctatcatgtgcttcaggtgtggttggtgctctctctctctctcttctctctctctctctatcttatctatctctcacacacacacactcctctcctctctctatatattatatatataatttttttggttacagggatggaacccagaacctcacaaacactaaggaaaggttctaccactgatctgcaactccaggcctcacttaaacgtaattcataaccacataagtagtggaatttatgtaaagatattttgacataagtactcttcaatggcatattaaaaaaatcactgtgctggtgttgagaaagactggcctcgattagggtgagattatttcatcattttatcttgagaaactgatagctttcttttgatgttaaacaatattatcacagtattaaaatgctgaataggccactgctctgaagtctagttgaatttgttttgtttgtttgttttttgagaccatgtttccctgtgtagccttggctgtcctgaatctctgtagaccaggctggcttgaactcacagagatctacctgcctctgcctcctgagtgctgggattataggtgtgtgccaccgatacctggctgattgaaacatcttttagtttaatattttattgttcattttttcttttgagctaaaataatcaaacaacaaaatgattaattcttaagtatgtataagccagttttcaaacaaattgtttaacaactttctttaagcaataacaactgtttgatagggaggttagatttttctcctgaaataaatacacaaacattaaagtagagaatgatcttcagcattctccccgtgtcagcacacaatcgttcctgcaggcctcaaagattctttcctttaatcctcccagctagcctagttactatgaagtgagttcccaaagacgctggttccatcctggacacccacatggaagcccacaactttctctaactccagctctgtgggatctgatgccctcttctggcttccaaaggcacaaggcacatgtgtggtccacagacatacaggaacgcaaaataaccacgtactttttaaaaagaaaaaaaaaaaaaaaggaaggaaggaaggaaggaaagaaggaaggaaggaagttttgtcccttccaatgaggaccgtatcttctttttgaaggaggtaggggttcattgtgtactccaggttggaactcactatgtagcctgtgctggactctatctgggacatccacttatcttagtgctgggattatatgcatgaaccgctgtgcctggcttacaagaaaaactgggccaagtcttccggaaccatgggttggggcttgcaggtggaagtgggttcggcagctggatctccgactctgagattatctaggagaaagcgggactctgctgggagtccaggatggattatccattgctcctttctccctctgtcctggtctaccctgaccagcaggacacacatgcactgtgctgtgctctgcaatcgagtgcttttcctcccatgcccagttacccaaagtaactctgagactgaattctatatgaataaatccctcagccaataggtttggctctgttccttgattagctctccttcagtttcatgcatctgtccccatcagtgttctggggtgaatcctccccatgcctgactctatcccaccctctctctctctgccaaatgtcccaccttctagtcctgcctcagctcattggccaccggcttttttattgacaggtgaagcttctacacagtgcattagagattctctctacatttccctcttgtggtccagtaaaaggttctttctcttataataataaactacatacgataatagcaattatgagacctatcaggtaagatttacattcacaatgtccagtccctttgtatttggcacccataaatgaaaagaccaaaataggtaacttgtaaacagctctgagaccgagacataaaaatgtctgcggccacaacttcgctatgcgtggccaatagatcttgttagccacaagatcctcaagtcttatcacgcctttctttcaaatggcaaagttagaaattaaattttagcatgatcatacaatcctagctaacttataaagaaagatagatgacttaccagcttgaaaaaaagcaaaaactcatctttagctaaactatgcacactgcacattccatacttatgttaatgcagaaatgtataacacttctcaaagtttatatgttcataggaaaacaaaacaaaacaaaacaacaacccaaaaagcatccctgacaggattcagcttgaggatgctgagaatatactcagacatattcattccagcatcctgtttgatactcagatctcctccatatggaggtggaccggacagacagcattcctaccttccaggaactcccagtccagcagcggacaatggagatgttactaagtaaatacatactgttattgcagggtgtggtgatagttatgaaagaaataatcttgtctgataaagggaatcagagaaatcctctcaggagtggtgtaaggtagggctttgaaaagttggttggtttgtttggacagtgtctcactatgtactcacagagaaccacttgcctctgcctcccaagtggaataattaaagacatttgccactatgcttgatccaatgtagggcatcttaaactgctttctattcagcgccccttttcacctgagaattttgtacataactcagacatatcgttatataaaggcaggtatagaaataagatttttactgctgataaatcataaagtataaacttgtgtgtgagtgcgtgtgtgtgtttctgtgtgtgtgtgtatgcgtgtgtatgtgtgtgtgtgcatgtgtgtgtgtgtatatgtgtgtgtatgtgtgtgtgtgcatgtgtatgtgtgtgtgcatgtgtatgtgtgtgtgtgtgtgtatgtgtgtgtatgtgtgtgtgtgtgagtgcgtgtgtgtgtgtatgtgtgtgtatgcgtgtgtatgtgtgtgtgtgcatgtgtgtgtgtgtgcatgtgtatgtgtgtgtgtgtgtatgcgtgtgtatgtgtgtgtgtgtgagtgcgtgtgtgtgtgtatgtgtgtgtgtatgcgtgtgtatgtgtgtgtgtgcatgtgtgtgtgtatgcgtgtgtatgtgtgtgtgtgtgtatgcgtgtgtatgtgtgtgtgtgtatgcgtgtgtatgtgtgtgtgtgtgagtgtgtgtgtgtatgtgtgtgtatgnnnnnnnnnnnnnnnnnnnnaaccacaaccagctttcaactcctaattttgaatgagaacagttgaaatctaaaagtggaggtgaaagacccacggacacttgactggctggtgtcagacttgcgtttgggactccaagtttgtctgtgtgaaccttttccttaatgcagtttctgatgacgagcagttgctagaagacaggcattcaaactatttatcaatagtttttaaaaagtgagaacccgcccttcctccatttaaacgtgtcctacttagctttcccactcgcttgaaattcttctaaactcaggctgaaaagcagagcaacttggacagaagcctgttgacatgactctgagccaggtgtggcaatcagagtgacacagattggctacctgagggaaacgtggccttgctcagagtgcagggtcacattctgctgtgttgccttacaagttggctgaatgtagggagaccggccttcagacaagaagtggaggtgggctttagctgacataccttttaaccacacttgctcacacgattgacacacagccctgaagaaagctactccagttatgtaacaaagcccaaaaaggccagatatcaccaattaataccggcaaatccttacaaggtaccatctttgtaacaacagaagtatacattggaaggatctgagttggaataggacatactaagatcaagttctaaacataaaggagctttatctgccccagagggacaaacagcaggggatgagagacaaagacaggaaacgggacatggggaaaagggaaaaagaacaggtgtgggaggatatatttgccctggagggaaacggacagcctctggatagagacagaagtggctcatgggaaaatggcaatttataaaggaaaaggggaaaccacaagtcacaatgagttggtttgttttgattggacatgttaattagggtagccaaaagggagcttttgattgctggatgccaataatttgatatctagaccttggtgatcagcctcagggggaggaaatagccaaattagggaattcatcttggtggctagctttaagaaagtaatctactgagcccttcatataccagaggccgagtcacaaagacctgcaaagactctgcaaagatgtgactgtccaaaaagatgaacagcatgagtctgtcagcaaagcagacacagtccttttgtgcagttgagcaggactccaggacctgagaccagagggacagcattagacagagacagcattgcttttgaagctctaacaagatggagcctgaacgggaggacaggcttccccttaaagcctggagaggaacttcacttagggtgtgagtaagggctggagagatggctcagcaggtaagagtgctggctgcctgctcttccacaggtcctgagttctattctcaccaaccacatggtagcccacaaccgtctgtaatgggatctgatgccctcttctggcacacagatgtacatgcagatagagcactcatacataaaataaatcataaaaaacaacaacaacaacaaaaaagaatgtgtgtagtacaaacagtttaagcttatctctgactagcttacaaataaatgagactcaggctatggctattttatttggctttgatgaatactgggggtgacccctaatctactcttctaactacaggcctggcttcctctctattggtgtaccccagacacttgctgtttctcctgaccatgtgctcatggtacctcctcctcctcttcttcctctttctctactcctcctcctgctcttcctcttcctcctcatcttctttctcctcttcttcttcctcctcctcctcctctttcattcttcctctttccccgtctcacctacctctaatccttccaatgactggctgcagccaattttatttaaccaatagatgtaaatcaaggaacaaggtctgtacaacaaaagcttgtaagcatgagaagtcactaatagggctagactttctcatatagaacctagcattacaatacatagcaaaagaccaaacctcaacacacgtgaatgggagagagagagagagagagagagagagagagagagagaggcagagacagagagagagacagagagagagacagagagagagacagagagacagacagagatcaggagaaagacagagtagtgggccagattggggtggggggctagctagaggcagacctcagaatatctttccagaaatctcctttaggagtcttacaccagtccctagaatagaggctaagcctgatttttatatcattttagaggtgtcaggaagtttcacatcccatgatttagttcatcctggcctacatgacagggagctgggtgccacagactaagaggagctgccaaggagctgaaggggtctgcaaccctataggtggaacaacaacatgaactaaccagtacccccagagatcgtgtctctagctgcatatgtagcagaagatggcctagtcgtccatcattgggaagagagggcccttggtcttgcaaactttatatgccccagtacaggggaacaccagggccaagaagtaggagtgggtgggtaggggagggggggtacaggggactttcgggatagcatttgaaatgtaaatgaagaaaatacctaatatttttttaagaaagaaaaaagagtagctgctaagcacggactgcttcataactctgttaggaagagagagagctgcagagaggtgtggcctgattcagactataggatgggtggggcttaaaagattctaacagtggccacagttttaaaacgacgcaaacacgtttgcatacattttctaactccctagggtagcagaatgaaaatcctccacgggcttggaggatctgccagaataaatgcatgaaaccacgaatttaaccgagctagatgacttgacaggtctcaaatggacaaggtcaaagtcttgagtgggataccgaaaactaacaaagtggctttatctgaagactcttctgggccaggaatttttaagttcctgcatgtcggtatttctgtactgtactacatataggcttgcttgctaacagtcagtaaacagaaaagagcacacagaaaactcacgttctcttagatgccaggcaagcatactcaaagacattaaaaaggaggtgtgtgcgtgcatgcaggcagcttttttctagcactgtgacttaggaagttgcttaatttcttctagacctcatttatctgtctgtaaatcaaacaagcaaaacaaatatctctttagggcaaattcgcactcttcacagagcagatcacaggacacggtgaacagaccatatgcttctggaaactgggttgcactggagccacgccccctcttgcctgctcatctctgattggctttctcggaggggcggaacaacgggcaggcaatagttaccccggcagagtttggtcggtgggcagggactccgcagtcagcgtcatggctgcccgtgctcctgagctcgcgcgttccctgcttgctgcccttctggcgcccgcgctggtggcactactggtgtcgccggcctcgggtcgcggaggccgggaccacggggactgggacgtggacaggcgattgcctccgctgccaccccgcgaagacgggccgcgcgtggcccgcttcgtgactcacgtctcagactggggctcgctggccactatctccacaataaaggaggtgcgcggctggcccttcgcggacatcatctcaatcagtgacggtcctccgggagaaggcacgggcgagccctacatgtacctgagtccactgcagcaagccgtgagcgacctgcaggtgagcgggagcgcggcgcggtttcccagacccggcagagcaggaaaccagcgtctccagtttagctcgctggggagagcgtgggtcttagagataagacttttgaacccagctcacatgactgtctcttctggcctgcgctggctaggcggaggttgtagcatcccagatgttggggaactaccaggaagttcctacttaccctgttactggtctaagcgcttggggtaaattctttgccagtacctggagcacttcacacccttcagatagtcaggcgtcctctttaggcgctgtctctgcataaactgcactcttgtgatctaaaggcatacagattgttggatagtttagcgtttggcttatgtgacttcggagattctcttccctacctttacctatcagcagtgggaaactactacacagcattatagttgactgcggacctggctctgcttacagctcaggtggaaacagcctgggagggaaaggccacacaggagcccagaaatgaagcctgactcggtggagggtctgtggcaaaactgagaaagcttggtgtcgtggtaaacagtgagccaagagacgccgacgctttaaccaagcccttgccatggtatgtgcctagggcttttcggttccacctgttttcattcattgtctcttgtagtaactcttagaaacaggcatggctattccgggtttacagatgaagacatgaggttaagtaatttgcgcaaagccagggggccaaccctagttcacctcagacccacttgtcttcaaagcacaggccacaggactgggacccatgtgctagaatagaagagacccgttttcttcagcctccacagagttctgtattgttctaaacaaatttaaattagctactgccttttaaaactgcaatcctaggggctagggaaatagcccagttggtaaaatacttgccatgtaggcgcgaggacctgtatttggtcctcagtacccatcttgacggcttgcacgcacatgtgatcctacactggctcaacggcttgcacacacgtgtgatcttgcactggccaggcggctagctccctggcctgccagccaagcggagtcagtgagcttcagaccgcagggagagagagcctggctcaaaaagccagttggatggctccagcttctgaggagtgacctccaaaactgacctctggccacaccatacactcattaatacccaatgcacctgtggtgcacctgcactctgcatgcgcacacgcgcgcgcgcacacacacacacacacacacacacacacacgcaggataaaattttagagaacaaagtctattgatttgctctttaagtttctaactcttcttgaaaaggttaaagacctagcagcactgggagtgggggtggggctatatttttctgagagacaaaagtaatagaagccgctgtccctcccagccagatatattgaccccaactcgccctttttttttaaccagcccgtttcacttctctagaatctgctattcacccgttctctctaccccagaggtggcactcaagtgacctgcgtagcacttgcagagaagttttaaaatgcactaccaagccactttattctagaacaatgccccctactccctcaaaccctcactggtgatcctaataggaaggggacagactgagcctcgccccgacccatgatcttattactatctgtgaggtatctggggtgtcattatccacactgccgaaatggggagcactgaggcttagagatgggggctcacccgtgaccacctagctgatggccaacaggtaggcctccagtgaagtatttcctggtagaagagaggcagattcgaggagcctccccaggctctcgggtttctgggatggtattattgaaaagacgtgtggacacgttgggaatgtcagcctttgtctggatactgactcggccaattaaccagccgaaactggttcctattacgcgtttcctcttccagcaaccaagagtctcttcatgaggctagaaagagccaggctgaggcttgagaccacttgcccggtgtaaaatgccggccatctccctcacagacaaggggcggcttgggtgtgtgtcccgtaagggtgtccctcttgtctagttgttttggtgtgtgatatttttgtataatgaatctttagaggaagaatctgtttctgctggttggtaatatggtaccaagttatgttgtagagccagcaagtccacagtaaaattggcagggtgcttacctaggctgtgggaagccctgcgttgtatcctggggcttggtgataaggccctaaatatacagtctcaggatttggaggcgggggcagaaggatcttcagctcaaggttagttttctctgttatctggtggtttccgacctggctggactgtctaatgtcctctctcaaagcaaacaaaatccttttacctctccgtccttcttggcgctgctctcttgtgatctgaccaggttactcctgatttctcttcccctttgacccattaaaaacaagtcaactttgttatgtgcacagtcatggttctcctttcagttaggatttacttccgcattggggtgcctgttgggtctcctcagagtcttgtatttctttctttttaaagatttatttatttattttatatatatgactacactgtggctgtcttcagacacaccagaagagagcatcgaatcccattacagatggttgtgagtcaccatgtggttgctgggattgaactcaggacctctggaagagcagtcactgttcttaactgctgagccatctctccagccccgagtcttgtatttctgatggccttcattaagtatctgtccagtgaaagtcccattttcctcttgttcttggaaacccatagcccctgaccggcagcatcctggattgtggaattattttcacattagaattcccattgcctctccacatctccgtctttcttctgctgtctttgttatcatccctgctccctcctcttcagtcacaccatgcttaggctaagtcctcgacacctcatgctagaaagtgctcatacaacttttaaattatctgtctgaaccatcctgctcaccagaacttataataacaaaaatacaggttgccctctgcacagaggacttaaacactcctgctcctcctcctcctgctccagctcctgctcctcctcctgcttctcctcctgcttcagctccagctcctgctcctcctcctgctcctgcttctcctcctgcttcagctccagctcctgctcttcctcctgctcctgcttctcctcctgctcctgcttctcctcctgctcctgcttctcctcctcctcctgctcctcctcctgctcctgctccagctcctgctcttcctcctgctcctgcttctcctcctgctcctgcttttcctcctgctcctgcttctcctcctgctcctgcttctcctcctcctcctgctcctgctcctcctcctgctcctgctccagctcctgctcttcctcctgctccagctcctgctcttcctcttgttcctgctcctcctcctgctccagctcctgctcctcctcctgctcctgcttctcctcctactcctactcctgctccagctcctgctcctgcttctcttcctgctcctgctcctgctcttcctcctgctcctcctcctgctcctcctgctcctcctcctcctcctcctcctgctcctcctgctcctgctcctgctcttcctcctgctcctgctcctcctcctgctcctgctcctcctgctcttcctcctgctcctgctcctgctcctcctcctgctcctgctcctcctgctcctgctcttcctcctgctcctgctcctcctcctgctcctgctcctgctcctcctgctcctgctcttcctcctgctcctgctcttcctcctgctcctcctgctcctcctgctcctgctcctcctcctgctcctgctcctgctcttcctcctgctcctgctcctgctcctcctgctcctgctcctcctcctgctcctgctcctgctcctgctcttcctcctgctcctgctcctgctcctcctgctcctgctcctcctcctgctcctgctcttcctcctgctcctgctcctcctgctcctgctcctcctcttgctcctgctcctgcttctgccgagcttcaaaccctggtgtcaggtctgaggagatgggtcatcaggaaaagagcttgccatgcaagtatcaagggttttgatccctagcacccacgtagaaaatcagctgaacttcctgtactcccactgcttggcaaatggaatcccctggggcaagttaaggagttcctggttcatccacacttgtgtatctgcccacatacatgggaacacacacacaaacacacacacacacacacacacacacacacacacacacactcacactcacacacacaggtgcacaagtagtaaaataagtaaaaccttgggtacagattggtgcggggactcagcattttaacagactcggtatgggattctagaaagcactgcttgggtattgcctgcagagttcacagtagggaaacctcacccaaggctccctcttgttttcctccttggggaggttgaggcgggagggttcctcttcttacctaacagcttgcagacagcaaattccttagctggagtgaaggtgtgtacttcttacctagcagcatgcccagcaagatcgtctttatttttgattatgtgtgtgtgtgtggctatctctgtgtatgtattgatgtgagtgtgtgggggccctcaaaggccagatattggatcctttggagctgaacttacttaaaagtgaccgtgagccactgggcgtgggttctggaaggggagcgtgggcctttggaagagcagtcacactcctccctgctgagcccctcccctccccgcttccctgagcagctctgagactcagtgggtttgatgggccattgtgagatgggcgcatgcagttgtgagtgtgcagtagtctggaacaatggtgggtgctggagagaaaccaaccaggaatctttttgccttgggtttggaatctgaggtaaaaattttcatgtgacagaaagagtaagcaacttgagaccacgtgacaatttctgcagccaagtgatagccactcagcatgattcagctactttcttgtttaaattgtgcaattaggccgtgcgagcacctgtggtcattttatgcagtttttcttttttcttttttcttttaattagagcttaatcttgtagatattccagccctagtttagggggtactttatttataattctgataagtatggaactgataggactagctatgctaaaacatcctctacagtttgttaatttaaaacatgacacctctccacacacactttgtggggatgggacaggtttttacccatgggtcaccccacccccaccccagtgggttacagttcactgtttcatggaagtgagctgcagtcagttccaggggatagtttgactgcgggctgtaaagtgtgtacctctccagaaactgtattttacaatgaaggatttttatttttctctcttcaggaaaatccagaggctacgctgactatgtctttagcacagactgtctactgtaggaatcatggatttgatccccagagtcccctgtgtgttcatataatgatgtcgggaactgtgaccaaggtaagttccacgaagagagatgggcttaaaagaatgtggtggcattaaaaaccaagggaggggtctttggagaataaaacgcaattgatttgtgagtgggcagatggtaagaatatgtcctaacacagatttcaacaactaaaggccctgaccagggtctgtcatataggtgtgtccagtagggtacttatggggcaaaggacccttgtcctggagccaaatagatgtaacatctggaaggctccttataaaacactctggctaaaaacagctgctcattccgaaccattgctctctagtttcagggggctccttgtcctcgtgcctctgcctcccaagtgctacttctaagcacttttgcccttcttgcacatgcattgaatagagtaggtgtgagggcactttcaggcctgggtgacagccagtgcttctgggccatggacagtgctagcttggaatgactgttgaacagccaagctccacccccatcatggttcctgctttatttgtgtgtgtcattacaagtttgaaagggcacgtttctctgttttctttaggcttcctgtacgctcttgactcttaagatcagaatttgcaacggaacgaggtgccaggcagtttgtggtgtgagaaccaccccttcttagtaagataaaagtgtccttagaacggcctgtttatctcctgtttgtccttcaggtgaacaagacagaagaggactatgcaagggattcgctgtttgttcgacaccctgagatgaagcactggccttccagccataactggttctttgctaaattaaaaataagccgtatctgggtcttggactactttggtggacctaaagtagtgacacctgaagaatattttaacgtcacgctgcagtaagtaattatacattttccaccattgccggactgtagctcttcccagcacccccaaggctgagcctgctaggaccacctctcaaaattacaaaacacatgggattacaaagacactaggcataggaacacacacctttaatccctctcatcagtgtcagatgcagaattagtaaactcacctgtaaccctagaccttgggagacaagggcaagaggattagcaattcaaggccagcctggaaggctgaaaatcagctcaagttacatgaaactgtgtttgaaacaaaaacaagcccaacaagggggacctagtaacgggcctgtagctctcagcgtagtgaagcctagggtctatattttatgacattttctacacccacaactataacacaattggaagggatctgtggcctgcagaggtaatggagttgattccaaaggggctactggagagaaaggaaaagagtacgggaggtttaagttcaagtttagcagttgggccctggggtttgggtgtgaatctcagcattgcaaaacaataataaaattactaagggctggagacatagctcagcccaagggcctgggtttggtccccagtacatctagtctggaagtagaaaagaacagtatctaaagatggcctgggccgggaagaagggagtggtcagatgtggagtgaggtcaaatgaggtcaagggtcagaggacagaatgggagggactagagtgttccctaagtgacactggattttgcaatataggacatctatctacaagcccaagaggtgctacagcagctagagtctgttgagcgtgttttgctggtctgtgctatcctaatcgcttcctgttcgtagctgaaattctcaccacacccctgtgaagcgagtgctgattgctaggctgtaaaacaagggccggcctgggaaagggggcgcttgcataacgcctttcagccagcaggtggcagtgctgggattcaaacgctgggcgtcctagccctgagccctcttctgacccctaaccccgtgctggacgccaggttcatcttttagttcacttcctgtttgcaatgactgacaactctgtggagagatgggggaggatagtaggacttataagtcaagacggaatgagtatgggcgcagtaaagaaaccaaagtagccgatctgtgggtgaaaagagaaaactgtattccaataaacagccaaggctgtcgcctgggaaagcagggaaggatttccagggttagacgagaacaagagaacggggtgggggtggggtgggggtggagtgggggtgggggtgggggaagactcgagagctgggtgggatctgtgagccaggactgagggtgcccagaggctagcaccgaccttgacaagttcttaggtgccccagcgtatgctaatggagacacacttgttccttttgccagagataaggagaaagcaagcaggaactttcttcaagtcccaagggaatggcggcttttgtccaaacgcccaaccttgggaaaaggttatttctttgtgggaccaaggaatcttcagtcccggaccttaaattcttagtgcttatgtgttctttgttttcatgctattagagaacagctcatattaagctatgtaaccccctaaccaccaccaccccgctccctgccgtaaatgtacattttaacagcaaactcggggttgttggtatttctgtattccgagcagggtcgagggtggtgcatggcccatggtaggtgttttgggggcagttgcatatagccagctgatggaaacacagactttcaaattgtctaaagaatccagttgtcccagtattgattttgtggccgtgtgcgtgggaggagaggcgcaggctgctgaccctcccggggctgaccgagcctcctccttgataggatttaggaggtagcgattgtcagattattaccagcaagcgcgttatggaggagagtggcagtaagaatgatgggctgttctgtgaggtcagagtttaccttcccaggacatcacaatctccgaagagcagttatctctgtgtaaataacacgccctgggcagtgcttactttaataacaaaataaaattatgatttcccataagtctttgctctgagtgtgtaaaatagaggctcccgttctgttatgtagccgggtaagtgcttttctgcagctcaaagataaggcagagagcctttgctctgattgggggtggggggagtgcagggggagagtgcaggaggtgggagtgcggggtggggaggatgaaagaccagggcaaggcatcccaccacagtggcagagtaccagggaaggaggctcctgtccccaagtacctctggccactcattgccacttcagagtctatgaagactggggtctgcacattgtcgggaaccaccaatggggtctttgtggtatcctaggctttccccaggtcaccttgccaggcttgcccacatggaccacagaagatactgtttctctaattagcacagtgccttctgtagctaatggccaggacactgaaatgatcccaagaaagcatccacacggggaccgctcagtcagggctgccgtgagacctaattaagtgctttgtgttaattcactgggttgccggacccagcccgtgtgcgcttttgcacgtggagtgaaagtgtgagcatcctcttggtgtgtttgttgacttcctggatgcagccatgatcagagtaggcgttacttcctatcaccatggagcctggacagcagcaggcctggtccagggctcactgtatcactcacacgaatcctaccaagacagacacggaaaaaggtccccagtctctcacttgaacccttacctgggtgtagatttcctggttgaatggtaatcccagctgggaattaacttaaaatagtaaacgtttcggggctgtgtttctctcgtcttctcggagaatgaatgaccctttaagtctggccagtccagctcatgagataacggtctctctttccctctctaggtgaagcaggatatggtggactgagtcacaccagagaagtgtcttcggaggctcatgcacacttgaagggttggccctgcttgggacgtctccagctgtcagcttactctgccacctcttgttttaatcttgtttgcttgtgttaacagagagttgtccgtcagaagatgtggttgctggatttttaaaaaagaaaaaaaaatgtattttgaagccattttcagagaaaaatgccattcattataaccaaggaagttttctttcagccattcccggtggcttttcctcagtggtgcccacagaagggcaacatagaccagctgtagatcgcccattggctctggaggaagagaggtgcaggtgctttgtgcccgacggccactgtgcctgaggggtgctgtcctcacacagctgcctcaggagtctgtcagaggggcctagagtcgggaggcctgggcagggcgtgggtcccggatacagagtgcttgaatgaatccttcagtcgaggacagcaatggccacacacggagcttcccactcacgtccacccgtacagctgatccatcacaaggcaaaactgggtcctctataaaactccataaacatcatacatcctaaagtcatagttacccaggacaaaataagacaaaaagattttcctgtattcattttccacccaagtagactgtatatttatttctcatccttcaaaacacacacacacacaggagctggggtgcagctttcttggtagagcgattgtctagtatgagaccatagctctcttccccagcattgaaacaaaaacaaccagcaataacatttttatttgcatgagaaaggaaccgcaggaattttacatatgttgggttcctttttttgacccaacaccaaccataaccccagcccttctcgggcactctgtatctccaggctcctggcactgcagcccggagtcctccatgggagataaccacggtaccacggcatagaaacaaactacaacaacaacacaacatgcttctggcctagagggttggctcagcacttaagaagattgctctagcagggacccaagttcaggacctggcgctggagtcagacaggcacactggccatcactccagttccaggaaatcatatacctctagtctccaaggtcacctgcactcaagtgcacgtacccacgcagacacacaccgacacataattgtaaaccatgcatcttttcttcagaagaggtactacttagttttactacgtgtattcatgctcttggatgacgtaagagtccttttaattgagtgtgcgtatcagacttcttaaacagcaaaagagttgaacatgagccatcatgttggagaaagagatagaaatccagcaagtgacttctcagtaaaaacccactaagcagcaagaatccagtttttttcaaatcaataattaaaagcataattctaacaaagtgtgttggactgatttctgtgatttcagagacatagatgttgatcagaaagcttcattcattgtgcactgctcagtcaatgttcttatttaaccacactttaaatcagccactgatcgttccagaatccgagaagaatcatatacgttccccggtggcagagaactcacgtcccagcatttgggcagtgtctccatgcaggcttagtcacaggcccttgtgttccagcatgcatcgtagaactggcttgagggtgttctgtcttaagcacttggcaccagggaaaaactatccacattcagatcaaattcaattatcctacggggcgaaacagccaattctttacagcaggcgctgcacattcctttataattgaatttgcagtctgtcacggtagcattctggatgtccacaagggggtgcaatagactaccgttaaagcagatccaggttgcggtttggttttcggtggtttggttttgtttcccctctctcttagagtttatagacagtagcctaaggtatcttcaacctgcaattctcctgcctcagctgggatgatcaacgcacgccatcatccccaacccccaccgaacagtgcccctttctcacataggccaatgtccaatgtgaccatgatggtgacattaatataggcaattcagcagggaagagatgagatgaaggcctagtgtcacactgccactggcaggttcaaggctcggtcacttcctttacaccatggactttgcttcagaccctgggtctcacacctcacctgctgcaggtagagagagattgaaccagggtcttagctgggtaagttggttgcatttagcagatgtttccctggccaaaccacgaccaacaatcggttaatctgtcttctagcccaggttcaaagtccttgggattacgtccgggtggggatccattatgaacggaggcgcgattcagtgaaacaggaccattctgactggagattgccgggatcatgtgcctttcttagtagtattcagacagaatcgcaaggtaattgaagactacttttctataatggcgcattcatgagctgtttcagtgctgagaaaataatactctgtgggagtttattggccagtatttttgtggtgttttccaaactcttcaaaacagatgggctgtattttcatctgagaagacaaatgataagtttagaaaagaatatgaagcaatcgtttttttccctttgtgttgtagggtgcatacatgatagagagagggggaaaggaaagggtacatagggggagaaggaagggagagagagagagagagagagagagagagagagagaatcaagacccgatgcctacagttaccctagctgctagcattttgtagttcttcccaatctttgatgacttgcttaaatgtggtcaggattgctgggtactgaggctgagtgctagggcttcgcctccatcttgagttccttatgttcctaggagttgtttgcgaggataattgagtaaaaaggcaaaggacctatgtgacctgaggagaagccacagtagtcaagggtaacagagtagctgcggaatcttcctcatcccctggctacaaaataaccatctgcttgggggtggggctgggggtggggtagggagggtgctgctgtgccgccgtgctgggactctgttgctatcacagggtctcaaatcaaagcaatttaaacaaagtggaggagtttgctcttcctaaaataaaacagtccttctgaacaccctcttctcagccctgcttacctcttccttagttttatctgcagccagcaattctaacaaagaagatggtgcttgctcaagtccggacttactcattcctgaatatgaagtaggtctggaagtgcggtgccctcagtgactgagcccaggtcctgtgtctcattgtcctttccagaagatgggggtgcagcgctctgccctgggaatcacggggacttggagagttttgaagggtactcctgagaggagtcatgataactgatgggtcagactgaacaagcaaaggctgatggggatcgccaccctagtttccttgtcttcctctccttactttctaaacatttaggttatagaatttccaagaatgttgcagattgcttttagagattgatatcaactaacagctccaagacgtcacattgcttattccgtgcagaatctagcagggaaaagcactacggcattatttaaatcagtgagtttaggttctaacatataaaatagtagtttgggccaatgaaatgacgtcagtgcacttggtgctaagcctgatgacctgaatttaatccctgggacccttatgttggcacaaaaactgtcctgtgcccaccatgcaccatggcattcatatacaatgcattcattaaataaatatattaaaagttcttaaggtgttctgccagctgtttttcttctttgtgaattgtcagcttatgctagttgttcagtggtcctgagaatcactttaatttccctcctggtggctctcggggtgggacccagggtccttctcatccaagtatacacccttccacccagcccttggggataatttttaaaaattgattttagtgaatattatgtatttatttcagtaaataatttttgttgtcgacacctggtaagaactgttttccctttaaattgtttttaatatcagtagatttaaatttttccacaaaggaaatttacataattgaatatttccctcttaacatatttatttttcttgaaatttatttctttgcctttgagaactttggtaaatgctagtttgggctttcttccatttttctgtttttttcaccctcaattcttcaatctgcctggaatgcgctttgtgtagaatgttcttctctttcttcatggcaatcccaactcatatttagcttttttaattgatgtgtgagcccgaatctacacacagatctctccacagcagggacagacatttaagttaggcttccccattaaacttgtttgcaatctgtgggcagtctagtccagagaccctctgtaatctgcagcttaggcctttagcactaatattaaccaaaatctcatagattctcatagactcaaactctggagggtgtttataatatgcactcactttacttagctgaagtctccagtccttccacaataaactcttagttggctttcttggcatctatcctatgtgtgtgtggtggcatgcacacagacacacagataaacacctatctgtctgtctatctatctgtctgtctatctatctatctatctatctatctatctatctatctatatcacatacacatgcaagcacacatacactaaatgcaattttaaaaaaataaaagagaaatatttggtggatgattgcagggcaattgaacaaatcagtttcttctgagagtggtagtccaacatgttatatctatgtactgaggtcagttagcacacactccttatttggtcaccaagggtcatctgttaatggtctgcataccctggattcatctttgcctgattttgatcaagctgccatagacagaaacatatttctagccattttaaaaactggaagtcccatctaaaaccacacaggcactctggactgacagagtctgtgttgggtggacatttcctatgctgcatgcttttgaacctgtgcatagaatcctagagaagtccaataagacaggggagccttgggccgagggaggaaggtcctcacatagggccatggtggggcccgtgaaacagcttagcagggcatagctcacctaaggttaggaacatagactgcaggagccccaattcttgaccagatctgggcagacgacatgttgtcttgaatctgtctctttatttctttgagctatgttggtacatctgtaaaggacaatacttcataggacaaggaacaaattagcaaaactcaaatcattttgcaccctgcctgcagttggttgctcttagggataacagagaagaaaccatcatgcattgggagtcccaacagcatcctctctgtgagccttccgaaggcagccttgcagaaggagagttaatttcaaagtcaagtgttctggctctgccatgggcctaggttcaaatgctggtttcagccttagctgggtggttctcattgaacaagtgccatctgatgagggagcaaccgagttttcagccaccaaatggaggataatacaatcccttcctccttatttgtagaaagaatccaagttacccagcacactgaaggctgaggcagaagaatcgtgggttcagggtcagcctggtctacatagtgagagccttccttaaaatagtttatttttctaaactaacacataaaaaacacataggaggctaccttagagagtgaacactcagtaaatactagataggcaagtcctgtttctttacttcatatgccaattgataatgttagtactttttgaagtaagagtcacagcttcaatgcatttaattttatgcgtggtgctctttttctaagtctagttacaagaccaagaaacaggtgaggcacacgtgattttttgattttttttttttaattttatggaagaggttagttacccaaagagctggtttgaggttgtcctcacatttccgtatcagatcctatagttttgattcaagaatgcaacgctagaggtccctgtggatcctttaaagaaatgcattgcctcgtgttttgtttttaaaggtttgtagtgtggaaggaaaacacacacacacagggagggccatgtgtttgaaaaagctaggttttcacaaataggtctttgacatctttgatggtgtgtgtgtgtgtgtgtgtgtgtgtgttgtgttgcgggagggcagggggagataagtcctgtgagctctgaagccagactgtgttcaaatctcaacccaatcgcttagcctgagatcaccagggttaagtccaggattgggctagataatgacttttgttcagttgtcaatcaggttgtgaatggcctgaagtccttacacagaatgtaagaccagcgcagaaccttggaacccgacatctaggaagtgatgcggtagccgtgggagagttccaactgttgtgtgtgctttggtgacacgcaccctcactgtgagtactatggaagaggagcctatagagactcggtctgggattccggggtctgacttgagaggctagactgccaaccctagagcgtgggggagggagggggcggcaaaaaaacaaaaaacaaaaaaacaaaaaacaaaaaacttgggagctgcagtttgacatgatggccgctggaggtcgctgtggagccgcgcgcaggtgctaactggggcggcccttcgaccccctctccccaggatgggagaagttagtcctatcgctagcagtctctctgctctgctggagttgggtccctcttagcgacatctttccgtccctttaaggaaatgaccatcctaaggaaaggccaagtgtatctagcagtatccagaagtggagctctgggattattggcagagcaagcgatctctgctggggacctgtttgtgcggctctccaggaggcaaggctggctcagcaaggacttctagcagcctcctcacaccgcacgggtgagcggatctagtctcccttttggggattgaaaaaaaaagtgacgcacgcgaagtaaaaaactctccagcgtcatgggattgggtagaaccttcagactctgtgcttgattctccatgcaggaagttcacccggtggctcaggtcaaggaaggtgccagctgatggcagtgaaccggccaagaaaaattatcctcagatacagggtccaacccgaaaccagtttgtggaggccagagacttcagccccttcaggggacacgcagaggcctgtagagggagagtgagtttcttggtttgttttgttcaaagtcacacagtaagtaacggatgaggctgggaccagatcccatctctcttaaaaccaataggtctgtggcactagccgagggtaagaccttctgggagaatcagaactgagcatgaaaacaaagccaggccagaggtggggaactgaagagatcccctcctcgcaagatgtggtaactggttcctcaggttccccggggtctcaggcttagagttttctcatctcaatgacttctcctttgcttagctacctctgagcttctgaggctgaaccagtcactgaagccggggctatctgttcataaggaagacgaggcaggcactttgagtcaagaaagaactacaaagaagaggaagtggacaggtccctactccggtgtggtctacgctcccataggacttgtccacaacctccttttttcagtccccccctcatcagagaccgtgcatgtccgttctcagctcccatcatttctagaagattcttgccagagcttcttcgactaagcatttaataatcccctggcatccctttcccagatagtgatgacagttccgacctcccctggagtatgtgaagggagccgactttccacagcatcctcggtatacagacgtatgatgcagaaaaactgccaggaagcaagctgtccattcttcaatacacagctgcgtgggtaaaatggataaaagctacgcaggaagttggacgtggtcagcaagttcgggacaaaaagccagttagtggggtcctttctcacccaagcctgccactctacaccccaagtcttcccgctaccgtgatgcaccaccacccaggacacgtgacttccggtcttgagttggccacttgccagctttgggatagcaggtaaaatttcaatttccttaactataaaatggaacgtgcacatccgcaatggctgtcttcctgggtcatctaaaaagactaaagtgacaacatgtgaaaatgacattcacatggaagacaggacgggctgatttccagttgaaagtgttgggctgccaatcaatcgctcaacttatctcctgatagtcctcgggtgatattatccacaatcctgcttctgtttgctatctttcacaaagattattgaagacatttttgttctatctctttgtgcaatgttctaacattatttcttcctttattatgtttattggtgtgtttggaccttgggtatgcttttcctccacaagatttcacagattttttaaaaaaataatgtgctttaattggtcttttgagagaagggagaactaaaattagcttcggagtaaaatggacccaggtcagtcacagcttccgtgactatgttttcagtgtctgtaacatcaagagcacttcaagtgcaaactgcacattcaaagtcagctttcataaaatggaaaaaacccatggagcggggcccttaaacatggcgcaatccaggctctgaacagttgcattgaaagtctcctacgcatcttttactctgcccacctctgtgttggcttcatctttgggcaaaagtggcgagcatccttcacttggtgtgcccggtgctcacaagggggagaagtttatttttattttttttttaaagatgcacttctctgggagacaagatgctatggtcgtttccaagacggccacaatgcagtgtgtacaacagtgtagctttcctgatggcagaagacctgggcctggaagagccagtactcttgtgcttctcttggggtctacgggaaaaggagagattgacttgagtgtgtcagatctaatctcatataagcattctccgtccatgcagactttcctccatgtagctgcggaagggcaaagcagagagtgctgtggtcggcttggggaaactggctaggaggttatactgcaagaagctgcaggcgccctctgggagccgagagctacatctggaccccattcttgtaagcgtaagaaaattttctagccaccagtgagttagggataaacagctggagcttcagctccaaacaacagccaggccggcatgctgtgtctgtctgtccttctgtcctgtaacatgacaacagccaggccggcatgctgtgtctgtctgtccggcaggctgtttctgtccttctgtcctgtaacatgacaacagccaggccggcatgctgtgtctgtctgtccttctgtcctgtaacatgacaacagccaggccggcatgctgtgtctgtctgtccggcatgctgcgtctgtccttctgccctggaacatggtaaagttatgtctgcactgtttcaggacactacgtttgtgataattcattatgtggcgatagaaagcttattcaatgtccaaaattcccaatacatgaattagaatcacttggctgccagtaacagaaattgagtttggggtggggagagaagcagtttttctagaacagcatctacagtagacacagaccacagaacacagaatggatccaagtaggacaaacgacttagagatatttctgggcttgattccactcttaagacctgatttatttttgtttggctttatttatttatttattatttattattattttggagatagatttgtaccctgggctagtctcagacttactctgtagccagggatgatcatgcaatcagaagccaagtgctgtgtttgcaggcctctgacactgtatacagccgctcttaaagcctcagtaaacaggcactgggaagatggcttagtgttcaggggaac

SEQ ID NO: 632 - DNA, 850 bp, Mus musculus
gcgtcatggctgcccgtgctcctgagctcgcgcgttccctgcttgctgcccttctggcgcccgcgctggtggcactactggtgtcgccggcctcgggtcgcggaggccgggaccacggggactgggacgtggacaggcgattgcctccgctgccaccccgcgaagacgggccgcgcgtggcccgcttcgtgactcacgtctcagactggggctcgctggccactatctccacaataaaggaggtgcgcggctggcccttcgcggacatcatctcaatcagtgacggtcctccgggagaaggcacgggcgagccctacatgtacctgagtccactgcagcaagccgtgagcgacctgcaggaaaatccagaggctacgctgactatgtctttagcacagactgtctactgtaggaatcatggatttgatccccagagtcccctgtgtgttcatataatgatgtcgggaactgtgaccaaggtgaacaagacagaagaggactatgcaagggattcgctgtttgttcgacaccctgagatgaagcactggccttccagccataactggttctttgctaaattaaaaataagccgtatctgggtcttggactactttggtggacctaaagtagtgacacctgaagaatattttaacgtcacgctgcagtgaagcaggatatggtggactgagtcacaccagagaagtgtcttcggaggctcatgcacacttgaagggttggccctgcttgggacgtctccagctgtcagcttactctgccacctcttgttttaatcttgtttgcttgtgttaacagagagttgtccgtcagaagatgtggttgctggattttt

SEQ ID NO: 633 - protein, 219 aa, Mus musculus
VMAARAPELARSLLAALLAPALVLVSPASGRGGRDHGDWDVDRRLPPLPPREDGPRVARFVTHVSDWGSLATISTIKEVRGWPFADIISISDGPPGEGTGEPYMYLSPLQQAVSDLQENPEATLTMSLAQTVYCRNHGFDPQSPLCVHIMMSGTVTKVNKTEEDYARDSLFVRHPEMKHWPSSHNWFFAKLKISRIWVLDYFGGPKVVTPEEYFNVTLQ

SEQ ID NO: 634 - DNA, 32787 bp, Homo sapiens
gggaactgttgcaccagatactgcagctctgcactggcctacaaccaccgggcatcatcgaaactggacctccactattgccaaacattactgccaacatatgcactttcagttcatgttgttgaggttttttttagcccctccttcccctatccatcatgttccacttctagactaaggcatgagaccaggggaggttataaagctggactggaggataaatataagttgtaggtgttcttccatcttctttgttaccccctcctctctgaatactggagtagtataacagcaccaatcccatatgcttgccttcctcaccccctggtatcatgtcctgtgttaatctcctctccttgaatgacggaatgtcattctgagattatgaaaaaattgtaagactccagtggagccctgagatgactgcggctcctgtcaacagcttgactgcgactgtcatgacagaccttaagccagaactacttagtcaacccacacctcaattcctgacccaaagaaataatggaataatacatattcattatttaagtcactaagtttagggataatttgttaaggagcaacacaaacatagacacataaaagtataaaaatcaagtgtagagctcaatgattgtttcataaggtgagcacacctctgtaagcactgcccagctccagaaacgaacattgccaacagcctcgaagctcccctcatgctctcttccagtcattatctcccaaaaggaactgttgttttcatatttagaccttagaattatttgtctacttttgaattttatataagcagaatcatacatgtgttttgtggctggcttctcttgctcaagatcatctttatgtgattcatccatgttgcttcatgtagcagcactcattgctgaactattccactgtgggaataaaccacagtttattttccatcccactgtcaatggacatttgggggctattacaagtaatgctgctatgaacattcttgtacacatcttttggtcaacatatgtcagtatttcaggctgggtatggtggctcaggcctgtaatcccagcactttgggaggccaaggtgggtggatcacttgagtctaggagttcaagaccacctgggcaacatggcgaaaccctgtatctaccaaaaaatacagaaaattagccaggaaggatgatgtgcatctgtagtcccagctacttgggaggctgaggtggaagaatcacctgagccagggaagtcgaggctgcagtgagctgagatcgtgccactgcgctccagcctgggcaaccagagtgagaccctgtctcaaaaacaaacaaaacaaaacaaaaaatatatacaagtatttcagctgggtatatactggggagtggaatttctgggccatatgtttaatagacactgctggccgggcacggtggctcatgcctgtaatcccagcactttgggaagctgaggcggggggatcatgaggtcaggagattgagaccatcttggccaacatggtgaaaccccatctctactaaaaatataaaaaattagctggatgtggtggtgtgtgcctgtaatcccagctactcgggaggctgaggcaggagaattgcttgaaccagggagtcggaggttgcagtgagctgagatcacgccactgcactccagcctggtgacagagtgagactccatctcaaaaaaaatagatactgccaatcagtttccaacctggctgcagcagttcacatttccgccagcggtatgtgaaagtccccactgtttcacattctcaccaacacttggattttagctattccggtgggtatgtagtcacatcacattgcgattttaatctgcatctcatgagtcatcatgccattgccccacttccgatggaccatatacactccagaactccttaggaagaggggctttgtcaggcctgcactgcaggttcgcttctctctctgcccaatcctgctgccaccctttttttcccccacagatattgatccttaataagtacagatgctcctcaacttacgagggggctatgtcccaacaagaccatcgtaagcttgaaatactataagtcaaaatgcatttaacttaaacttgcctaccttaaacgtgctcagaacacttacattagtctacagtcgggcaaaaccatctaacacaaagccaatactataataaaggattgaatatctcatgtaatttattgaatactgtactgaaagtgaaaacagaattgttgtgtgggtgatcaaagtatggtttctactgaatgcccatcacttttgcatcatcttaaagtcaagcaatcattaagtcgaagtattgttaagtcagggaccatctgtgctctgcaggccaaactctgtcagtgtctgcttctgaggaatccaatctgtaacaatttgcctattcctaccatagttcctacagctgcctcaattactgtcatgtacagtatgttttaacctatgagcttttgtcaatgaacacatatatatttgtttttcatggcactgtaaggtagcaaaaatcaatctaaatcctataaatggtattgttatatgtttgttaaaattatgctttaaagctttaagttatactgttacatacacatttcttggagagattacagtatgattgatatttatagggcaatttcccccttactgcttttcttttgcaaaaatatcttagttacccacatggattacaattccaaataaattccaaaatgagttcatcagtttcccttaaaaaattctgtggagattttggttggaagtcactgaattaataggataacttggggagaacagatatcttcataaaattatatttttttctttctttctttatttcttttctttctttctttctttctttctttctttctttctttctttctttctttcttccttccttccttcctttctctttctttctctttttctgtctttctttctctttctttctttctttgtttctttttctttctttcttcctttctttttcttttttgttgagacaaggtctaactctgtcacctaggctggagtacagtggtacaatcttggctcactgcaacctccgccttctgagctcaagggatcctcccacctcagcctccccagtagctgatactacaggcatgcaccaccatgcccagctaatttttttttgtattttttggtagagatgggatttcaccattttgtctaggctggtcttgaacccctgagctcaagtgatacacctgccttggcctcccagtgctgggattacaggcatgagccatcatgcctgaattgatctttctaacatatgaattttctatggcttcccaaaatcaaaatctcttcttggcatgatatatttctcctacccagctgaacatgctcatctgcctgcattggttcttcacattcttttcaacttaaaatggctttttctgacacatcatgtcttcttgcctctgtacctactatttcctctgtgtaaaactcttcctctccttctctctagtcccaccttctcactgtctgccacgcttctatttgttcttcaagtttcaactcaagaattacctctgatatgaaccttccctcgagacaggcctatgctccttcttccctggcgcctttgcctgtggatagccctccacgttgcactaatgacatcaaattatactttgtctctttgcttatttgtgaattaattaagcagaaatttttcttaaaattaaggacaatgtctattaataattttaattctcatcacccatcacagcacccagggcttgtttggcactcaatgcatacttgttaaatgcatacatctaatgtacaaatgcataagtagtggaattatgggcatctggcaggcaaagaggacagatattttgttacaggcactctttcatttgtgcttttaaaattactatgatgatgatgtgaaaggctggccttattttagtgcaaattctaatctaattattttcttctgactcgcaggtaactttcttctcctgtttaatattgctgatatattgatacaccatggaataatatgtagccataaaaaagaatgagttcacgtcctttgcaacaggaagccatcattctcagcaaactaacacaggacagaaaaccaaacactgcatgttatcactcgtaagtaggagttgaacaatgagaacacatggacacagggaggggaacatcacacaccaaagtctgttgcgggttgggggtaaaggggagggagagcgttaaaacaaatacctaatgcatgtggagcttaaaacctagatggcaggttgataggtgcagcaaaccaccatggcccatgtatacctatgtaacaaacctgcacattcggcatatgtatcccggaacttaaagtaaaattaaaaaaataaattttacagatatattgaaatactgggatgactactcttctaaagcttagttaatgtgtttttgattaaacaaatgcaatccaaaagatacatattaccatgtctttctatgtagcaagcactattaggcatttggaaaacatgtcctctagattgaaaggagtcaagaattgttccccaaatgtctggaaaataattgttatccaaatgtaaacgtgcatgaaagagaaacatgtaaaactcaaggcagtcagcaaaagggcaggttttcattgctaccttttaaattcggaacatttgactaaagtgaagggatgtgagaagaaccatggggaaaggctatctgcttaatgaaaaataataggcatcggcattttctccctcaaagctggggtgggctatgaaagtacttcctcaatagctgcctggggactttcaagacattttataaagttatttttttcaagaggcttttttttttcctgcagaggccacagtgaaaagtgtgaaaaatctatagagaaattaaatgaagcaatctacagatttttagagtagaaagtgggaacagaaatagtgggaaaaggcctggtatggtggctcacacctgtaatcccagcagttcaggaggccgagacgggcggatcacctgagttcgagttcgagaccagcctggccaatatagtgaaaccccatctctactgaaaatacaaaaatcagctgggcgtggtggcatgcctgtaatcccagctacttgggaggctgaggcaggagaatcacttggacccaggaggtggaggttgcagtgagccaagattgcaccactgcactccagcctgggtgacaaagcaaggctctgtctcaaaaaaaaaaaaaagagaaatagtgagaaaaaagctaacaattactaacacatagctaacaactactgagcatctattctgttccaggcactataatggatattttaaatgcattctctcatttaatccccataaaaatccagtgaaggaggagctatgattttaatgacagggaaattgtggttcagtatcatcctatgtaatctcatgcttaagtggctaactccagagctaactctcttcactgtttcactagctatctactatttgaagcatgcataccacaaaagagaagttttctattctttaaagactaaagcctgagctatggcagacagcctgagaaccctctgcccttggtgtgactgttctgatacaattcttttgtcaataacatgtaatgggtacctgctagatgcctggatctgtgctcggtgctgggagacggaaaggacaaagccactgcttctaacctagaaggaaccggtggtgacctagacaaataagcaagggcaacaccacgtaaaagaaggagtttgcagggtgggttcttcataaggatcaaacctaggcataaggaaaagataactattccacagtgggcctgtggggatggggaccagtgtaggttgttcacataaaaacataaagtcaggatgagaagcagcaggacctgggatgattatttcagccactcctggctaagggcttcccctaatatcccaatgaggaggatttgctaaacaaaagctggagcgcctggttattagcttatgctgatttagtcatcctcacttcttattcattttatacagctctatgtgcaaagaattttgccagatattattcactgtcaggtagtctttcaataaatatttatgtagtgcccactctgagcattgggaatacgaaggcggacaggatagacaacattcctgctctcccggagctcgcgttctaccagtggagacaataaacacgtagctaaaaaaataaatactgttattatagtatttatttttgttgtgatgaattaatgattgctatgaaagaaatagagttggctgagggagagtaactggggaaggcctctcggaaagagtgctctaggagtcactgctgaggagtgacatctaagtggaggtcccaatgggagtgaggtagccataccagcagctgagggaagagcattttgagcatagggaacagcaaacacaaagatagatactgaggtggcgtgcttaaagccagagggtttgtagacttcattctcctgctctgatgcctgagaccaagctctaggcacctgttttgtaatggagctgtaatagggtctattgctattttgtatgccagcaataaatgatgtagcaataaataaatttttttcatctttttgcaaaaaaattcacattgtgaaacttacaaaaggctcatactttgcatgttaatagaaaaataaggccaggcatagtggctcatgcctataatcccagcactttgggagaatgaggtgggaggaccaattgaggccagaagttcaagaccagcctgggcagcatatgagaccccatctctacaaaaaattaaaaattagccaggtgtggtggcatacacctttagtcccagctacatgggagtctgaggtgggaggatcacttgagggaggatcacttgagcccaggagtttgaggctgcagtgagctgtgagccaccactgcagtgtagcctggatgacagagcaagaccctgtttcaaaaaaaaaaaaaaaagagaaaaagaaaaacaaacaaccacaaggaaaaagaagatatagggctggaagaggcatcagatattaatatcatctaatccaactcctcattttagatgagaaaattgaggcccaaaggtaagataaaatcccatggtcacatggcacaatagtggcagacctgagattagaactccaaatgtgagagtattctttccttaacaggtaagggatgaaatgtttataactggcaggtactcaaactatttgtattaatcatttgtttttaaaataatgaacccaattttcctccttttgaatttctcccacttagttttccatctattttgaagttcttccaaattcagttgttataaagcaaaccaactttgattaaggatccttcttaccccaatgtcgaaatcagggtgtgtgacatcatttggccaccagagggcactgaagtctcctgttcagagtagatgatcttgcttcttctgatacacaattcctactgtgtagcctgagaagttggctgaatattaggaggctggttttgagaagcgaagtagcggtgggactttggctcacacacctgttgcccacggctgctcacatgactggccaacagcagctgagtgaaattacctcacctctgttacacaactcagcctcacagggccaggtgtctgccagagccagctttacaagatgacaaactcttgcactaacaccaccatacagtctttataacaacaattacagtggaaatttgaggccaggccaaaaagattaagacttgctccaaaaagacgtgaccaaagcttaaagtcataaagaatggaggccaggtgctatgagcttattgaccagtttccagaatagcagaatcaggagcacccgtgagagaatgagacaggccatcttagaagaagcaaaaggaatgtcccttacatggagcagggaagggcagcgggggcaataaattcatgaaaccgccgaccccaagcttaatgtcttaacaggtcctgaactggtaagttcaaatttgtacatgggatattgatagtagactaacaatccctttgtgcgtctatatgagggactcctgggccagtagtttaaaaggtcttgacgggcaataacaaatgttggtgaggatgtggggaaaaggaaacccttgtacactgttggtgggaatgtaaattagaataaccgctttggaaaaaaatttggagttcctcaaaaaattaaaaatagaggtaccatatgatccagcaatcccacagctaggtatatccctaaaagaaagaaaatcagtatattgagagatgtctgcactcctgtgtttactgcagcactattcacaacagctaagatttggaagcaacctaagtgtccatcatcagatgaatggataaagaaaatgtggtatatatacacaatggagtactattcagccataaaaaatgaatgggatcctgtctgtctttgcaacaacatagttggaactggaggttattacgtgaagtgaaataagccaggcacagaaagacaaacttcacacatcctcacttatttgtgggagcctaaatggaaacaattgaactcatggagacagagagtagagggatggttaccagaggccaggaagggtagtggggggacttgcaggggaggagtggggatggttaatgggtacaaaaaatagttagaataagacctagtatttcatagcacaacagggtgactatagccaataataatttaagtgtacatttaaaataactaaaagtataattggattgtttgtaacacaaaggataaatgcttgaggcaatggataccccatttaccctgatatgactattatgcattgtatgcctgtagcaaaatatctcatgtaccccataaatgtatacacctactatgtacccacaaaaattaaaaattttaaaataagtaaataaaaagttttttaaaggtcttgaactttcgggcttctgcctaactttactactagtgtaagtgggccccttgagatttcagcaccccagcatttgttagtgactgaaataatgaaaattctgatcaggcccttgcttgcacatgttgacaactctctttttgcccaatatcccttgttcctacaacataatcataaactgctgatgtactgtttctttatcaagcaggaggagataataacttcagggttacgaaaaagtttgcaggaggaataagtcctttgaagtactttgaggccagcttctgtcgcccagaagtctgattgttcaaggaattatctgagactgaagaaacacagactttttccctcgattccctgaaactccccctccctgactcgctggccgcataaacactctctgcttcttctttttgttagggcggatttgagagatcttgccctcccgccttctcgctttggccaaatcgaataaacttttatctccaagcacctatatgtcagtgtttggcatcagctacacatggggtacacgagcctgagtctgggcttctacaacgctgggaccctcgctgttctttggagctgatggtaaattcaacagaaaagaggcgcgtgggtagaaaatgcagcatttcctctcagatgccagatattcatctccaaaggtattaaaaggagggggtgtgtgcctgtgtaaagaggctggtcttttcctagcagtacgatttgggcaagttgcttgatttcttcaagcctttctttttccgcctgtcaaacaaaacaaaacaaatatcccgtttaggacaaattcacaatccttaaagagggcaggcagagcgattggaatgcagatgaaccaatcccttctcctgcaggttgcggagctgcagagggaccccgccccctgcattgtgcttagctctgattggcgcctcgcggagggggcggggcctgggcgcgccgagctccggctgggtccctgcaggtcttggggcccgggactcttcctggagacaccgccatggccgggctatcccgcgggtccgcgcgcgcactgctcgccgccctgctggcgtcgacgctgttggcgctgctcgtgtcgcccgcgcggggtcgcggcggccgggaccacggggactgggacgaggcctcccggctgccgccgctaccaccccgcgaggacgcggcgcgcgtggcccgcttcgtgacgcacgtctccgactggggcgctctggccaccatctccacgctggaggcggtgcgcggccggcccttcgccgacgtcctctcgctcagcgacgggcccccgggcgcgggcagcggcgtgccctatttctacctgagcccgctgcagctctccgtgagcaacctgcaggtgagctggggcccgcggcttccccaggcgggctgtgggcggggcggccacagagcgagccttcactctccccagaattcttcccgggaagtggagcgtggctcgaacggctgttgcttctctgccgcgcaggcaggtaggtgggcgttgcagcgtcccagatgttgggcaactgggtaccaggaatttcccacaagcctccgccactgggccacgcacctggggtaaattctctgccagcagcccgaggacttctcatccgtgagtggttctcagtcgtcttggggcccagtgtctctattaactgtgctcctattctcttttttttttttttccctttgagacagaatctcactttgtggcccaggctggagtgcagtggcgctatctcagcttactgcaacctctgcctcccaggttcaagcgattctcgtgcctcagcctaccgagtagctgggattacaggtgcgtgccaccacacccggctaatttttgtatttttagtagaggcggggtttcaccatgttggccaggctggtctcaaactcctgacctcacgtgatccacccatctcagcctcccaaagtgctgggattacaggcgtgaaccaccgcgccctgcctgggctcctattcttaaaggttttacagggcatagagattgttaggtacttaagcactttaatatgtgacttcagggtttctcactctcttacccttcctgaattaagcttttccctcctgcagcaagacgctaacgtacaatatcatggacgattacaatgattactgcagtctttaggcctccacaggcatagtggctcctcagtaagatgcagagctgattgaaggtgtatctcttcctcgccctttgcccaccttctggtgcagggccacacttacaactctgatggatctctgctgtctcagggatggggtcacagacacccagcttgggaggccggagacacacagagtccaggaatggagcctgatttgatggagggtctttttgacaaagctctcacatttgagttcaactctgaaagtacaacattgttgataaagacaggatgcaagaaactgatgcttgattaatcacttttccatttgccttccattcgttgtctcttctattaattctttgaagtaggtattatataccccattctgcagatgaagaacttgaggcctacctaggttaagtaacttgtttaaagccagcgggcaaacccctagtttcatctcaggttcatctttcttcaaaccacctatcacaggctggtggcccatcagctgaatatgtcccacagaccggtttggcctacacaaagttctgttttgtttttaataaatttgaatttgttaccaacattttaaaatttagattttactttaaaatgtaaatctctaacttttcttgaaaaatgggaagatccagtgacactgtgggcctgcactctttgagcaaaaacagaagcagtgccctcttttatctaaggcagatacaccccagttcaccattttcttattcccagcccattccacacctttaggcgtttgctcaaaacaaactcactccactccatcagtggtgctcaactttgactgcaaatcatagtcacctaagaaggctttaaaaatgggatgccaaggtattttattgaaagcacattttattttaagacaacaccccttcccgcctccccacaaaccactccctgatgattctaatgggggaggagggagattgaccaatacataatcatatttaaatttgtgaggtgactagggagttgctggtattattgtccccatttaggaagtgaggaaacacagactcagaggtgcagggacttaccctgtgaccagtcagctaatggctgtcaggtaggacattagcccaggtctttcatgtttctagaaatagacagggcagtggcaaggaacctacccagggctttaggtttccatgatggcagtgaaaagaagtggccacattagaatttgtctgacttgattccatcaattagcaggtcaaagtttctgcttttttcttttcctcctcctgacctccagggtgctctgcatttcttctcattgacagggggtgaaatcgttcagaaggaacaaaaagacctaggtttgggaccatttctcatgtgtaaaatacctgtcctctgtaacttagagatatgttgtgagcttcaaacgtacttaccactgggctgtttcttttgtatgtctctttctttgtggcatttttgtatagtaaatgtctgtaggacagtgttgctgatgttagcttatagtgggaccgtgtttggctgcagagccagtgagtctgaagggaaatcttggggtttgattatttgcaccaagacctcttactattagcctcccttccattttggcattcttttcttgtgatgtgcccctttctgttctggtcactcttggttttttttctctgacccactaaaataagtatccctcaaagtcagtttcctactcttttgttccctgcagcgatcctcagaagattgtatacactctcgttgtatacattctcttctagtccttactaggactcacttccagatgtgtgtccatttctgacctcttcaaagttctctatatttctgcttgctgttcatttttgcttcgttactttgccaccacttcaaattcaacatgtttaaatccagtccttcttcctcctgaaacaagctgcttttgatcttctgcatttctgttagtggaattattgttttctcagtaaacccagttggttctcactgcctccccaaatccctcagttcccaagtcctgacagttttttgttgccttctttacctctgtccttgccccttcctcttcattcctgccacctcatccttaagcttatcatctcatgcctaaaagtactagaacagctcttacatagtcttcctgtctgccccatccaccttgcctacccaaatagattaacaaaaatacctgtcacagcattgccctctggccagaaacctttaacaatacccagctgcctatagctgcgtaagagctacctgggatgtttgtttaaaatgcatatagaggcgggtgcggaggctccagcctgtaatcccagcactttgggaggtcgaggtgagcggatcacctgaggtcaggagtttgagaccagcctggccaatatggtgaaacccacctctactaaaaatacaaaaattaactgggtatggtggtgtacgaccgtagtcccagctatttgggaggctgagttgagagcatcagttgagcctgggaggcagaggttgcagtgagctgagatcacgccattgcactccagcctgggtgacagagcttgattctgtttctaaataataaaatgcagatagaggacagcttggtggctcatgcctgtaatcccaacactttggaaggccgaggtgggaggatcacttgagtctaggattttgagaccagccagggcaacacagtgaaactccatgtctacaaaaaataaaaaaatattagccgggtgtggtgatgcacatctatagttccagctactcaggaggatgagatgggaggatcacatgagccctggaggttgaggccacaatgagccatgattgtgccactgcactgggtggctgcctgggtgacagagtgagacactgtcttaaaaaaaatattgcaggccaggtgcggtgtctcacgcctgtaatcccagcactttgggaggccgaggtgggtggatcacaaggtcaggagttcaagaccagcttggccaacatgatgaaacccagtctctactaaaaatacaaaaatcagctgggcgtggtggcacacaccagtaatcccagctactcgggaggctgaggcaagagaatcgcttgaacttgggagttggaggttgcagtgagctgagatcgcaccactgcactccagcctgggtgacagagcaagactccgtctcaaaaaaaaaaaacaaaaaaaaattgcagttatttgggttgggagtgaagcctgtttcaacattttaacccaaatcagcattttatcaagctctccaggcaggtggttcttagaaaacagtgcctaaggttggcccacaaattacaatctagactccttaacttaggttggagccctctccactcccaaccccaggctcctcccgtaggaaagcccttctttccagcaaatcaggtttcttggtactgttcatcaagtcttaggctcacccagttctgtgttttttgcagtcagtgtctcctctccctttaatatgtcctcccaccttctatcctggttttgaatatattataaagctccttacagttcctctatcactctggtctatgctggacatacacatttgtttatgtctgccttttcaaccagattataaactcacggagggagagagtttacctgagtgtccccctccccttctttggtctcctgtggtgccttgcctaatagtttctagacagtgactatttggctaaatgatttcaaagaaatctctttatgactctttgttttgatgggtcagtgtgaaatggcaaaattctccacacaaggcacttagagcttaaagagctaaatagtctaaaatgcgatgtgtgaattttgctataatctgtcaacagtgccttttatgaagttgatttctgaataagaaagcattaagaattttacttgtgttactttttgaatgtgggataaaactcattgttactaaagcaggaatgaacaacttctccagttttgaaatcacatgacagtttctgctaatgtaagataaccaagtagcatgattcagctactttcttgcttaaatcgcgtagttagccaattgagcaactgtggtgtttttagcaatggttttgtatagagtttaaccctttaaatctttcagtgaagcctatagaacagccttgaatttgggtgtcactataattataattcttctgatgaatatggaataaattcagggtttcagaaaaagaatattgaaataatttttaccaagtcagttcattttaaatatgaacccccgcaccccctttggggagtggtcaggatactttccaagtattattttcccctgagtggaaggtgatgttttatgattcattgtttcgtggaagaccagtcaagctctagggacatcatgtatgcaacttttgaaatttattacctctccagaaaccatatttcacatgagaggatcttcattttctctctataggagaatccatatgctacactgaccatgactttggcacagaccaacttctgcaagaaacatggatttgatccacaaagtcccctttgtgttcacataatgctgtcaggaactgtgaccaaggtaagtagttatcctacaggaagggagatggtttcagaacaccatcgtattcacaatgaaagaatagatcatttttcttttgagacagagtctcactctgtctcccaggctggagtgcagtggtgtgatctcggcttactgcaacctctgcctcctgggttcaagcgagtcttgtgcctcagcctccctagtagctgggattacaggcacgcaccaccacacccagctaatttttgtatttttagtagagatggggtttcaccatgttggccaggctggtcttgaactcctgacctcaagtgatccacccacctcgacctcccaaagtgctgagattacaggcgtgagccactatgcctggcagaatagatcttttgagaatgaaatgcagttgatttgtgattgccatgcccagtcagaacatgttctattctaataggtgaagtaattccatgaaaaccaaacgttttaataagttgctttcatataggtgttaaataagatatgacaaaaatgaatgattttctgaagccaagcagatgtaacaactatgaagctcctgtatataaagttattcttactaaagagcatctggttgaccaaagccctctactctccattacattttacattggtataatgtttttccatgtctgggctccttgtctccatattttaacagtggcttaaagcagagaaaacatattaagtaggccaaccagaggactatccattactgaaaactggaagtgaatttagtttggatcacctgctgaagggaagaggtcaaatacaatctcaggaagagcagtgggcatggtgtcaggagtgctgatctgattacccagccagcagatttgctttttgaccgtgtcaatcattaatgcctcagacaagtgttatttatggtctgtaaattctttgtggatgcatctctgtagttgagtgtccttcactggcaggaaaaagatggaggagcagcacatgcttttgagttctgttatgtggtttctaaacatttttatccttcagtacattcatctgtatgtttaacatgtccatgttatgggataaatatgctaaacattacatgtcttaggcaccagtaatgttacagtacttagtgctagttattctaatagctcaaaatgcctttttaccaatgaaagttggtattatacttacagtggtttcccacttcgtggtatctgttattaccaacaattgaaatctttattctctgcattctttacatttcctttattttctcttgattccttaaggttaagatcaagatttacaactaagtaaactcttaggatttatagaatgctagagtcacacattcttttttttttttgagatggagtcttgctctgtcatgcaggctggagtgcagtggcacgatctcggctcaccgcaagctccgcctcccgggttcgtgccattttcctgcctcagcctcctgagtagctgggactacaggtgcccaccaccacatctggctaatttttttttttttagtagagatggggtttcaccgtgttagccaagatggtctgagtctcctgacctcgtgatccgcccgccttggccttccaaagtgctgggattacaggcgtgaaccactgcacccggcctaatcacacattcttaacaaatgagaagataaagtgttactgccataagaatgtttatttcatatatgtcctttaggtgaatgaaacagaaatggatattgcaaagcattcgttattcattcgacaccctgagatgaaaacctggccttccagccataattggttctttgctaagttgaatataaccaatatctgggtcctggactactttggtggaccaaaaatcgtgacaccagaagaatattataatgtcacagttcagtaagtacttacacatctttcacctaagattgccgcccttacagccatcctcagccttctaaggcgaggggggtttaaccgtttcatgtgccctggacaccctgggcagtctggtaaagccgctgaccccttctcagaataatgttttaaacacataaaatacagaggattaagaagaaaatcaactataatgaaatacatttatgaaaatatttgtaaatgtgtggtataatcgttttattaatatattaaatataagatctagtaataagtctattactttttctttttttttcaagacagagtcttactctgtcacccaggctgagtgcagtggcaccatctcagctcattgcagcctccacctactgggttcaaacgattcttatgcctcaagcctcccaagcagctgggaatacaggcatagaccaccacacccagctgattttttgtattttcataaagagggtggtgtcgaactcctgagctcaggcagtctgcctgcctcagcctcccaaagtgctaggattacaggcatgagcgaccatgcctggccttttctgtgcttttaaagtagtgaggattgaagacaatattttaagacatctgcaacacctgtgacatgatatgaatgtatctgtgatttctctatttctgttggagacagtcacagataggctgtcaccctgtggtttattccctacattcattattgaaggaaatgatacattcagttagagcctaatgaaaatgaaaaaaaaatttttttgagccaagttcgcagacccctgaactctgtctacaggcctggacaccaggttgagactccattttaaggctgtgcttattgggccctgaacagagcccagttatgacccacgatggcattttctcatgaggcttagactcaggtgctcctggactgtgaatgcccttcatctgagtctgagcaagtaaccccatcccatcagccccagtactacaaatgcctatggggatgtgtggtttatcccactaagaagtgcatggaagggaggaggctgagataaaagaggccatgggagaaaataaagcccaggacctgaagacagaaagggaaaggaaagaagagtgtaactggagtctttggagttagctaagggttcaaatgagggaatacaagggactggtgcttctcccaggtgacacagggaattctggcatatctggggaggtgataagaacagtaacaataacagctagtgtccattgtttattactggctgggtgctatactggctacttttcatgtattaactcattcagttctcaccacatccctttcttgcgcaaccttccaccgcaacaggtaggtgctgtttttccacatgtgtgaaatggaaagctgatgcacagagaacaaactggcctaaactgtttgttcttgcagccaggaagtggtggtgctgggactcaaacccaggcattcttgctccagagccatcacctgacttctatccatgatgctgtacttctcctctggctgcctcactggtagctggccaggctcctagctcagtgtaatttataatgcactttctgcttgtaatgattgactgctgtttcaggagattacggtgatgataactaaggtagacttgtaggttgtaggtcatttgagggcttaaattcttagcatttatttaatctctgtctttttcaattgtagaacaattccgtgttgaactattgactccctaccatgattggaaatctcagttttgttttgtttctaattttttttaattccaagcagggcctaggacagtgtgtgtcatagagcaggtgtttaggaatgattgtctggctcattacttgagacaaacactctcacactctgttggaataaagaatcccacagtcctggcgcttgttttgctgctgtgcatgcaggagaggcacgggccactggtcgtcttctgggctggcaaagccatctgacttcataggaatatagaggtagcaattacaactttattccctggcaacaaattatcaggatgactgttaagaagggcctgctcttcgaagttaaagtttactttcacaggacataatctctaaagcgcagttatctttatataaataacatgcccaaaggcagtgcctggtttaataacaaaataaaactgttttcccataagtctccacactgaataagtgagtaaaacagatacttttgaggttcccactttattatgctgacaaaggagcacttctctgcagcacagagatagaacatttttcccttgtcctgagaggcggcccaaaggctagagcagatgtgactcttctgaggcagtgcaccagaacccgagggatgggcagggcctgaaagctgcccgctctgaccgggtgcctctggctaggaattgtccatctccgagtctaggagtgcccccactaatcccacccgccaggtttgccaccagagctgtttaatagtccggggagtgtacagtgatatctgtgaggaccagggcccccatcttcttggagaaccacccacaggggcctcacaggcgttctggagcttccccacattggcagccaccttgcttggcttgcccagaaggtattattcctccaaataccacgaagccctctgcatctgaaatctgtttcacacagatggagactgccacttgtgagagctgatacggagcttaactgaatgtggtttgcctcattggactgttgggtgaagaccccatgagcatgtttgcatgatcagtggaaggcttaaatgtctacacgaagcatttgctggcaccctggaataagcagttctttttttttttttgagatggagtctcactctgttgctcaggctggagtgtggtggtgcgatctcagctcactgtaagctctgcctcctgggttcatgccattctcctgcctcagcctcctgagcagctgggaccacaggcacctgccaccacgcctggctaattttttgtatttttagtagaggcagggtttcatcatgtcagccaggatggtctcaatctcctgacctcgtgatctgcccgcctcggcctcccaaaatgctgggattataggtgtgagccaccgcgcccgcccaacaagcagttcttataagcataagcattgcttttgaccactgttaagtctgggcagcagcatgtttgtgctaagcctcattttatctcctctggcgcacatccggatatttcctagcaaacacacaggtaacaaaaggtcatggattacagacttgcccagtcttgatacctagagatggattccctggttggtggcagcagaaagggggaaagttcacctcccagctgtggtcactatcactgggcaatggctaatcactgctcttctgccctgatgttcaggaccccttctgttctcaactatttttgtcttttaagccttcagatactcttaaatgagataacaacagcagccacggcagtggcctgcttcttgctacatcctagtagcgtttatcagtgtgtcagaatcatacttggagaggagggttattgctaaaatgaggattcctaggccccaccctcaacctattgaaaccgaaactcaggagtctgcattttaacaaacccaagtggttatttagtatattctagtggttgaaatgaactgaaaatcttaatttagatcagaaattttatctagtccttccctagaatgaattaatttttaagatttgttaacccagtttaacaaaataattcttctctgttcccctttctaggtgaagcagactgtggtgaatttagcaacacttatgaagtttcttaaagtggctcatacacacttaaaaggcttaatgtttctctggaaagcgtcccagaatattagccagttttctgtcacatgctggtttgtttgcttgcttgtttacttgcttgtttaccaatagagttgacctgttattggatttcctggaagatgtggtagctacttttttcctattttgaagccattttcgtagagaaatatccttcactataatcaaataagttttgtcccatcaattccaaagatgtttccagtggtgctcttgaagaggaatgagtaccagttttaaattgcccattggcatttgaaggtagttgagtatgtgttctttattcctagaagccactgtgcttggtagagtgcatcactcaccacagctgcctcctgagctgcctgagcctggtgcaaaaggattggcccccattatggtgcttctgaataaatcttgccaagatagacaaacaatgatgaaactcagatggagcttcctactcatgttgatttatgtctcacaatcctgggtattgttaattcaacatagggtgaaactatttctgataaagaacttttgaaaaactttttatactctaaagtgatactcagaacaaaagaaagtcataaaactcctgaatttaatttccccacctaagtcgagacagtattatcaaaacacatgtgcacacagattattttttggctccaaaactggattgcaaaagaaagaggagaagaatattttgtgtgttcctggtattcttttataagtaaagtttacccaggcatggaccagcttcagccagggacaaaatcccctcccaaaccactctccacagctttttaaaaatacttctactcttaacaattacctaaggcttcctcaactgccccaaatctcttaatagcttctagtgctgctacaatctaagtcaggtcaccagagggaagagaacatggcattaaaagaatcacatcttcagaagagaagacactaatattattacccatatacatgatttcagaagatgacataagattcctcttaaagaggaaatgtcaggaatcaagccactgaatccttaaagagaaaagttgaatatgagtcattgtgtctgaaaactgcaaagtgaacttaactgagatccagcaaacaggttctgtttaagaaaaataatttatactaaatttagtaaaatggacttcttattcaaagcatcaataattaaaagaattattttaatgaaatgtgttggattcgttttcttaaacatagacattaatatttattacactttgttttattgtctactgtcgaaatagcatgttcctaaatcagtcactggctgtttcaaaacttgaagtgaataataccactctttctaattggcaaaaagctcattgtgtcctaaaattctgggcatggccagatctagcctttgtcacaggttctgcctcagggatttggttgccagtgtaccttgtgatagaattaggttgagggcagctatttggttttctccctttacccacttagtgagttttttctccagcatttggaaccacataaatacatatcgacattcaggtaagatctagttatcatacagagtaaagtcaaccagtgtttcacagcaggcagattcttttataattgaatgtgccagaatatgtcactgttaatattccagttagccactagggggcactggactactctttgtgcaagtttgggtttcttacacagccaaatcaagcccctaggaataatgctctgggttaggagctggagtaaatgcagctcagcaggggcaagaggagaagcagaggcctgatttgctgctgctgctgctgctgctgctgctgctgctgctaggttttcctgggtttatcattccctccacaccatgtgcttctacatcaggcttctggtctccttgcaccccacctgctgcagaaggagaacagatccctgggctcaaacagctaggagatgagtatcttagactggggtggggagggggagtcagccttggtgcagagagcaggacaggccctgatagagaaagataaaagtgtaaagaggggccgggcgcggtggctcacacctgtaatcccagcaccttgggaggctgaggcaggtggatcacgagattaggagatcgagaccatcctggctaacacggtgaaaccccatctctactaaaaatacaaaaaattagccgggcgtggtggcaggcgcctatagtcccagctactcggaaggctgaggcaggagaatggcgtgaacccgggaggcggagcttgcagtgagctgagaccgcgccactgcactccagcctgggcgatggagcgagactccgtctcaaaaaaaaaaaaaaaaaaaaaaaaaaagtggaaagagggagtagctcaggatcctgaagctacagagtccagacagctgcgtttggcagatgctatcttgaccatccttctgcactcagctggtcaaggccatttgtctttaccaaccatggccaataatcatagtttattctgtcttctagtccaggttcaaagtccttgacaggtatgtgggggagtggagaaaaatctttatgaaatgtgacgaagttcaatgaaataaatgcatcagatattctgaggaggttgctagtgtgatgttcccttcttagtagtatttagactgaagatcacaaagtaattgaaaaggagactactttcttttaagggagcatgtttttcagttttagtactgaggaaataatgctctaatttgtgtaatgctggttggtcagtgtttcctaggggaattccaaactgtcacttcaaaaccaagtgttctataaatattattagagaagacaattataatttaattataattccttttggaattaaggggggtacaaatcagtaaaatgtaaatttttcagttttttctttaagatttattgtaagacatttgtataggaaatgtggagaataaaaagtttgacatttataacctcaccaaccagcatggttgctaatattttgggtgtgttttcttgggagtgatgtttaaacatagtcaagatcttgctgtttaatgaatgtgtatcatgcttctttcactttatcataaacaaccgtgttcctagaagccattcacgaggatggctgagaatggctgcagaatatttcatcagatcaatataagcaggccaccaaataatggtctgcattgggactctgttgctagtgacaagaaacctaagtcaaagttgtttaaacaaaaagagttcattgatcttatattattcagaacttggctttcatttcctggctcctctttctgccgtgttagttttcattgcagccagcaatcttaccaccaagaggatgtgtccttcctagctgggccctagccattcccgaataatcactgtgtctgggaatggggtgccctctttggccgaacttgagtagtgtggcttctcctggagttgcgggttcactcagcaccatcagaatcacagagactgggagaatgtagaagggggactcctgcaatgaaaagagtgcttatgcgaactgaaggaacactgagcaggcaaaaaccaaaggctattagcattttctccagtttttgcatatttaggttactttcagttttttcctcttagaaaagtcttacacataaaatattttctacatttctgtttatttccttagattcccagcagtggaatttccaagccaaaagcttttggtacatgttataaattgcttttaagaatgtgtatcaattataatgtccagtgtttgctttaaaacattctagcaaagaaaaaagtataggggattagatgaggagaaactggcaaaatggtaacagttgaagctaggtgaggtgcctggagattcattttgctattattctcttttgtgtatgtctgaaaattacaaagatttctaaattgaattgaaaaaaaataaagaattgaggatctagagaggttaagtgactttcccaagcccacccagttctggtctccaggctttaaatcctggccatttcttctactccacactaaattggcatgtggtcatattgtctgagacacagattatgccagcgtaaggcttcctgactcttcttcaccccgcaacacaccaaggcaggaatgcagagctaatctatgtttgtgggtggggagggggcatgagtagtgggtgctagggagctagataacaagtttggcttggtgattcaggagttcaatagagatttcttgaaaggatgttttcagtaaaattttggaaaatacataataatgggggaggggagagaatttatatcaatgaacagccctgcaagcagtgtatgaaagtgcttactctgcgatgggttaaaatagtgtgttattttaattggcaattcttaaggttactaataacattgaacattaaaatttattttggtttatttttcctcattgaaaactgtcaatttatattctttgtccacttatgtttgggggatcattttaaaaaattgatcttgctgaattctgtatattcagtctatgaaatcatttagttagtaaatttgttgctaatactcagttttccttttaagttattttgtttaaaacctatagattttccatttctatagaagaaattaacataatatttttcccttgacttctttaagtttaatttcctttaaacttggtatgtttgtttcctttgagaaatttgataaatgtcagttcagattttcaaattgttatgtttaatttttatactttttaatcctttagaatgcattttgtgtataatgttcttcacttttttggatgacaaacccaaattatgcttagcttttgtagtctagatgtgaacccaaatctaagcatagctttctcagaagtgaggatgtaagtgagttagggccatcggcctagcctgctggacagtctgtctgagagacactctgtatcccttagcttgaacttgagggattggaattggcaaagaagcatggttctgataatattctcataacctttggaggttgtctaacacacacacacacactccttagctagattctcaagtcccaccacaataaaacttcagctggctctcccaacattatctgccattcctcagtgtatcctatgccatgaccagccaatctgatctggttataccccaaacttttccctttggacttttccacatgctcctcccttagccaggcatctcctacctcctcatctccctcacttttcaggagtaggtagtcctttgaaggccgagtctgcatctgatatatttatcactgtagccccaaaacaccaagtgtcaatattccattacgtggagtaacccctcaatgaaattttaacaaacgttttgcttacagactttgtactttagtgaatatagtggaagatggaggttggacctccaacttgctgtgtgacttagaatgaagtgatttgtttcagtgaaggcacatttaatcccaagcacttggcaaatctcaaggagactttgcttggcaccccagacatcagcctccattaaggaatggcattccacattacaggcttggatggagacatctgtcttgtgggcacgctgagcaactctgccacaaacgttccatgaggaagcaagggatttcgaagtgagttaattatcatgtctttgatttttcagatttggcggactatgtctcattgttctgttcccaaagcctgatgtatagacgctgctcaaatacgcttttgagcatggaatgagggcagagcagcttaaccaagacacagtctcctctctctctttacggctgctctgagaaggggaattcagcacattatatgcatgcccagagtcggtcaacacaaactctcctatttggttgccaagagtcatctgtgaccctgggatttatctttgtcttagtttgcccaggctgccagaacaaaataccatagactgggtggcttaaactgcaggtatttatttcccgcagttctagaggctggacatctgcgatcagggtgtcagcaagagtgggttctggggagggctttcttcctggcttgcagacggccgccttcttgctgtttcctcacatggcagagagagatctctttctgtcttcctctttttttttttttttttttttttttgagacggagtctcgctctgtcgcccagactggagtgcagtggtgctatctcggctcactgcaagctccgtctcccgggttcacgccattctcctgcttcagcctcccaagtagctgggactacaggcgcccgccaccacgcctggctaattttttgtatttttagtagagatgaggtttcactgtgtttgccaggatggtctcgatctcctgacctcttgatccacccgcctcagcctcccaaggtgctgagattacaggcgtgagccaccacgcctggcctctctcttcctcttcttctaagaccacagtcctgtcagatcagggccccaaccttccaacctcacctaaccttaactacctcctaaagactctacctcccgatacaatcatagggtgggttatggcttcaacatatgaatttgggggaaaacaattcagcttatagtaattgtgtttggaagagaataaatgataaggctgctttgttcatcccaaacctttcctcctttgataactcccaggcccacccacgcaagaagatttatcctcaatggtttctagtccattcctgctctagactgtggttttacgacacgcttttgcaggttgtatcctgcacaaaggccccagctgacagggaagcaggggctgaaacccagcctgagctcatgcctttgtcctggtgtgagcagcatcaccccaaagggcatctttcctaaaaatgacactttatgggttggtggcacctggctttcgggccatttcttactttagaagtttttgcttcctatgcatggaatcccagagagggcaaaaagagtgtgaacagagcccaagggagccctgggctgtggggggccccaccggtggatggatggggggagcagccaagcaggagcagtatagcggaggttaggagcggttcggctgcgagagcactgggttctgagctagttgtgcacttgctgcacgtggccctgggcaaatcattctacttctcagagccttagaccccatctgtaaagcaagggcaatacttcacaggtgggagtacagattagcaaaaatgtccacaaatcacttagcacagtgcctgacacagcagtgatccttgttagggccagtagaagaggcatcctcaagctctgggggtcctcattgcatcctctctgggagactggaatgtatccttgaagaacagcagagtaagtgtcaaaatcaagcacactggctctgcagtggggctgcataggaacacatcctcgttccatcactatttcatcatggacaaggtgcctcccctgtgtgggctgcagggttttcatcagtaaaatggagaataaaaataggacctgcctccctggtttgtaggaaaaagttcgagctaatacgtaaaaagtacacagaacactatccaatatatcaaacattccataaatactggttgcattttttttctttagcttcaaatatcggttggtaactacaggttgttttcacaaaaataaaagttataatcgtcaaattacttaattttataaaatatgttcaatcgtggcgtttcagctaactcttgcaacaagccctagagataggcaggacactctttatttttatttcgtggaggaggttggattcgcaaatggttaccttgggcaagtttacacgtgtcagacccatcccttcaacctagctctgtctccaagaatccggtgacccctcaactgctggtggcacatgggtcctttgaagagatgtcttctcacttgttttaaaggtgcatcgtatagaattggcaagtgccatgtgctggaaaacaccaggttttcatgaggagcacactcacatctttgagggcaggcagtatgaactctgaagtcaagcggcagcgttcaaatccctgctcaaccacttagccaggtggccttaggcaagtgctcctcaagaggttcccctctgtgaatcagggacgctgcctaggatagatgttggttattggtattacttagtatccatccaggtgtggaatgtcctgaggctgggaaggctggagaccgcagttcgacaaaacagccgctagaggtccccatggagccgcattgaacatccaagaattctgtttaatcctcctgtcttgggccagaccagctggccctgctggaactgagggcccctctttgtcctgataagcactcttccttccctttaagctggtgacccttctaaggggctgtcaagggctaatgctgagactcacaggttcctgaccttcagtccccagaagtgggccctcaggtttaatcctgaggcgaggggttgcaggcctgttccagtggattcccaggggccaggatgggctctgtgaggactccaggtcaggctgtctccaccctgggcaaactcaggcaaccttttcgtctttcacttttagaaaagacaaaaatgtaatctgcatgaagtcagggtgtcttggcagaccctgcaggccaggagccagaccctcatagggaaggaaccctggacatgggccatcactgcatgcctgggatgtggcccagaggcagcacacagcacaaccctgtggggaggtaacagctagtggagctgaaagagaaaggggcactggagaagcaggaatcattatacgaaaatttaatttccagctggaagacatcttgtggagaccatctagttcagctccttcattgtatagctgaggacacccaggcccagagaggggaagtgatttggtcaaagtcacacagcaagtaaaggacaaagctgagagcagatcccaggtttgtgcattcccatagcagctgctttccacacaccccactgagggaagaccatttggtcaagtcagagcacggggggtggggggttttaaaaagcagagctgaggaacttaggaatacacactgcttagcacatggttattagctggtccttcagatgccccagggtctcagcgttcgaagcttgctcattccacaggataattttgtgtttgctcaggtgcccagaaaatgcctttttaagatttctgagaataaacccatcacctccaacagtcccaggaattgcaactgtctattcataacgaatgagaggcaggtgcattaaattctgacctagtgctcaagaactttggagggataaaaagaggaagcacacaggtccctgttctgggaatgtggggcctccctcacctccccataggagggcttgtccacaccacctcctctttcctcctcttcatctcccaccctttccaccaagacagtgaccccattccccatgctgggttccaatcattcctggaaggatttttcccagagcagttgccagcaaacattttacagtcctctcctcctctctgtgatgtaacatttcccaacaccttctatatactaggcacataacctacatcatcttactcattcctccaacaagacagtacagtaggcattgttagccaatgtgggacaaaagatttcagatatttattaacttgttcaaaacatacagccagctagtagatggaatttggaatttgaacctaggtctaacctgttctaaagctcatgttcttccactactgtgaaccagcacccagaaaacttgagttttagttttgattctaccagctttgtgaccttagaaaaataacttaattttaagttgcctaaactacaaaatggaaactggctgggcatggtggctaactcttgtaatcccagcactttgggaagctggggcagccggagtttgagaccagcctggccaacatggtgaaaccccatctctactaaaaatacaaaaaattagccggttgtggtgtggggggcctgtaattccggctacttaggaggctgaggcaggagaatcgcttggacctgggaggcggaggttgcagtgagccgagatcgcggcattgcactccagcctgggcaacaagagcaaaactccatctcaaaaaaatttttttttaaatttaaataaataaataaataaaatggaaacggtacaccaatattgacaaccttactgagtcatcaagattaaaaagacaatatggctgggcatggtggctcatatctgtaatctcagcactttggaaggccgaggtgggaggatccgtgaaggccaggagttcaagaccagcctgggcaacacagggagacccctatctctactaaaaaaaaattaaaacattggccgggcattgtggtgtgtgcacccgtagtcccagctactcaagtggctgagacgacagggtagcttggccccaggaatttaaggctgcagtgagctatgactgcaccactgcactctagcctgagtgacagtaaaaccctgtctcaaaaataaatttacaaaatacaatatattaatatgtgaaaatgacacacaaatgtaagacacccccattaaagcaaaaaaggttctttttccaattaaaggggcttggctatcaatggcaatatttagtaggttatatataactatagttgacccttgagcaacatgagtttgaactgcatgggtccacttatgcatggattttcttctacctgtgccacccctgagatggcaagagcaaccctcctcttccttctcctcagcctactcaatgtgaagacaatgaggatgaagacctttgtgatggccaggcacagtggctcatgcctataatcccagcactttgggaggctgaggcaggaggatgacctgaattcaggagtttgagaccaacctggccaacatggtgaaacctccgtctctactacaaatacaaaaaattagcggggcatggtcgtgggcacctgtaatcccagctactcaggaggctgaggcaggagaattgcttgaaccagggaggaggaggttgcagtgaactgagatcactccactgcattccagcctgggcaacagagtgagactatgtctcaaaaaaaaaaaaaaaaaaagagaaagaccttcatgatgatccacttccacttaataaatagtaaatgcattttctcgtacttatgatattcttaa

SEQ ID NO: 635 - DNA, 2019 bp, Homo sapiens
cctgggcgcgccgagctccggctgggtccctgcaggtcttggggcccgggactcttcctggagacaccgccatggccgggctatcccgcgggtccgcgcgcgcactgctcgccgccctgctggcgtcgacgctgttggcgctgctcgtgtcgcccgcgcggggtcgcggcggccgggaccacggggactgggacgaggcctcccggctgccgccgctaccaccccgcgaggacgcggcgcgcgtggcccgcttcgtgacgcacgtctccgactggggcgctctggccaccatctccacgctggaggcggtgcgcggccggcccttcgccgacgtcctctcgctcagcgacgggcccccgggcgcgggcagcggcgtgccctatttctacctgagcccgctgcagctctccgtgagcaacctgcaggagaatccatatgctacactgaccatgactttggcacagaccaacttctgcaagaaacatggatttgatccacaaagtcccctttgtgttcacataatgctgtcaggaactgtgaccaaggtgaatgaaacagaaatggatattgcaaagcattcgttattcattcgacaccctgagatgaaaacctggccttccagccataattggttctttgctaagttgaatataaccaatatctgggtcctggactactttggtggaccaaaaatcgtgacaccagaagaatattataatgtcacagttcagtgaagcagactgtggtgaatttagcaacacttatgaagtttcttaaagtggctcatacacacttaaaaggcttaatgtttctctggaaagcgtcccagaatattagccagttttctgtcacatgctggtttgtttgcttgcttgtttacttgcttgtttaccaatagagttgacctgttattggatttcctggaagatgtggtagctacttttttcctattttgaagccattttcgtagagaaatatccttcactataatcaaataagttttgtcccatcaattccaaagatgtttccagtggtgctcttgaagaggaatgagtaccagttttaaattgcccattggcatttgaaggtagttgagtatgtgttctttattcctagaagccactgtgcttggtagagtgcatcactcaccacagctgcctcctgagctgcctgagcctggtgcaaaaggattggcccccattatggtgcttctgaataaatcttgccaagatagacaaacaatgatgaaactcagatggagcttcctactcatgttgatttatgtctcacaatcctgggtattgttaattcaacatagggtgaaactatttctgataaagaacttttgaaaaactttttatactctaaagtgatactcagaacaaaagaaagtcataaaactcctgaatttaatttccccacctaagtcgagacagtattatcaaaacacatgtgcacacagattattttttggctccaaaactggattgcaaaagaaagaggagaagaatattttgtgtgttcctggtattcttttataagtaaagtttacccaggcatggaccagcttcagccagggacaaaatcccctcccaaaccactctccacagctttttaaaaatacttctactcttaacaattacctaaggcttcctcaactgccccaaatctcttaatagcttctagtgctgctacaatctaagtcaggtcaccagagggaagagaacatggcattaaaagaatcacatcttcagaagagaagacactaatattattacccatatacatgatttcagaagatgacataagattcctcttaaagaggaaatgtcaggaatcaagccactgaatccttaaagagaaaagttgaatatgagtcattgtgtctgaaaactgcaaagtgaacttaactgagatccagcaaacaggttctgtttaagaaaaataatttatactaaatttagtaaaatggacttcttattcaaagcatcaataattaaaagaattattttaatgaaa

SEQ ID NO: 636 - protein, 216 aa, Homo sapiens
MAGLSRGSARALLAALLASTLLALLVSPRRGGRDHGDWDEASRLPPLPPREDAARVARFVTHVSDWGATISTLEAVRGRPFADVLSLSDGPPGAGSGVPYFYLSPLQLSVSNLQENPYATLTMTLAQTNFCKKHGFDPQSPLCVHIMLSGTVTKVNETEMDIAKHSLFIRHPEMKTWPSSHNWFFAKLNITNIWVLDYFGGPKIVTPEEYYNVTVQ

SEQ ID NO: 637 - DNA, 42379 bp, Mus musculus
  misc_feature (1)...(42379): n = A,T,C or G
ttagcacatggtggccatgcctctctgcattcctacaccttccagcgaatctgagcagtatatccccagctcagcttcctagtcaccaggaatggattagcgtcaagcacatacttaaacttggcagcttaaaatctcaaagattaagccagtgtggtagcacacgtgcaatcccagctcctgggagatggcggcaggaagagaaacagttctaggtcagtcttggcggcataaagtccaacctggactacataaaaccctctctcaaaaaggggttgctgatggggtggctcagtgggtaaggaaatttattatcaagccagatgatttgagtttgattcccaaaatccacatcatggtggaaggagaaaactgactactgaaagttgtcttttttttttttttttttttaggatttattattatacataagaacactgtagctgtcttcagatgcaccagaagagggcgtcagatctcattacggatggttgtgagtcaccatgtggttgctcggatttgaactcaggaccttcggaagaacagtccgtgctcttaccctctgagccatctcaccagccctgatctccattgtatgtgcatgcacatgtaaataaacataataaaacatcgtaagtcttgaacacattatctattttatttaataaagagatgaggtttcactgtgtagccctggctgtcctggaactcactctgtagaccatattggcctcaaactcaagagagatcacagcttgcttctacctcccaagtactgggataaaaaatgtgagccacctccgtccagttcatttgtacctttttacattaagttggaacttaatataccagtaagatgaatgccagccctgtcctattgatcttacagttttgaaggacaggcatttatttgtatcatgacaacaagctgcagctggggaggccctgggaacaggcagaaaccccggcatcagtgccattgccattttttgtgcttttgaacattttcatttattctgtgacaatttcacacatgcatataatgtttttttgggttggtttgtttgtttgatttatttatttatttattttttggtttttcgagacagggtttctctgtatagccctggctgtcctggaactcactttgtagaccaggctggcctcgaactcagaaatccgcctgcctctgcctcccgagtgctgggattaaaggcgtgtgccatcacgcccggcgcatataatgttttgatcatattcattgcccttttcttttcccctgctacgcctgcaaaacatcttcatccctaaaagcccctttccatttcttttgttggctttttgtaatccactgagtttgctcagtgtgctggcgagttttatgtcaacttgacagaagctagagttacctgaaaggaaacatcaattaaatgtctgtaagttctggctctaaggcattttcttaactggtgattgatggggttggggagtgggcagctcattgtgggtggggtcatccctgggttgatggtcctggattctataagaaagccgcgagcaagccagtaagcagcacccctccatggcctttgtacagttccggcctccaagttcctcccttgacttctttcgaggatcatcagtgatgtgaaagtgtgagccaaataaacccctttctccccaagttgctttggtcacagtgtttcatcgcaccaatagcaacctttgacacactcggggttgcttgcatgattgagggttggggttatttagtgaagctgaggcaaataaccaaatgccttcctacaccactaaaaaagcgtgttcccctcctcctaactgtccgcagctcctctgcagcggagccccatgagcaccttcccatccttgctagaatgctgatggacccactatagcccgggtcctgagtacaaaggccacttcacatccagaagccacttcacagcatttctccagctcctccctctcctcccctcctctagctcctccccctcnnnnnnnnnnnnnnnnnnnnnnnnnnnnnnnnnnnnnnnnnnnnnnnnnnnnnnnnnnnnnnnnnnnnnnnnnnnnnnnnnnnnnnnnnnnnnnnnnnnnnnnnnnnnnnnnnnnnnnnnnnnnnnnnnnnnnnnnnnnnnnnnnnnnnnnnnnnnnnnnnnnnnnnnnnnnnnnnnnnnnnnnnnnnnnnnnnnnnnnnnnnnnnnnnnnnnnnnnnnnnnnnnnnnnnnnnnnnnnnnnnnnnnnnnnnnnnnnnnnnnnnnnnnnnnnnnnnnnnnnnnnnnnnnnnnnnnnnnnnnnnnnnnnnnnnnnnnnnnnnnnnnnnnnnnnnnnnnnnnnnnnnnnnnnnnnnnnnnnnnnnnnnnnnnnnnnnnnnnnnnnnnnnnnnnnnnnnnnnnnnnnnnnnnnnnnnnnnnncagtcgggtgctcttacccactgagccatctcaccagccccacatattcttttatttaacaaaaataaattaagtaacagtgtttagaaagccatcattttccttcctgggtagtgaccccatggatgacagtgcatactgtacaaccataagttcaaatccccagcagcctaataacattcctggtatggcctaagcaggtttgtaacacaacactatgggggtgactgggaggtttggggaagaggcaggaggggctttctgctcaagcaacctagctgaaatcactgcaagacccaggttcggtgagagaccttccttgtcttagggaataaagtagatgatcacagagggcatctgatgtcttttactggcctgtttgtattttctgcatgcatggggcagatgcactcccccccccccacacacacacccacgtgtgcaaacacccatacactgcacactgctcttgcagagaacctgagtttggatctcagcatccacaccgatgcccacacatacacatgtgcttaattttttctttttaatgctagacttacctttaaggctccagtcagataaatattgctgtctcttcgatccctcctgctttctttgagacaaggtttcctgtatcctatgctgatttcaaactcccatagctgtgatgacctagaacttttgatcctccagtgttagaattatgggcatatgctagcactcttggtagatctggttctggaatttgaacccaggacctgtgcatgctagacactctaccaactgagcttcatcacaatactttcttttcttctcttttctctgagacagggtcttgctaggcagaccaggctggccttgagctcacagcgtcacttgcctctacctcccaagtgtgcaattaaaactcttattttaatgggcccatgtaactaatataaatttgagtgataatacccttattttgtcttttcatcagtgactctatttaaattttcatttcattagccagttagtggtggcacatgcctttcatcccagtactcaggaggcagaagcaggcggatctctgtgagtgtaaagtcagcctggtctacagagcaagttccaggacagccagggctacacagagaaaccctgtaacgaaaaaccaatatatatgtatttttttcttgtgtatatgtatgctgtggtacatatgaagctagaggacaactttcccaagtcatttctcttcttgaaccaaggataggactctggtcatcaagtttacagggcaggggcttttacctgatgaggcgcctccctggccctaccccgtttacttgtgattgttgccttatgcgtgatctagaatattgacaagtaggctaatgtcaaaattcttgggggagatgatgcaactcaatcaaggggtagcaagtttaaggccctaagttcagctgccagcactacacacacacacacacacacacacacacacacacacacaaacatacacaagcaaaatcctacatgcttttctgtgtgtaatacagagggggtggggatgggattttgggtgtgttagatttactttttaagacttttgggtttttctttcttcctcccttcatttccttttttctttcattctttctttctttctttgaaacaaggtcttgctaagacattttctggctgtagatgaggctcagtggaatgcaggtgcaggcgcaggcacaggaactgtgcacctcgactttgagacagggtgccttacagatctacagttcacagattggactaggctggcaggccagcaagctcaaggctcaacgtgtttaccctccacgatgctgaaattacaagcacaggtgtgatggtttgtatatgcttggcccagggagtggctctattataagatgtggccctgttggagtaggtgtgtcactgtgggtgtgggctttacgaccctcatcctagctgcctggaagccagtattctgctagcagccatcagatgaagatgtagaactctcagctgtgcctgcaccatacctgcttggatggtgacatgttcctgccttgatgataatggactgaacctctgaacctgtaagccagccccaattaaatgttgtccttatgagagttgccttggtcatgctgtctgttcacagcagtaaaaccttaagacaacacaccacatctggctttttgatgtggattctagggattaaactcaggctcttgaggtctgccgaaatggcagttaagaggactagctgctttttcagaggacctaggtggtggctcacaaccatttgtaaccccagttccagggcatccaacaccaatctgaaggcaccaggcatgcgccaagcacatacaaatcttaaagtgagcgctgtaatagggaaaacttgaggactgaataaaaaaatcctccgtttatggatctcaagtttaactgtgccctccttaacaatctgaatcgacacttgccctgtcaaccctttcagtacatgcatttccatgcatgttcattgcacacactgcttgtgtagaagccagaggataactctgttgcattctttgttcttccagcatcatccactttgacacaggatctttcactggcctgggactcaccaagttggctaagctagacagccacagggatctgatactctcagtgttcctagcaatggggggataattgtgtgccaccatgcctgacattcttaatgtggattctgggggattgaacccaagtctgcgcttttgcaagcatggtacctactgagctcactctccagcaagtgcctcgcccctccttttgagatagggtcttaaatttgttaccagaaaatgaccccagcctctgattctcctgcctccatctcccaagtgctggggctacagccttgcaccatcacacctggtttctacacacccttgaaaatcaaccccagagcctggtggatgccaggcaagcacttccctgagctactttcctggccctccagtcctgctcctgtaagttcctcccctcttgaagtgcatgtctgttatccccctgctcccaactagcactttctcctgtccagctcccagcttctgaccacagccttccctgtgtcctgattacattttaccttccttctgtgtcctcacggttgattctctcaaagaatttctacaaaccaccatcctctctcaccaaagtatgatttgttcattcagaaaccatttccatacaaacaaaaaaaacaatctgtcctcaaaatagtattgattagcccaaagcaaattaagtatgcacttaggacaaacatgcacaaactcagatattatttttttggagggaagggcaacatactaaaaacctaacaacatagtttagtgttttatttttctttaggaagaattcacacttctttaatgctcaggcttatgaactcaggttttatatagtaaaaatggggagaagggggtctttccctaagagctcaatacctcttctgttttttgctgtgaatatatttaaatgcttacgggcaaaaaaatctgctgggcagtggtagcacatgcctttaatcccagaatttggaaggcagaggcaggtggattcctgagttccaggacagcctggtctacagagtgagttccaggacagccagggctgtgcagagaaaccctgtctcaaaaaaacaaacaaaaaccccaaacaaaacaacaacaacaaaaaacaaaacaaaacccaaaacaagcaaacaaaaacctggtggatgacctcaactatttcttcttcccccagttctccctatcttgtcgctctgcatgtgtaaggatcacagtgcctgcatgggcagagtggctggccgagggagaaaactatcccacacatgaacacagtcctggtgtgaattagactcgatgatgacggagatgtgtggcaactgaggagataagggaaatagggaaatccataaaacttggtatgtgacaagccagacaaaggacatttccgagaactgtgccttcattccaggtttacaaaccactcagatatgatgttacatattgactattatattcaggctcagtttggttatctaaatgaagtgatagaatggcagcccaaggattgcgtactcagtgttttaacagaaccagtaacatcattagcagtaagtgaattgtattatagaccagacaaaaataaagcttttttttttttttttttttttaaactcagcatcttacttaaccctggctggctgacccggcctctgcctcctgaccacactggtgggattaagcctgtggcactaccctcagcagggacagcgaattctttttttcttttccttacagtctcctttctcagctgagaccaccaagtgtaatgatatttttttctttcgcaggaaacgaaataaaacatttggatgtaggcaccagcataactattaccccattttcctctcaagtacactttagtgaatcactgcctaaaattaaatagctagtttatctgtggtccagatttgaaggaaagcagccctcccaacttcagacctttgcagtaatcctccataccccaaacagtaactgttaaatgtaagtacttttactcccattgaacagattttttttatagcagtactaagtctactagtaatgtaaagcatttgaatgttagtgcctctttatcatcacaggaaggggtaatgcagcaagaagcaaatatgaacaaagaggactctagctgtcaccaagcatactgggtactactaaggagaataaaggaagccacagacaaaagcttagaggctggagcaggacagtgtgctgtgggggtgggggtggggacggtttccaggagaaaagtttctaaatactgtctgttaaggctgttagggaaagtagtatttgaactaagtcagttcttcagtaacgtgcaggactgtgacatcacaccgccgtcccagtatcttagcagctgctgttcgcacagtaaacatttgcacagggacagctgagatgtgtttatcagtccatgtcattgactaatcatttctaaaaaatcttgtgtgggggtgctttgcctgaatttataagaaccatccgtatggctctgccatcagccagaagagtgtaccatggatcccctggaaccagagttgcagccagctgtgacagcagctttgtgggtgctgggaactgaatacaagtcctttagagcagcaggtgcacttaacttctgctgagtcagcactccagctcactttttccttttttttcccccttgctgggggtgggggtgggggtgggttgagacagggtttctctgtggggccctggctgtcctggaattcactctgtagaccaagccggctttgaactcagaaatccacctacctctgcctcccaagtgctgggattaaaggcatgcaccactgcctgccccctcccccccaccccctttttctttttggctgttagtgacagggtttctctgtgtaatcctggctctcctgggactccctctgtgtaccaagctggccttgaacaaacagaagtccacttgcctctgcctccatagtgctgggatcaaaggcatgtggcttcattatttattcattcattcatttattgtaagtacactgtagttgtcttcagacacaccagaagagggcatcggatctcattacggatggttgtgagccaccatgtggttgctgggaattgaactcaggacccctgggagagcagtcggtgctcttaactgatgagccctagttttgttttttcaacacagggcttctctgtgtagtcctggctgtcctgtaacttactctgtagaccagactggccttgaactcagcaatctggcaacttctcaaatgctggaatcgtgaccatgcctgggttatttattttataggcacgtatgcctgcagaggccagaagggggtgccagatcacccaaaactggagtgaaggctggtagtgtgctttcatgtgggtgcaggggaactgaactcagatcttctgcaagagcagacagtgcttagagaaagcactgactccagccccatttcaccgattctaaccctccccttttcataactttaagctagtgtatgtagagctacagtatagtatggtttaactagattcttaatattatatagtcagcatcatacttgttaaactccacatcaagcacgtataaaatgctatacagtacatattgtctcagtcaagcttcttaacagctttacccagctggtgccattaatggttacagaaaactgaggctaaaagccttaatcagtagactcaagcagaactgaaaacctggcagagctaaaggtcaaccctttgtcctatctcaacatttaccttgggtgatgtagaagattaaataaaaacatacccttgtgtgaactcctgctcaaatcaagactcagctcagactgacctttctgaagctattcttttcttttcttttttggttttccaagacagggcttctctgtggagccctgtttgtcctggaactcactttgtagaccaggctggcctcgaactcagaaatccacctgcctctgcctcccaagtgctgggattaaaggcgtgcaccaccaccgcctggcttctgaagcttttctgaatcctccgtgaagaatcggtcttgcgctctcaacactttagctataattctatcttactatggcgtacaatttccctggggaattttggaaccaaggaatcttatcttgctccatcttacagggcccagtactgttcctgacatatatttaatgtctattaaagacgtatatttatagttatatctttatttaatagacatatatttaatatctattaaaggagtcctggataaatataaggcaagagaaactaaaaaggtaatgctacagaagatttataaattgtgtgcagtgaaatttggaagaacaatgacagaaaatggaagtcaaactgggcatggtggcacagttatggaaagctaggacaggggggtctcttgagtgctccaggtcaaccagggctccatagtgcaaccctgtctcaaaaaaacacaaggacgcacaaaggaagacttctgagttttcttgaggaaaaagagcagatctgagaattgggaggaatcgagtgctcttatatcaaggccttcccgtcattttctcgccccgcttgcacacggtaatttacagtccatcacggaggacatctgagtgtatgaggctctctcaagacatcctacttttacacaccacacctttttctatccccgtgtccgtccccccccaaccccccggctgtttttttttttctttctttcttttttttttcgagacagggtttctctgtatagccctggctgtcctggaactcactctgtagaccaggctggcctcgaactcagaaatcggcctgcctctgcctcccaagtgctgggattaaaggcgtgcgccaccaccgcccagcccccaaaacacttctaactcaaattcaacgttttcacttcttccccttcgactgcgccaccgttccttccaataaaagcccggccgcagcaagcgagttgtgcagcccttctcctccaacggcgtccccggcatcataaaggctggtttaaccagcgcccgaggactcctcgactcggctcgcccagcccaggaccggggcgagcccccagaccctgacgctccgcacgcggtggcctaacttttcggccacggaggcggggatgcgggtgaagtccagccaccgtgtgacagggttctagtgtgaggtaggcgatcgggctcggagagcaggtaacgcactgccgaggtcgcaacgccgccgccaccacaccgccatcctccgaccgacctggctttccaactctcgcgagaccgggcctggcgcgcgccttcggcccccgagacttgcgcgttgccgctctctcccgactatggcggccagacggcgggagtgaagcctgtagttccgggtcggcgccccggaagcggaagtgtagactcggggctgtcaaagttgtagcgctcctcgagggtcggtcccgccacgtctcttcccggtctctctggctctggagtgctttccccccgcggagggtgggagcgcggggacagacgggcgagatgagcaccatgtttgcagacacgctgctcatcgtctttatctccgtgtgcaccgcgctgctcgccgagggtgagggcggctgtttccttggacgtttgattaatcccagggtggaagggcactggggtccctcgcaccccatgagcaaagatcgggagcctcactccctgcggcctgcgtggtccgttgcaagaaatcccgggctcatccccctatagaagcaggagagtagtgtggagtcatacgtcctgattttctttacgtatttgtggatacactgaaaaaaacaaaacaaaacatgggttgatctgactttgaaaaaagttactgataagtatagagcaaaatgtcgaaatccttttgtctccaatactaacaattaaagatggtttgttgtgatttccatttatttctcattagcatgttgcttttactgtttaggcataacctgggtcctggtttacaggacagacaaatacaagagattgaaggcagaagtggaaaaacaaagtaaaaaatgtgagtatggtaagacggtggacggttcaacacgggaagttcaatgggtgcatgttcacagtaactaagagaggagtataccaagaatactacaagccagtgttccttgttagggcaactgaaatctcaacactcaggagatggacatgattgtgagttcgcagctagtgtgggctacatagggagattcatgttacaaacaaaaccatactctaacttggtaaagatagaaatcaaagacctttgtgcagcatctttaataaagctaaaaggaatctgggtgtggtagagctccagatagggcaggcctggtctacatagtgcattccaggctggatctacttcctgtcgagaccttgcctaaaatggacacacacacacacacagagtcttcattctaaagaagaggtcctgttctgttgtgagagactatggaagatctcatggtacagatggacccagtgccttgtggattagttagaatgtagatagaagataaaagagggagaggaaattctagggaaaggaaaaatcacgtaaacatggagatttgaatgtgtgagctgtgtttggagaataagtcactgtgactagtgtcagtaggagtggtaccctttaaagtttagccaagtttcagtcgggtgagaaagctgaaaaatgattaacatgggtaaaatttgtggcttttgaaggaaagttaaaatttagcagggcacagctgatcatataaataaggccttaggtaacccaggcaggcctcactgatcatataaataaggccacccaggcaagcctcacatttctgatgcctcacccttagctccccagttactgggactttgaatggttctctaaaagcacaattggtatccagtgttggttggttgttttgcttttatgaggtgggtctcatttagccctgcttggctttgaactcactagctgaagatgaccttgagctgattcttctaccttccaagagatgaactatagaaattcagaaccctaaaccatacctaacttggcttctaagagtttctacagctacctttattcctatatccttcttatttccttatatctttataagttttgtgagtgtccgttttttgtttgtttgtttgtttgttctgttttgtttttaattttagacagggtcttatataggccaggctagcctataaaagctaactccttagctgagtttgaccttgaacttatgatctcctgtttctgctcactaagtgctggagtcacagttattcaccatcaagtcagtttgtggggtgcaggggactgcactcagggctttgtgtatggtaagcaagcactctgccagttgagctgtactcctcagctccccttgcattcttcccccctaaattatcctatgtgaggggctcagagcagagagctgtgatagagttcgtgcctgccatgcccaaagcctggagttcaccctcagcagtgaaaaatatgtcatttggtgcacataaaaaccattgtggttggttataaaaatgtttccaccttatgggacaggagattgagacccaggaagttaatgatagacttacatcacaagaaaacaaagaactggagactaaactcagacttttgtttttgagcctagactttgaaaattacagttcgccatcctttattcaaagttgatagtgttggctcgccatatttaaaccaaattcattctatttaccttcacaaacatgaccttccaggattttcttaccttggtgattttatgcttttagcagggaaatccgaaaatcttttttattttttatttttattttatatatatatatatatatatatatatattttttttttttttgagacagtgtttctctgtatagccgtggctgtcctagaactcactttgtagaccaggctggcctcgaactcagaaacccgcctgcctctgcctcccgagtgctgggattaaaggcgtgtgccaacatcatccggcttatttttatttatttatttacttatttattttattatatgtaagtacactgtggctgtcttcagacactccagaagagggtgtcagatcttgttacagatggttgtgagcctccatgtgattgctgggaaatgaacttaggatctttggaagagtagttgatgctcttaatcgctaagccatctctccagcccccaaaatcttttttaaaagagatttttaaatatgcttgctttctttgttgctgtgtctacttgctagcttggacgtgctgctaggacatggttctttgtgctcacgtatgtacctgtgtgactgggaagtgactggtgcatgctaaacaggaacattgtcttgggtttgggttttttgttttgttctgctttaggttttttggccttgactgactgagaacttgctgtgtaactcgggctgcccttgacctcccagctgatcttctttctagtttaggggttacaggtataaggcacgccccctttttcaagcacttgttattcctgcctgtagttcattatcaaagcctgtacctgttgtcctcttgaatggttttagatctttttacatcttccatacctgccaaacccacctattctaaagtagcatgtttcgttgactctattaaagcgcctcatgtgtctgcccttcagttattcagatttgctttgtagggtacatgtagcattctttttcagaacataaatctggttatgctacttgtctcctttatatggcttttaggataaaagacctgtgtgctgggtggaatggcacatgtctgtgattctagtattcaggacactgaaatagggagtcctcagtttgaggctagtctgagctacatagctaaacccaacttcaagaaagcaatggacagacttagtgcatgccttaaatgtctgaggtaaaggcaggagtatctctgagttccaggccagtctggtctatataacaagtttcaggccagtcagagctgcatagagagaccatgtctcaaacaaacaaacaaacaaacaaacaaaagggaggaggagcagcagctgccaggtgtggtggggctctagtttctggcagcctggtccacatagtgagttaaggacagccaaaggttacatagtgatgagaacatgtagaaaggaaggaaggaaggaatgtgggtagatatggctttagcccacaagagatagagctgcagttaagaatgctttctgttcttgtaacactacccagtacccacaccatgtggctcatggctgcctgtaattccagttccagggatccattttcctcttttggccctgtgagcatctgtacagaagacatggtgcatatacagacaagcagacgcgcgcgcgcacacacacacacacacacacacacacacacacacacattttttaaaaaaccttttttaaaaagatatgacccagtaaaactcaggaaaataagattcttccttcccttcttttctaacattgtttgtttgtctgtttgtttgtttttgtgggttttaaggtagcagcttactatatacttcaggcttgcttctaagttgcagtcttcctgcctcagcttctgctagagtggcattacaagggtataataactaccatgtctggctttcctgaagccacatcttatctcatattctcctgtgttctttgcctggtttcctagggcccttttctaacttctgactggggcttggattttcctactgttgattcttagtacttgctattcctttcatggtaaacattttccctttgtattttttagtaaactcttaggcttatttagtctccagatctttgtactttctgatttatccataggcctctccttgaagcgctttctgcagttgtgtgatcacctcctcctatctcccccttctctgggtttctctgtgtagccctggctgtcctggaactggccctgtggtccaggctggccttgaactcatattgtccttcctctgcctcctgagtgctgcggttaaaggtgtgcactgccaccatctggctacagttgcaatcttttcgtacctgtcaactatggttattaggattagggcttttgctctactccagtgtaatgtctgtgaaggcaaagtggtgtctctagcccttaacatgatcctagatagctgtaacagtgtgcttaataggctaaaggataaagtgtctctgtagcacggcatgtttctgagaaattttgttatgatcacatactagttagcatgtactggtatctgaatagaaagttctttatgtaatatatatgtgtatgtatatatatatatatatatatatatataatttactatcatttttacttcaatgagtattctcatatcttagccatggatttttttccttaagatttttaggcttttcattagtgtctataatttttctgtttgtttgtttgtttgtttgtttgttttttgtctttcgagacagggtttctctgtatagccctggctgtcctggaacttacaggtctttgtagaccaggctggcctcgaactcagaaatccgcctgcctctgcctcctgagtgctgggattaaaggcgtgcaccaccacgcccagcagtgtctataatttttacatgaagtttatttacattttggaagcaaatgaaaagtttacttttaatatataattttatgtgtttatgtttacagtagagaagaagaaggaaactataacagagtcagctggtcgacaacagaagaagaagataggtaagccagtaacctaaataaaacttgagttgtgtgtgtgtgtgcatgtctgtgtatgtatatatgtgtgtgcgcgtgtgtctatgtatgtgtatgtatatatgtgtgtatgtgtgcgtgtgtctatgtatgtgtatatatatgtgtgtatgtgtgcatgtctgtgtgtgtatatatgtgtgtgcgcgtgtgtctatgtatgtgtgtctatatatatatatatatatacatatatatatatgtatatatatatatatatatatatatgtatgtatgtatgtatatgtgtgtgtgtctgttttgttttgtttcttgagacagtgtttctctgtgtagctttgactatgtaggaattcatgttgtaggccaagctggcctcaaactaacagagatcctcttgcccctacttcctgagtgctggaattaaaggcatgtatcaccaccacccaggtttttaaataatatttgcaattaaatagttttgtcactttaccatgttcctttctccagctcctccctcaaaccttcccatacctccttccatcttaaatctttcattcattctttcattactgttgttaaatacatgtatgaatatgcatgcataagtatataaatactatctggttcttctctttttgttgttttgtgtatgttgtttcaaagctgaccactttgtatcgaataccaataagagtgctcatccccaagcaaagctaatttcccccctctctgcagtcattagtttcataaagttctttatctgggggtgggaccctgtgaaatcttgtcccttccatgttattgtgttgatgctattgtctattgatttgccattgttctggtcttgtttatgtagccatttctaggagagtcagtttcaatatcagacttcctggtattctggcttgtacaattcttttgctccctcttttgtgatgttccctgagcagggatgcaggagctgtggagtagatgtatccactggggctgggttctgcacagtctgttgttttctgctttgtgttgagttgtgattttctgtgatggtctccatttggtggccaagagaagcttttttaatgaggatggtagctacacttatctgtaggataaggataggatttagagtacacaggagttatgtggcataccaaagtggaggtagtagattggttttctttttttcaagcttttaacttgtgagcctccatgtggatgctgggaattgaatccacatccactagaagagcagccagttttcttaactgcggggccatctctctccccccagtagtctttccaagatctatgacctcactagttccaggaagttggctagctttctaagcatgacttccctcttgtttagtgggccgtgagtccaattagacatctgttggttcccaccgatctgtaagtgccactcatagtgatttttaaactgaaatattttggcattcttctatatttaaaacattgttttagggggctggtgagatggctcagcaggtaagagcacccgactgctcttccgaaggtccagagttcaaatcccagcaaccacatggtggctcacaaccatccgtaacaagacctgactccctcttctggtgtgtctgaagacagctacagtgtacttatatataataataaataaatctttaaaaaaaaaacaaaaaaaaaaaaaacaaaaaaaaacattgttttagggctggtgagatggcacagtgggtaagagcacccgactgctcttctgaaggtccggagttcaaatcccagcaaccacatggtggctcacaaccatccgtaacaagatctgacgccctcttctggtgtgtctgaagacagctacagtgtacttatatataatataaataaatctttaaaaaaaaaacaaaaaaaaaacaaaaaaaaacattgttttagtatggagtaagcaacagcccacatattcacttcgtcttattgagtgatattgaaacaaaatgctattgtaatctccagacagtgataatttattaaataattaagctgtgctcagtatttttgaactaaccagtttcttcttttcagagagacaagaagagaaattaaagaacaacaatagagacctgtcaatggtaagagtcccagagtgtaactgatggcaaaccacataaactannnnnnnnnnnnnnnnnnnnnnnnnnnnnnnnnnnnnnnnnnnnnnnnnnnnnnnnnnnnnnnnnnnnnnnnnnnnnnnnnnnnnnncaaatatgctgccacatttaaatttcattttaaagttggcatggtggtatatgcctttaatctcagtactcagaagcagaagcaagtctttagatgaatctttagagttcctggccagccagggctacccagaaagaccttgtctcaagaaaaccaacaaacaacactcccctccccaccccccacccccgaaaaaaaaccaaaaaactttattttaatattttgtttataaaggctgctttggaggttataatttgtcttcttcagaaatgccttgcattttcttctttgatactgatatattcaagtttttatgtgcagtaaggggcataaacattattagagataaaataccgatggaaaaaacccatcccagagtaacatttacagttgtttccgtcacttacaatacagtagctgccatgatactccatgtcttgcttaaggtttttaaggttttcctggttttgtttgtttggtttgtttttggtttgaatcagggtttctttgcttagccttgcttgtcctggaacttgatctgtagaccaggctagccttgaacttatagagatccccctgcctctgcctctgaggtggctctgcctgagtgctgggattaaaggcatgagccacactgccttgcaagttttctttttttaaaagttatgtattttatgtaagtacactgtcactgtcttcagacatatcagaagagggcatcagattccattccagttgttgtgagccaccatgtggttgctgggaattgaactcatgaccttgagaagagcagtcagtgctcttaaccactgagccatctctccagttccaagttttcctcttttttaaaaaaactattattatttatttttatatgtatagacattttgccagcatgtgtgtctccacgtgcctggtgcccgcagaagtcagaaatagatccccgaagactggagttatagatgattgtcagctattattcgagtgctaggaattgaacccaggtcatctagaaggagcagctagtgagtgctcttgaccactgagcccccttaactccagtcccctttttattttaaaacaaaaccaatcgtttttccttgtttcatgttgaatcttggtttatggcatttgtgtaattccaggatagaggtcggcacactggagatagctctgtaggcatcacattcatgtaaagatagtgggttcccagcccttttgttccctctttgacgcagggctattttttctagttctgtgtagttagcatggggcatctcaactttccatgagtttcttcacttgctggagatcttggctgtggttctttatttgctaaaaattcttttcccgaatgactctaatttactggtaattttttttttctgaggcagagtcctagtatataccctgactgccctggaacttgctacgtggactaggttgcctcaaacgattagcttgcctcttcatccttagtgctgggatcaaaggcatgtagtaccacatacagggagatttttttttaaagatttattttatgtatataagtatactgctgctgtcttcagacacaccagaagagggtgttggactgcattacagatggttgtgagccaccatgtggttgctgggaattgaactcaggtcccctagaagagcagtcagtgctcttaaccactgagctatctctctagccccagggagatttttttttaaagattttatttatttattatatgtaagtgcactgtagctgtcttcagacaccacagaagagggcatcagatctcattatggatggttgtgagccaccatgtggttgctggaatttgaactcagggccttcggaagggcagtcagtgctcttaaccgctgagccatctctccagcccaccaggaagatattttaaaaagcgaattttctcacctttagcacaatgtttatcatgttcactatttggaaattataaaagtaaaaatcaccaagtgtccagagattgtgtttgaaaactgtacatctttatactcgttttttttttaaatctatttatgcatttatgggatgtggaatttaataagaatttagttgtaattaacaggttacctaactcacagtgcctaccatgttgctttctttctgttgctcatgaagttaagaggttggcagccctaagctgctgtcatagcttagcaggccctcaaagactctggcctcagtcacaattcacctgactggttgatgctttccctgaggcattctgttcttcattccagtcacaccacctcaccccttgaaagaagcctaagaagattcaagattgtccttttaaaaagggcttttcagagccagatattgcggtagaccacgcctatgatccagctacacattagacaggcaggcagattcagtgagtccaggaattccagactccaccataataatgagacagatatcccagtcaacacttgttacttatgattggttggccagaatctggcctcagagctatcccagtttattacaagtaacaaggagaggaggaattggagacagaaggtgagttagataacaaggagctttttgcaaaagagaactttttctttgtttgttgtttgtttttgagacagagactcactgtgtagccctggctgcacatctcacctcatcctgtcagatcagcctgccaccatacccagctctacggaaaagtttttaagaaaaattacatgaattgaattacttcaatttttgtagcatgatacacacacactcctttagtgtgaactgaccattttttgctttccttataggtacggatgaaatccatgttcgcgattggcttttgttttactgccttaatgggaatgtttaattccatgtgagtaaccttttttatatgcttctgcctaataaatgttctgtttgtatgcatatgagcataacatttgtagtaatattgtatttgacagaatttcaaagtaatccacagccaaatcctttctcaaaaataacgaaagaaagccaagcattggcggcacatgggaggcagaggcaggcagatctctgtgagttccagggccagcctgatctacatagtgagctccaggacagccaaggctacatacacagagaaaccctgtcttgaacttctaccctctccccccaaaatattgaagaaagaaaacaaaatttcaaatgtatacattattcacatgtcaagaaaaatgttttcattgtatatatttattgtatgtgttataagtatactttgtacattgagcaagattttcccatactgcctgcccttttaaaattggcttatattcactatgcaaatgtacagtactggtgtatggtgtgctttgagcatatcctcactgtcatgtatctttcataatcatttgagagtatgcaggggagagagagcgcaagagctcaagtgcatatgttacaggatatttgatcacattgtgaaccctgagattgtgaactgtaaaaacctgctctggttgtgctatggctcagcctttgatcctagagctttctgtttactgtaaacaagtactgtactgtggcctgtctctagcacacggctttaactgtaaacaagtactgtactgtggcctgtctcgagcacacagctttaactgtaaacaaatactgtactgtggcctgtctctagcacacagctttaactgtaaacaagtactgtactgtggcctgtctcgagcacacagctttaactgtaaacaaatactgtactgtggcctgtctctagcacacagctttaactgtaaacaagtactgtactgtggcctgtctctagcacacagctttaactgtaaacaagtactgtactgtggcctgtctctagcacacagctttaactgtaaacaagtactgtactgtggcctgtctcgagcacacagctttaactgtaaacaagtactgtactgtggcctgtctctagcacacagctttaactgtaaacaagtactgtactgtggcctgtctctagcacacagctttaacccaagagctaaagaaagtcaacacaggtcatgtggccgagcaagcaaccagctggcagggagtgaacagaagtggacagaaaggagggcctttatgttgaaaggtatttaagacagtgtggagaagtagactttggtggagtaggagggtcagctgggtgctttctctgcctctctgagctagcaggttttcatcccagctctggctcctgaatcttttctggtaaaatcaaacggctgggatttttatttttaaaacaacatgcttgagtggaggtcagaggacaactggctggaatctgttccctccttccatcagatagttcctaggattttgaactcggttgtcagacatgatggcaaatgactttaccctctgagccatctcaccatccttctttaaaaaataacttcaatataattatgtaaataagaatttcattttaaacgaatacaatcacataatatgggcagtcagccccccccccccgtatgtgggagctgtcaaacaattctcacaggggtggcctaaaaccattagaaaacaaataatttacatttctattcataacagtagtaaaattacagttttgaagtagcaatgaaaataagcttggcagacacccgaggaactgtattaaagggtggcagcgttaggatagttgttgtcttagttagggtttccattgctgagaagagactccatggcaactcaagggacaacatttaattgaggctggcttacagcttcagaggttcaaccattatcatagcaggagtcatagcagcatccaggactggtagttctacaccttgttccaaaggcaaacaagaaaggactgtctcaagggtagcttggaggagggtctcaaagcccacccccacattgacatatttcctccaacaagactacacctcctaatggtgccactccctggaccaagcatatacaaaccatcacagttgagaagcactaatataataactttgtttgcttgcctttttttttttttttttttttttttgaggcagggtttctcagtgtagtcatggatgtcctagaatttgctttatagaccaggctggcctcaaactcagaggttttcctgcctctgcctcctgagtactgggattaaaggcaagcatcatcgctgcctggttcctaataactttttaaatctacttaaccgtgagaatgtttgtcagataaaagcctagacattatatagtctttaaagataattccgtatatccctctgtttttaaattgcttaccgatatgcttcttcagactgaaggtattggtataacaacattttgactcaaaatagagtcttaacaactataatcctgttcagtgatgaagtcaaggactgttgttgaaacagtgagtaacagagtggcgcaatcgtgtggcgctgccttgaagagctaggcacatccagagttcacttagctgatcattctcggaaccataggcctctagagctggaagacactggaagatgaaataactttatgggctatctagaaaccccatgatttctatcctataattctgttttccctcatttattatttttgtgtttattgatgaagggcatactacagtttgcatatagatgctaaaggataactttcaagagtttgtgcttgtagactatgtgggcttcaggcatgtcaactgttctatatagggccttctatgcttaataataatttattgtacatttttaaaaatatggaagcaaggatcttggttgttcccaccaccaaacgatagatagatggatggatagataggtaagtgtttgggagatagagaactgaaaaccatgttctgatcattacacattttatatgtactgaagtgtctgtcacactccctgtgctccatggcctgtaacagtatgtcacttacagatttaaagtgttgtcaggggccggccatggctcagtgagaagagaagcttatcgtgcaagcctggtgactgactggagtctggtccctgaagcctgcataaaggtgggcggagagaacccgttctacagaattgtcagctgaccgctgcacgcacccgctgtgcacacagagcaatagaagagactttgatcagttcattttgtagtgtttgatgtgttgtacttcttcatgtgtttgtttttgtttttgagacatggtttttctacacagccctggaactcactgtgtagaccaggctgacctcaaactcacagagatctgcctgcctctgtctcatgtttaatattctcatggaagagtagtttttgttaagtctgtttacattttgtagcttcgttctaagtgtctttagtatttcttatcttctagcttgactcttcagcatagaaggggctgtgatatcaccatcatcatcatcatcgtcgtcgttttcattcttgcttttaaaaaaaaatcaagacagccgggcactggtggcgcacgcctttaatcccagcacttgggaggcagaggcaggcagatttctgagttcaaggccagcctggtctacagatctagttccaggacagccagagctacacagagaaaccctgtctcgacaaaaaaaaaatacaaaaaaaacaaatcaagacaggattttgttgtgtagtccaggctgtccttgaaaatgcaattgttctctcttcctgccttccaagttctagaatcctagacttacaggtgtgtactaacacatttagcaggtcttttccttaaagcacctgctgtctatctataaatgttaagacttaaagtaggcatttaagagattatatttgggtttgagaggtggctcagtggttaagaccactgactgttcttccagaggtcctgagttcaattcccagcaaccacatggtggctcacaaccatctgtcatgggatccgatgctctcttttggtgtgtctgaagacagtgacagtgtgctcatatacattaaataaataaatctttttttttaaaagagagagactatattctagcctagaacgcagcggacttgagggcagcttccaatagacagtgagaacctgtctcaaaagaaagacaaaaaaagaccagagaagcagctctaatccagagagcatgttcccttcttgtctcaattctaggagtgtaagttttaaaagaagggttaaagaactggaagcgatcagcagtgctcaggcagttctgtttccaaatacctcccagcactccagaggcagaggcaggaggatcaggtgttcactcactccagctagggtctccccagactaaattagactctggtttttaaaaagaaaataatttcttttactgagtcagaatatggttccgaatccccctactcaagagtagcattcttgctctggattttctttttttttttttttttccgagacagggtttctctgtgtagccctggctgtcctggaacccactctgtagaccaggctggccttgaactcagaaattcgcctgcctctgcctcccaagtgctgggatcaaaggcgtgcgccaccaccgcccggctgctctggattttcaaagcttaagtgtacttaaggaaagtctaccttgcaccaactctttcctttattaggttaaggacgattgtttagctcttccttataaagtctcatggtcatctgggtggaacataattcttagactttgccaaggagctctaggggaagggaaggcaggatgattgttggggctgaagcagagagatcgcaattttgggcacagcttggcatatagcaaaatctcttaaaaaataattggtagttgggtaatggtggctcctttaatcccagcactcaggaggcagaggcaggcagatctctgtgagttcaagccagcctggtctacagagtgagttccagaacagccagggctacacagagaaaccctgtttcaaacaaacaaacaattgctgctgctgctgctgttgcttctccctacctgcagtgtatatggctgtctgtgtgtgcttgtgggggnnnnnnnnnnnnnnnnnnnnnnnnnnnnnnnnnnnnnnnnnnnnnnnnnnnnnnnnnnnnnnnnnnnnnnnnnnnnnnnnnnnnnnnnnnnnnnnnnnnnnnnnnnnnnnnnnnnnnnnnnnnnnnnnnnnnnnnnnnnnnnnnnnnnntgtgtgatgctgcagcacccccaagattaagaattataaacccccatcatttcttaggaggcaactattaggtttcagaagttaaaaatatccctcttcttagcatttttaaattttagaatatatttttcccccaaatacttattacttctttaaaaaaattgtctgtgttttgtggtgggtaccctcacatgtgttaaggtgcatatatggaagtcagaggtcagcttgcaggtggttctctcctttcaccctgttggttccaggatggaattcaggccaccaggctggacagcagccacctttatataatgagccatcttgctggcccctaaaaattatttttcattaaaatatgttaacaaaatcagatttcttgctagttaagaggatacactttttaaaatgtatatgggtgttttgcctgcatgtatgcacaaggtgtctgcagaggtcagatgaaatctcctagaactggagttataagactattgtgaaaatacccaattaaaaaaaaaaaaaaagactattgtgagccatggtgtgggtgataggaatcgaaccctgatcctctggaagagcagcaagtgatggcaactgctgagccatctctccagcccccttccctatattgtattgtattgtattgtattgtattgtattgtattgtattgtattgtattgtattgtattatatttgtttgtttgtttgttttgaggcagggtttcactatatagccttggttggcttgtaatttgctatgtgttgacccaggctgtccttgaactccaagagatccacctgcctctgcatcttgagtacttgagtaccttgcccagctaagaggatacttaaaaacagttattatctcagtttctaatagaccatatattaatagccatactgtacacaagacttttcggtcctctgtaatttgagtgtgctggatcttcctaccagaagcatggagaggcacttgtttcagtgctccaattagccgggtccttctgctcatcactgcaccttcagccctagttaaagtgtgtcctacctgtacccagacttcttcctgaaaaaactttgttgattttctaaaaataacagttctttgcctttttttatcttttcattttagatttgatggtagagtggtggcaaagctccccttcactcctctgtcttacatccaaggactatctcatcggaacctgctgggagatgacaccacggactgctccttcatcttcctgtatatcctctgtaccatgtcaattcgacaagtgagtgtccgtaccctcgattcactatgtatagctctcctttctgccactgctagatcacactagctctgcctctgtaacgctgggaacatttatctgctacgagctctttcagttgctcacctggaattccagtgtgttgttcacagctgtgttacatgcctgcaactctagttaactgacactagggatggggggcagctgtaaaaccaaacgtggctcccacaccccttcctgagcctcagttccttctcactggatctgagcacagtgactttggtcgttccagtatcatctctctcatgttctagtgccttttgtcagttcaagagtgttcactgctctggaggtggtgggacctgggagaatggagcctgaaaatgaggcagatgcatgcaatagccaactttcttcagagcatcagacaatttatactcttagatttaagaactcactttacagccggctgtggtggtgtatgcctttaatcccagcacttgggaggcagaggcaggcggatttctgagttcgaggccagcctggtctacagagtgggttccaggacagccagggctacacagagaaaccctgtctcgaaaaaccaaaaaaaaaaagaactcactttacgtgagtaaagtgtagactcacaaggacaagccaaacatggcacaaacatgcttttcacagaggcttgtaagccagtaccagtagccagctgtatacctgagggaagctcactcgtatctgttacacccgagaggagcatggcaacacattccaaggacagttctgtgtttccaggtcagaagacttttgtcttggtttcctaagttgtctcacaagcactccgaattccttacatgaaactccatttttggaaggtgttctgacaaatgtgttttgtacatctaccctacacctcccttcaacttctgcagacccactctgacatgtcccctcctggcttcatgtctccttccttcctaacctaacctaagtctatttagtgttgcctgtctgcatatggatatgaggccatccactgagggagcatgggcaacttagcagtcaccacccttccaaagaacagtgactctccctccctccctagctgccatcagttgccagtagctcctcagctaggggaagggccttgtacacctctctccaagcgtccacgctggagtttgactgatccacaactgccatgagttcatccagaagatagtttataatactcctccacatccttcttccgagacgttccctgaggcccggggaggggttgatatggctagcctgcatacagctgaccagtcacagtcacctgttctcaaccctttgcctagtttgggtctctgtattaaccactgcgcactggccaaggttgagagcagaagagaattgtagagagacttgttggccgtgctgccttgagtcagaaggtaagctcctcagcgggagcatggcgctctcagtctgctcttcagtctcttgtttctccaaacagtttaactttgcttcccactttctacctcatcgcagtaaccctgtcatttaaagccatcagagtttttacactgacttttattctggaaaatgacaaggactcatataattgacccctgtctctgcagaatatctgagccaaggttccttgtatattttgtctagacttctgtgtttgttggctgaacaaatgcgttatcatcttgtgttctctattgtataatttctaattgtgcttgtttctcagaatccttagctaaatacattgtaggtgcccaggaagtactggtcagtttctgttcttttaaattactttttgagacaatcttatgtatcctaagctggctttaaaactgatccccctgcctctgctttccaagtttggggtagaggcatgtgccatcacacctggctattaatgctcaaattttttgttttgttttgttttgttttattgatttttcgagacagggtttctctgtgtagccctggctgccctggaactcactctgtagaccaggctggcctcgaactcagaaatcctcctgcctctgcctcccgagtgctgggattaaatgtgtgcgccaccaccgcccagcaatgctcaaattttaaaagcaggaaattaatagcatattgtttgatttttctcacagttttatataatgtttttgtttttaattttttacagctgtctgggaagttatatttattataaaagaaatacaaactcagatacttctctagcctgacctattaatgattgatcttcctaactcatttaaaaaattctcattaaagtatgaaatatttaaagtattaaatatatgcaaatatatttaaatattttatgataaattaaaggggtccttgaagttgtatttgttacttcattatcttctgacaagggatgaaagtattatgtatatacaaaggagcctagatacgggcattctcctagtgtcttaaggccaacagacaacggagtgttgaaggacagatagtccaggagtataaggctgtgtatactgagtgccatttgttctgaaggccagcactctaacagaaagtgtggtgggagagtgtccactagactaagaatcagagcatatggtttaaattagaaccttttgagacagctcaggctggccttgaactcttgatcctcctgcctgcacctgagcactggaattctagctgtgcgtcatcacacctgctgctaacttaactttgctattttggagaacccattagtcctttccaaagtttagtggtttcaaataccaaatgaagggactgagaagagtaatagaacaatatccaaggttttcttagagatgctgtgagctttccgatagttggcagtgacgtaacacttgctcactcatcagccctctccgttccagtaaagtgcatgccgattgattctctagtcagacggctctgcatgagtactctttagacacccacgcctgtctgctccaaaagtctattgttttccaaaacctgtttatactgcttttacttgttattgtagttatgtaattaaatgaaatgttacattagtcaaagaaatcagaacataaaaaatgttttttatggaaactgcttcagtacttaaaaaaaactaaatacacttatattgttgtattagatgtagttaagataaagaaaagacacaaagttttaaaaatctaaggattttgggcctccaagttaggtaagtgttcttcctctgagctattatgtccctgcccctctggcactatttgcagtaaagactaaagtcagtcatactatactcaagggaaagcaagcccttgtattttataggctttgtgttaaaaataaaacattacagtggggcgtgggggcatatacctttaatcccagcactgggaagacaggcaagaggatctctgtgccagcctggtctacagagtgaattcctgaacagctagggctacacagagaaaccctgtctcaaaaagccaacggggttgggggaagtgagggggggaagaaaggaaggaaggaaagaagcaagcaaggaagggaggtaggttacctagagtgattgcctactacgaacaaggctataggttccatattcttggcacttcaataagaaccccccctctacccccctccccgtgtgtgtgtgtgtgtgtgtgtgcgtgtgtgtgtgtgtgtgtgtgtgtgtgtgtatgtgtgtgagattcattctacacagttggcatctttagattagcagcaccaggtcctgtcaagtatgtacaggtcttttggtttggtttggtttggtttggtttttggttttttttgaggcagggtgtctctgtattacccgggctgtcctgaaactcactctgtagaccaggctggccttgaactcagaaatccgcctgcctctgcctcccaagtattgggattaaaggcgtgtgccatcactgcctggcatatgtacaggtcttattgttgtgatcttcattatattaaaaaatgacaccatcagcccattgcaggtagctatagttttagtttatatgcattctctttgctgatgtatgtaaaacactctttatagcttatattaaaattggtttttactgtgcttgctatgttgtttctttacagaacatccagaagattcttggcctcgccccttcacgagctgccaccaagcaggctggtggatttcttggcccaccacctccgtctgggaagttttcctgaaggaaagcagaattctgaatttcctgtcatactttttagacattcacatcagacttacagagcacctggccacattctaggtttgtgttatttctcagctatggatatgatcaaatgagaacactgcttaactaatgggatagtgctatggtcacggatggcttctttagtaataagtgcactcactggttacatttggatggcttatgtaaccacaaacatcatctttcttgtctcacttgagtatttcagtgtatgtgccatatacacagaagcagactgtccatgaacattaggagaaaaatagtttatgtaacaacttcactgtaattagttgttgtgttttttaaaaagccaaatatgtcactttgtgttcgacaatgagccaaatttttagatgtttcagttagagaaatgtttgatttttttgcatattaaaaagagtattttctgtaatctgaacataaggataagcattggcccaaaaagctaaaataaagttttgtcatgttcttttaccagccttgtctcctgttcaaaatgtgggattgtcccagtgtacactttgaacgtgttccagttggctttctggtgttttgtcaaacactggccagaaccagaagcagcttaggggaggaaaggggttttcagcctatgcttccgggtcatagttcaccattgggggaaaagaggttagaactccagcaagacccaaggcggaagctgtggaggatggctaccagctagctaactctgccttgctctcagttcgcctcctcttagcagccgggcccacccacctagaaaagctcacatactgtaactgtgcagggttggagcaggccctcctccatcactcaccaatccagagactctcacagacatggctacaggccagtctgacctagggaacttcttagttgatagtccctcttgccaggtgactctgggttccataaaggtgacagtagaaacagtacgaactgtaagcttggaaaggaaagggacagtgcagtgaggggaactcgtgcttgtctcgaggactcctgcttgactggcagcagccgctgacggaagaggaagggctgcttcccctttactggagagtagtatggagttccgtcccagcactagatgctcatgggcactgccttgctgtttctagacctttctgcgagcataatatgtgctgctatttcaaaggaagatccatcgtgagctcaaactgcccagggtaggatctttctttccttctctgacttgcattccctttatcaaatgttcatttaggattgcagggtttagaacaggaactatggatggggagaaccacacacttacccatgggcatacacacacacacacacacacacacacacacacacacacacacacacatacacacacacacacacacacacacacacacacacacacacacacacacatatacacacacacatggaagtcccaacagtagtgcaagcgttagccagcagtgtgagtgaagtttctggaatgtaccgattttgatagggaacagtgaagattgtttggggtacatcccactggggactcagtcgtcgaatcactgagatttcgggtaacagttctctgattttaattttcagaggctgctttttaagtgacttggtagtgttgggaatcacacctgggactgtgctccttgcagataagcactgcgccactgagctctgtcctcagctccagagattgtactgtaatttcacgttacagccatacagggtttttagtgggtttctaggccaccagcaaaaatctgagtagatggaggtggttgtggttgtttactgagtgtaactgtgatcataagactccacatgggagaaccatgggcaggtgctaaggttatctgaagtaatttaattttaaaccagtgctggggtcatcgagaacacccctgcagtagtccttctggggagcagatgaagtcctgtgtgtgtgtgtgtgtgtgttgttgattagagcacagccatggcaaggacccccgtgtctcagacccatgggaatggcaagaccaccttgtgcaaggtttctcagacctgtgcatagttgggttagacttctctcccaaaatttctatttaagcttctcatataagtcacttgttaaataattaacagacctatttatgcctcagttttctgatctgggaaagagttaataaccttgtgaaagccctttacagtctccatgtagctgactctggacagagtctgcctgactcctgcccatcttgctttggttcctacagtttggattgcataacattggtctacttgttcttttaattagatatgttggttacatagtatttgcttctatgaaaactaaattgaatggtctagattgacctaataagtcaagcttcctgttcaggccaccattacagaatagcatccatggccctgtgctaccccatggccatgggcctcaacaatggctacaaggtgacaaagaacgtcagcaggccagggcatggttatgccagggggtgtcctccaccaacacaccagattcctgccggacctgatcctggaggcgtgccccttcacaccgtaggagtggtgcactgaaggtctccagggacaggtgtgtgttcatcattcaaacttgaggacttgacccatggtgggaggagcgaacagaagtctgaatgttgtccttaatttcgtcacacactgtggctcatgagcactcacatcatatacatctcccacacacatgctaaaaggaataaataaaaagttaaaactaaggtgaatgctgaagccacgggtggaagtttatgcctgtaataccagcacttaggattggcagcaggaggatcagagaaggtcaagtcaacagcctgagatatttgagaccctgtctccgtaaaacaagcaacaggtttagagatttttacatgatttgtcctcaaatcccatactagtagatcagaaaaccagcaaacactctgacccttggggttcgggttccttgtctttctacctcatagctgcagtgctgactcctttggtcctgttaaagtcttcagttacttagcgggagtctcgagttccactgccccgtgttcagatggcttcatggaaggtaagtacaaactcttagaaaaaattgtgactaatttgttaaaatatttccttgctccgataatccgatctgaatatttttattaaaaagccttctttaatgatgaattaacgcttcctttaatttattccactgttgccacactgtaaggaaggagacaggtgcaagtctagtgagatgataatcaaatggccactttttgcaggtggaagctaaatatatttttgtatggatccaggattcattggctgctgaagaaattcaatagagtcaagggctttttttttcttagtgcaaaagtagctttcaggtttataattatttcagccattttctgaacagctaaatcgaccttcacagctgtcttatgaagagagctaagaaatcgcggagactgcttgacctggtggtagaagattccattcacaggaaaaataaatgcgttttaaagcaagatgcgacaataaacacttcagcaccgtgcttttcctgcttgctttctaaactacaacccagggaaaagcatctattatcacaatccaaataaagaagtttcttgaaatatttccctcttccatgcattttgaatattgttccttcatttctcaaaaaaaaaaaatgtggtcataacccacagattttactgtctcctaagttctgattgcactagacagaaaaataagcccattctactggggtagggtcggtaagagtttcctttctcggtggacttgaatattataagaacggggaactgagtgtggtgtggtgagttactcactcctgtagtcctggctcctgagagactgagagcagagtcacctgagttcatgagttggacacaaagacaccccctcttttttgtttcttgttttttttttttttttttcgaggcagggtttctctgtatagccctggctgtcctggaactcactctgtagaccaggctggcctcgaactcagaaatccgcctgcctctgcctctcaagtgctgggattaaaggtatgtgccaccactgcccagctttttggggttttgttttgtttttgttagaccctgggacagtggggaacactgctgtcatggtgcacgtgactgacccagtacctcatgatgtttcttcatgattgacgaagtcaatcacaccattccctgaagggtgtgggtgaaattagtgataagatcagacctatctctgagaggagactctggaggagaacccagccgggtctctcaggaattgtatgtgagatagcaacatatatctctgctaagtccagatcacaagttatatcaagccgcatgtcagcactctggggatggccacatcttcttgggaatgtgtcctttctgttcttcgatctgcactaggggcttggctcaatgataaatacgtgaaacattttaggggaaacaaaagcaatctaggttggctatggcttaattttctgcagtcagttgttctacctcagagacaatccccaaagagagactagtttgcctcactccctctgtccaaaggcctcgtctagtaaatcttgctgataaagtgcaaggcttgtggttgaccctcgttcggttgttcctaggcttagatgcactcagtggtcactagatacttcaagctacaccacttaattaaaaaccttctcttcttctccaatgataaatgcttatctgaatagagaagagttactgaaacaacaacaacaaaaggttaaaacatctagaagacttgaaataatgaggattcttgcatccgctcaagaaagttcatggctgcagacagatcatctccgtaactcactcctcagccacagctcagccctcaaatgttcttgtactgtgaatatctggatggtgattttttttcccccccagtcttgtcagagctactcagcagccattgagcacagtgtcctgggcggagggaggtaagcagtaatactggcaagaagacgccttgccatcgaggtgcacagacaagggaagcattggttctgtttggggaagtcttggacgactgtgtcagtgaaggttggttagaagtctaggaggaggtaggaaaccaccagtgagaggagaaagagggatggtggtggtgggtgtgtgtgtagggtgggggctggaggcgtatcagggagggtgggtttggacaatgtatattacacgtgtatgaaaatgccatagcaaggcgggcagtggtggcgcacgcctttaatctcagcacttgggaggcagaggcaggtggatttctgagtttgaggacaacctggtctacaaagtgagttccaggacagccagggctacacagagaaatcctgtctcgaaaaaactaacaaaaataccgtaacaaaacacatacttttgaatgctaactaaagtggtacaacataaatttcagccaggcatgagggcccacgcctgtaatttcagctcctccaaaaggctgagaagagattggaagtaccaggcctgcctgggcaacttagatcctgagtcaacaatacaaagttaacaatggaagagtatttgtctattttctggggtctttggctggccaacaatttcctttagggaactgttggactttcattttgccatagccggaagctgagagaacagctcggaagaaggaagggctggttgcgattgttgtgattcatgttttcagttcacaggtagccctcttctttcagggccgtgacgagatgtatattacagtagaagaacgtggaccagcaaagctatctacagtatggtgtctgagaagacagggaagggctcccagcgaccccacctcctgctttcaccccttcccaataagcccattatattaggaatatatcagggactccatccatcaatgaaggaggagctaccaggagccagtcactgccccaaagcctgtcagctggcagccatatatcaccaacacttgatcctgtgaggacatttcacactcaaactttgacaggacacttagnnnnnnnnnnnnnnnnnnnnnnnnnnnnnnnnnnnnnnnnnnnnnnnnnnnnnnnnnnnnnnnnnnnnnnnnnnnnnnnntgctgtgatggttctactgactgtcaccttgatgcccatctaaaatcatttcaggagacaagcctccaggcatgcctgcaagggactgcgtagattagcttcactgacttttcgaaaggccaaactgaaggaaaaggggaagggagctggtttggcttgctttattctagcttcctggatgcaagggccatgtgaccagaggcctcaggcctccggtgctgtgacttctctgtcacagtagactacatccttgaccactttacataatcagggtaccaatcttatctccagtgactgggatctaagaaggcaggaagaaaagaatgaagttcttgctgttttatctgggtgtgttcatgtgttactagggatcggacccaggttcttgtacatgttaggcaggtgctgtgccattgatctagaagggttgtgtttttttttttcctagaagatgcttaatctttatcactttttggctgtttactagaagagatatttcatgtttttaacacatactcgagtgcatgcatgcacctcagaggtgatggatggtcataagcttgaccctggtgatcctatccctatctatgggcatcagagcaccccactctacaccttacataaaaccaatgtcataaaaaagacataggtgcatgagtgtgttgcctgtgtgtatgtctgtgtgcatgtctgtgttgccctcggaggtcagaaggggctgtctgtcgtctgtaactggagttatagacaactgtgggccaccatgtaggagctgggagttaaacctgaagtagtgagtgcttttaatagcctggctatctttccagcccccaaaccaatttgaagctacaggaataaaaagggaaattctatgtgtttccaaacctcactcttcataaagcttcctcctttctgatactgatgcacagtctacccactgtttccttcctccttggcatttatttcctttgctgctcttttttttttcccccccgggggaacctggagtccttactttatttcctccctatgtagagttatctgcaaatcatttttcctgtattttgtccaattttatggttccttaaagcagaaaaactggctccagctttctctgaaagaacatgaagtctcccgcggctgagaccaaaggacatggagcaaagtggatcctagagcgccacccagtggctctgacgggaactttatattgcctgggttctctcggatctttcctagcaactcccctagcaacccatgagtcagtcccttggatgcactgaagattttaccacctggagtatttttgccctgtttttcttattctgccaccatttccggttcctataatatttgttcgttggtcagtccattataaatagctgccacttagcaaggtcacaatgccagatattttaacatctttcacagttccttacaaatgtgtatcacttcctcttaacacacaagtgaaaactcggtgaagggactaagcatcacattcaaattcatttgttaacggacagaatcgagattttcctcttttcattacatcatcgacagcagtggttctcaaccttcctaaggctgtgacctttaacacagttcctcaggtcgtggtgacccccaaccataacattatctcactgctacttcataactaactttgctgttatgaaaagtaacataagtatctggtatgcaggctatctgatacgtgacccccgaaggggtcaagaccctcagcttgacaaccgctgacctaaggagtccttagggaagcaatgctcccttccaggtcattccaacaattacttcccagaaactgatctaatcactagctaagactttgcattattgaatacagaagtctcggaacaccagctcccatgccctgtaaatctgcttttctaaactgtgcacgcctttaatcccagcacttgggaggcagaggcaggtggatttctgagttcaaggccagcctggtctaacagagtgagttccaggacagccagggctacacagagaaaccctgtctcgaaacaaacaaacaggggctggtgagatggctcagtgggtaagagcacccgactgctcttccgaaggtccagagttcaaatcccagcaaccacatggtggctcacaaccatccgtaacgagatctgacaccctcttctggagtgtctgaagacagctacagtgtactttacatatattaataaaataaatctttaaaaacaaacaaacaaacacccaaaaacaaaaaaacaaaaacaagccgggtgtggtggtgcacgctttaatcccagcactcggaaggcagaggcaggtggatttctgagttctaggccagcctggtctacacagtgagttctaggacagccagggctatacagagaaaccctgtcttgaaaaacaaacaaacaaacaaacaaaacaaacaaacaaaaaaaacctgcttttctactagctggaatctacaacttcaatccttcccatatttccttttgctgttttctgccaaccatagtaaagctaattcaggtacacactgaaaaaggccttctcagctattgtgccgagtaggcttcgggtgtgtttgtataaaatcactctgcatgcttagtgttagtataaaagatcatagctgatggtgttcgtggtagagcacttgcctagcattgacagggctctgcattgaaccctcagtactgtgaaaaagaaaaaagagtctgttgtaaatacggattcaaagagacttcccaattacatcattataagctagactataggggctggacagatggctcagcagttaagagcactttcagaggacctaggttcaattcccagtaacagctgtttgtaactccagttccggggattcggttctcttttctggcatccatgggcactgcatgaatctggctcacagacatacatgctggcaaaacacccaatacannnnnnnnnnnnnnnnnnnnnnnnnnnnnnnnnnnnnnnnnnnnnnnnnnnnnnnnnnnnnnnnnnnnnnnnnnnnnnnnnnnnnnnnnnnnnnnnnnnnnnnnnnnnnnnnnnnnnnnnnnnnnnnnnnnnnnnnnnnnnnnnnnnnnnnnnnnnnnnnnnnnnnnnnnnnnnnnnnnnnnnnnnnnnnnnnnnnnnnnnnnnnnnnnnnnnnnnnnnnnnnnnnnnnnnnnnnnnnnnnnnnnnnnnnnnnnnnnnnnnnnnnnnnnnnnnnnnnnnnnnnnnnnnnnnnnnnnnnnnnnnnnnnnnnnnnnnnnnnnnnnnnnnnnnnnnnnnnnnnnnnnnnnnnnnnnnnnnnnnnnnnnnnnnnnnnnnnnnnnnnnnnnnnnnnnnnnnnnnnnnnnnnnnnnnnnnnnnnnnnngggggagtgaccagagaggcagagagagacttggcataggcttttgaaacctcaaagcctcagagtggcacacttcctctgacaaggccggtcctcccaatccctctcatagactaccactctccgagcctgtggaggtcactcttattcaaacgccacacatataaaataaaaatgtatgttgcagctaaagttggcagtccttattgtatatgttttctttgtatttgcttgtctttattcctatttctttacaaaggtttccctgcaagaagagtaagagaaactcacatgcccttggacagaagaatttccagtcagatacatttttttgttatccagcaaagatgaaaccagacccagtcattctcttagttaggatggctattgttgaaataaaacactgtgaccaaagccacttgcggagggaagggtttatttggcttacatttccatattgctgttcatcaccaaaggaagtcaggactggaactcaaacagggcaggaacctggaggcaggagctgatgtgagggccatggaggggtgctgcttacaggcttatcatcatggctggaccggcaggcttgctccccaccccatttcgggctgactttcaatagatggcagcgagggagctgctctgctacatacaaaaccccgacccagaagcaggtcgtctacgaatggtttagcgccaggttccacacgaacgtgcgttcaacgtgacgggcgagagggcggccccctttccggccgcaccccgtttcccaagacaacggctctccgcaccggatcccggtcccgacgcccggcggggggagaccccgcgccgctgcggggaggacgcggggaccccgccgagcggggacggacggggacccggctatccggggccaacggaggctccttcggcgctgccgtatcgtatctac

SEQ ID NO: 638 - DNA, 1617 bp, Mus musculus
ccgttccttccaataaaagcccggccgcagcaagcgagttgtgcagcccttctcctccaacggcgtccccggcatcataaaggctggtttaaccagcgcccgaggactcctcgactcggctcgcccagcccaggaccggggcgagcccccagaccctgacgctccgcacgcggtggcctaacttttcggccacggaggcggggatgcgggtgaagtccagccaccgtgtgacagggttctagtgtgaggtaggcgatcgggctcggagagcaggtaacgcactgccgaggtcgcaacgccgccgccaccacaccgccatcctccgaccgacctggctttccaactctcgcgagaccgggcctggcgcgcgccttcggcccccgagacttgcgcgttgccgctctctcccgactatggcggccagacggcgggagtgaagcctgtagttccgggtcggcgccccggaagcggaagtgtagactcggggctgtcaaagttgtagcgctcctcgagggtcggtcccgccacgtctcttcccggtctctctggctctggagtgctttccccccgcggagggtgggagcgcggggacagacgggcgagatgagcaccatgtttgcagacacgctgctcatcgtctttatctccgtgtgcaccgcgctgctcgccgaggtagagaagaagaaggaaactataacagagtcagctggtcgacaacagaagaagaagatagagagacaagaagagaaattaaagaacaacaatagagacctgtcaatggtacggatgaaatccatgttcgcgattggcttttgttttactgccttaatgggaatgtttaattccatatttgatggtagagtggtggcaaagctccccttcactcctctgtcttacatccaaggactatctcatcggaacctgctgggagatgacaccacggactgctccttcatcttcctgtatatcctctgtaccatgtcaattcgacaaaacatccagaagattcttggcctcgccccttcacgagctgccaccaagcaggctggtggatttcttggcccaccacctccgtctgggaagttttcctgaaggaaagcagaattctgaatttcctgtcatactttttagacattcacatcagacttacagagcacctggccacattctaggtttgtgttatttctcagctatggatatgatcaaatgagaacactgcttaactaatgggatagtgctatggtcacggatggcttctttagtaataagtgcactcactggttacatttggatggcttatgtaaccacaaacatcatctttcttgtctcacttgagtatttcagtgtatgtgccatatacacagaagcagactgtccatgaacattaggagaaaaatagtttatgtaacaacttcactgtaattagttgttgtgttttttaaaaagccaaatatgtcactttgtgttcgacaatgagccaaatttttagatgtttcagttagagaaatgtttgatttttttgcatattaaaaagagtattttctgtaatctgaacataaggataagcattggcccaaaaagctaaaataaagttttgtcatgttcttttaccagcct

SEQ ID NO: 639 - protein, 275 aa, Mus musculus
AIGLGEQVTHCRGRNAAATTPPSSDRPGFPTLARPGLARAFGPRDLRVAALSRLWRPDGGSEACSSGSAPRKRKCRLGAVKVVLEGRSRHVSSRSLWLWSAFPPRRVGRQTGEMSTMFADTLLIVFISVCTALLAEVEKKKETITESAGRQQKKKIERQEEKLKNNNRDLSMVRMKSMFAIGFCFTALMGMFNSIFDGRVVAKLPFTPLSYIQGLSHRNLLGDDTTDCSFIFLYILCTMSIRQNIQKILGLAPSRAATKQAGGFLGPPPPSGKFS

SEQ ID NO: 640 - DNA, 61648 bp, Homo sapiens
  misc_feature (1)...(61648): n = A,T,C or G
ggcaacctacagaatgggagaagatttttgcaatctacttatctgacaaagggctaatatccagaatctacaatgaactccaacaagtttacaagaaaaaaacaaacaaccccatcaaaaagtgggagaaggatatgaacagacacttctcaaaagaagacatttatgcaaccaatagacacatgaaaaaatgctcatcatcactggccatcagagaaatgcaaatcaaacccacaatgaaataccatctcacaccagttagaatggcgatcattaaaaagtcaggaaacaactggtgctggagaggatgtggagaaataggaacacttttacacgttggtgggactctagttcaaccattgtggaagtcagtgtggtgattcttcagggatctagaactagaaataccatttgacccagccatcctattactgggtatatacccaaaggattataaaacatgctgctataaagacacgtgcacacgtatgtttattgtggcactattcacaatagcaaagacttggaaccaatccaaatgtccaacaatgatagactggattaagaaaatgtggcacatatacaccatggaatactatgcagccataaaaaatgatgagttcatgtcctttgtagggacatggatgaagctggaaaccatcattctcagcaaactatcgcaaggataaaaaaccaaacaccacatgttctcactcataggtgggaattgaacaatgagaacacatggacaggggaaggggaacatcacacactggggcctgttgtggggtggggggagggggagggatagcattgggagatatacctaatgttaaatgacgagttaatgggtgcagcacaccaacatggcacatgtatacatatgtaacaaacctgcatgttgtgcacatgtaccctaaaagtataataaaaaaatttttttaatctacctatgacctggaagccccagtttcaagtgttcctgcctttccagattaaaccaatgtacatcttacatgtattgattgatgtctcatgactctctaaaacgtataaaagcaagctgtaccccgaccaccttgggaccacttgaggctgtattacaggtacatccttaaccctgtcaaaataaacttcctaaatggattgagacctgtcttggatacttttggtttacttctggtattagagaaatcatacactatttgttcttttgtggctagcttatctcacttagtgtatcttcaaagttcatccatgttataacacatgtcagaatttctcaaggcagaatgatatcccattgtatgtatataccatattattttatccattcatccattgatggacccttgggatacttccaccttttggctactgtgaataatgctgccatgaacatggatatataaatatcttttgaagtccctgctttcaattcttttggtagatactagaagtggaattgctggatcctatggtaattctttatttagtgcagtggcatgctcatggctcactgcagcctcaacctcctgggcacaggtgatcctcccacctcagcctcctgagtagctggaactacaggcatgtactattacacctggctaatttttgtactttttctagagacagggttttgccatgttgcccaggatgatctcaaacttttgggctcacaagatccacctgcctcagcctcccgaagtgcagggattacaagcgtgagccactgtgcccaaccttaggtttaattttttgaggaacaaccatactgatttcccatcccgactgtatcattttatattcatcccagcaatgcataaggggttgactttcttcacttcctcactaatactttttttttttttttgagatggagtctcggtctgtcgcccaggctagagtgcagtggcatgatctcggctcactgcaacctccacctcctgtgttcaagtgattctcctgcttcagcttcctgagaagctgggattacaggcatacgccaccacacctaatttttgtatttttagtacagacagggtttcaccatgttgttcatgctggtcttgaactcccaacctcgtgatacacccgcctcggcctcccaaagtgctgggattacaggcatgagccactgcacctggccctgttttgtttttttttaaataactgccatcctaatgagtgtgaagtggtttgttttgcaattccctagttagttatgttgaccatcttttcatgggcttatcagccatttgcttatcttctttggagaaacctttgtttaagtcctttgcccatttttgaattgggattttatttggtgagttgaaggattttaaaatgtatttataatggattttaatcccttaccagatatatgctttgtaaatatttctcccattccatgagtttccttttcactctgttgtgtcctttgatgaataaacatttttaattttgataaagtccaatttattttttgttgcctttgcttctggtgttatattcaataaatcattgccaaatccaatgtcatgaaggttttcctgttttcatctaagagttttagcactttcatttaagtctttgatccattttgagttaattttgcatgtggctatcttaaagataaatcgtgttgggaaaactggattatccacatgcaaaatacaccatttattgaaaagataaatgctgttgggaaaactggattttttttttttttgactcagtctcgctctgtcaccccaactggaatgcagtggcacgatcttggctcactgcaacctcagcctctcgggttcaagcgattctcgagcctctggctctcaagtagctgggattacaggtgcccgctaccacacccagataatttttgcatttatagtagagatggggtttcaccatgttggccaggctagtctcgaactcctgacctcaagtgatctgcccacctcggcctcccgaagtgttgggattacaggcgtaagccactgcacctgaccccaaaaaaactggatatttttagattatttattttttagacatttagatttatcatttaggttatttatcttttaaatacatggtgttgggaaaactggatatccacatgtaaaaatggagaaaactggatatcctttctccattgattgactggtcttgacaaccttgtcaaaaatcaattgaccatatatgtgagggtttagttctgggttctttattctatatgtctgtctttatgctaggactacagtgttttgattactgtagctttatagttaaattttgaaatcaggaagcatgagaccttcaactttgttctcttgcaaaattgtttggctatttggggtactctgagttttcatatacattttaggatgaatttttctatttctgaaaaaaagtcactgggattttgacagggattacctaatgaatctgtagatcactttgagtagtatcaacatcttaatattaactgtttcaatctatgaacacagtgcgtcattccacttatttctatattctttaatttgcttcagcaatgtttgtagttgtcagtgtacaagtcttgcctctttggttaaatttattcacaagtattttagttctgatgctgttgcaaatggaatttttaagatttcctttttaaattttacatcgaaatgcaactaaattttgtgtggttttgcatcctgcaactttgttttttagttctaacagggttttttgggtggaatctttagggttttgtacataaaagatcatgctgtctgtgaacaaatcattttaccttctcctttctgatatgatggcctttttaatttttgccaactgaacagactggtcccaaatatggttccctgatcactgatgaggctaaatatatttttataaggaagcattaataccagtcccataatagtaaaatttacatatgatgttcagataaatataaagtcctaagtttcagacttcatctctaaatcttagggtctcattccccctcttctgttcctaatgaatgctatggtagaaaacttttgaagactaatttgctacagcattaagcttaagcctttctattagtctttcaaatgcacaacatgattcttaacctttattggtttataaacacctttgagaattggatgaaaactatgaaacttcaactcagaaaaaaatggacacatgaagttttgcatgtattatcaggaggagatgtacggctctcctaaaattcaaccatgaggctgggtgtggtggctcaaccctgtaatcccagcactgtaggaggcctagacgggtggatcacttgaggccaggagtttgagaccagcttgggcaagatggcgaaacaccatctctacaaaaaatacaaaaattagccgggtatggtggtgcacacctgtagtcccagctattcattgagcctgggaagtcaaggctgcagtgaggatgattgcaccactgcactccagccaaggcgacagaacaagaccctgtctcaaaaataaatacaggtggctgggtgcagtggctcaggcctgtaatcccagcactctggaaggccgaggcgggtggatcacttgaagtcaggagttcgagaccagcctggccaacatggtgaaatcccgtctgtactaaaaatacaaaaattagccaggtgtggtggtgcaggcctgtaatccctacatgggaggctgaagcaggagaatcacttgaacctgggaggctgaggctgcagtgagctgagattgtgccaccgcactccagcctagataacagagtgagaccctgtctcaaaaacaaaacaaaaaaaaataaagttcaacgatggacctcttacagatacaacgtggattcactttagtcaatcctatttctattaaacacataatctctttctatattttagttgtttttactatatactaactcccacatcctaccactttgttcccaactcaatgcttttgatcactgcttgtgtcctaattgaattttaccctttcttcaaggtccacctaaaatttccaattcttccaagatatttctccaacccactgtcttctctcccaaaagtatcattcactcattcgataaatacatattgtgcagcttctctgtcctagacgatgttccaaaagctgaagattgcaacaatgaatacagtctgtcctaaaaaaaacagtgctcagccaggagcaatggctcacacctacagtcccactggtttgagaggtcaagacaagactgcttgaggccaggagttcaagactagcctgagcaacatagcaagacccctagctctacacctgtgcacacacatacacaaattagctgggcgtggtggcacgcattagttaatcagctactcccagctactcagaaggctgaggtggaaggattgcttgaggactgctttagcctgggagttcgaggtcatagtgagttatgatcgagtcactgcattccagcctgggtgacacagcgagattccatctctaaaagaaaacacaacagtacaggattatccaactagccgatgaaacatgtatttagggcacacatgcacagactcgagggaaaacatttggaaaaaataagttcaaaaataataattaaaatatatttcaccttagtattttatttttaattatatttgggaagagaccttatgatcttctcagtgcccagggtttctgaaggtcttcatctagtcctgctagcccagtaggaaaaaaaaaaaatcttctcctaaaaaccggattcctctcctgttttctctgatatgaatttattcaggtatctaagaaaaaaatctgcgagctgccccccaattccttcttcttcccaatcttccacacccagtcatctttgtatttgacaaagatcactactgcctaaatgagaagaatggcctgaaggggacaaaattgggtatacaattggagaccagttagaaagctgtaatacgagtggagataatgatgaactgaattgaagtgtagtagaggggactgaaagatgtgtaaaaagatatgaaaagggggaaatccatggaacttgcaaagtaaacgcgagataaagagggagttactgaagatagttcccttatttttggcttgaaaaccagttagatggtggtgctactcattaagagaacaagggaatattggagtttggggaaaagaacacaatagattgattctggtatatccacagacagaccatgtaccttctaaacactttccttacatatttttttaaaaataaaatcctttaaatttacatactattatgacattttacattccagaaaaaccaaggcatggtatggtgaagtaatttgcctaaaactgcacatctagttaaatggagaagccaggatttgaatacaagtagtctgactccagaactttgttcccaaccctatacaaacctcacggtaattcctgaaggtagatatttttacttatactttacagatttaaaacaatgaggctcagataaattaagtaacttgctaaaataaggtagcttacatgcagtggggctaaaattgaaacgtaaagttcatattgtttcaaatgtcagagtgtaagcaggtatttataattctcttataatcttttacaatgcctagcttagtattaaatgtgtatttaaagaacagtattgggctgggcgcggtggctcatgcctgtaatcccagcactttgggagaccgaggtgggtggatcacttgaggtcaggagatcaagaccagcctggccaaaaaggtgaaacgctgtctctactaaaaatacaaaaattagctgggcatggtggtgcatgcctgtaaacccaggtactccggaggctaaggcaggagaatcgcttgaacccgggaggcagaggttgcagtgaactaaaattgtgccactgcactccagcgtgggcgacagagtgagattccatctcaaaaataaattaaataaataaataaaaatgaagcacagtattggctgggcatggtggctcatgcctgtaatcccaacactttgggaggctgaagcaggaggactgctttgagccctggagttcgagaccgagcctgggcaacaaagtgagaccctgtctctagaaaacaaaacacaaccccaaagcaacaacagtattattattactaattctactaataatgtaagaacaggcttagctcccattcacctttcacagaaagttacttgaagatgtaccacaacatcaagtataaactagaaacaaaaatgtggtttcaagagaatagtaaaattaagtcccaggacaaaagtcttcctattgtactagagattggaggaggtcagtgagctttgggagagcagtcctcatggggaaagctttgaaatctaaaaattagatagtacaactaagagcttagagaatttgggaatataacaaagaaaactagtagaatctagaaaagatgttatctgaacttgtctctagcactgttcctttttttttttttttttttttttttttgagaccgagtcttgctctgtcgcccaggctggagtgcagtggcgccatctcggctcactgcaaactccgcctcccaggttcgcgccattctcctgcctcagcctcccgagtagctgggactacaggcgcccaccaccacgaccagctaatttttttgtatttttagtagagacggggtttcaccgtgttaaccaggatggtctcaatctcctgacctcgtgatccgcccgcctcagcctcccaaagtgctgggattgcaggcgtgagccaccgcgcctgacttctagcactgttcttaaacaaggggcatagtgtcatgacatcattaccctagaaaaggaagtgtatcctagcagtccatggttgtaaacatttacacaggaataacttaactgcttattaatatatttcatattttctcattttttcatattttaacatctctgaatgggattcttcttacaatcaatggtgtgtcatggtttaattagttattttttcctctttagtagtagataaaataatgatgcgtcttacaatgaatagcatgttgaatttgatgaattgtgtgtgccaagcactgcttgaaatgctttataatatacttttcctcatccagtcttcatagctgatgttaccaccattttgaaggctcaaagatgctaaacaataggttctaggactgctgtcaagtaagtggcagagcaagaatttaaaatcaggtctgatttccaagatcatgctcttattgttatctcagcacttaccttgggtgatacaaaggtgaataaaaacctatccttgtctgaactgctcaaataaaggtctagctcaaatatgatctttctgaaacctttccaactccccaggaagaatacatcttgttttcatctgtaccccctcaacattttaagaatacctctataatacctataatcttattatattatataatctccctgggcccttagaagtcaggaatattctcttaaccatccttttgaccctacagtgcctaccacagttcttgacatatagtagaagctcaataatgtttcttaaaaaggagacagggtctctgttgctaagtctaggagacaagaaatgcacataaagctaaaaaaaagtcaaaagtagtgtttaggagaattatatatttaagtgcagtacagtttaaaagaaccaatgagggccggccacggtggctcacgcctgtattcccagcactttgggaggccgaagtgggtggatctgaggtcaggagttcaagaccagcctggccaacatggcaaaaccccgtctctactaaaaatacaaaaaattagctgggcgtggggacgggcacctgtagtcccagctacttgggaggctgaggcaggagaatggcttgaacccggaggcagaggttgcagtgagccgagattgtgccattgcactccacctgggcaacaagagtgaaactccatctcaaacaaacaaaaaaacaccaatgataggaggaagtacaagaggatacagctcagccagcttccaggttttcacccatacacacacacaccccagtgtgaaaaagctgaaaccgtctacaatggctgaaaccacgctgctgagacatttttgaattttaattagttagcaacacttataaattaagtttcacataaaacccaggatttctggattttcctgagaaacgaagacatctcagaaactgggtgctcattctcctagagaaatgggttggatttgggtatcaaattctcctttcagatgaacttaatgctcacttatccatcgtagtaacttccaccatttgtttaggctcagcttgcataagataatttattttctctcgccagtctaggcatctgggtttaagaccccttctctagatacattactcactgcactatcacactatgaattttcaggcatccgtgctttgacttccactttgcctagaaagtcctttgctatctccaaaagtactcctactcccctaaggcactgcttcaattcctttcattagcttcttctgaccactctctcaaccgtgtcacgcagcactgtggtaatacctctattaaaacccttatcagagcgtatgcacaagcttctcctcttcgcgctgacgttcgctccttgaggccagcggcccacaactaactcatttcgcggttccagcttcacgtccatgccctggcacctacacccagtcgttcagtacgtttgcggaagtcagtcttcttacttcacggcaaacccaagctaaactaatattacgaccacagaagttgggctgaggtagaagtcaagactatcccaataactggattctggccgagaaaaaggcgcgcgccagcaccccagtcagtaaaaactaccgggcaaagttcgccgccgccactatcctcctctggctctgaaatagttccaattctcgcgagattcggcctgactaccagcccttcagctccagtgagttgcgggttggtttcctctagactctcgtggccacaccgttctccgatacgagcctttccggtgctatgccccggaagcggaagtgcgatcttcgggctgtcagagttggtctgttactcggtggtggcggagtctacggaagccgttttcgcttcacttttcctggctgtagagcgctttccccctggcgggtgagagtgcagagacgaaggtgcgagatgagcactatgttcgcggacactctcctcatcgtttttatctctgtgtgcacggctctgctcgcagagggtgagagcgggtatttctcagacgtttgatcagtccccgggaggaagggccccggggtcccctgtgccaccaggggaaagatcgcgagccttacttgcttgagaggctcatctactccacttcagggaatctctgggcaactcgtgaacaggagcaggaggggagtatggagtcgattgccgagttttctttggtctcaggtagatttcacttgcgtatttgtggagacaccttcacatcatgttactgttgttttggctgaagagtcagttgtattagcctttgaaaaaagttaactatgggtaaatacaaagcgaaaagttggaattcctccttctccaacagtaaccactttgtttgttgtgatcattccagtcatttctctattaacatgttgcttttaatgttttaggcataacctgggtcctggtttacaggacagacaagtacaagagactgaaggcagaagtggaaaaacagagtaaaaaatgtgagtatggcaacacattagaaataatttcaacacgtcaagctcattaagtccatgttcacaataaatattttaagagcaccagctgatacaaagatgaacctgacttgaagcctatttagaaatagaagacttttatgcaaaatgtgtaataccaactagagggaagtgaggggcgtagcagatacatgttatgtgctgtggtggttctaaagaagaggttcaatctggcgcagtggcttactcctgttaatcccagcactttggaaggctgaggcaggactgaacttaggggtttgacaccagcctgggcaacatagggagacctcgtccctacagaaaaaattagctgggtatggtggtacacacctatagtcccagctatttgggagactgaggcatgaggatcccttgagcccaggagattgaggctacagtgggccacgatggtgtcactacactgcctcctgggcaatagtgagacttgtctttaaaaaaaaaagaagaagaggcttcattcagttgtgaggaaccatggtagccttcataatgctgatggccttgcagttccttgtggatagttagaatttggatagagaatgaaatggggaaaggaaattccaggtaaagaaataacatatgagcaaaaatatggaaatcttaacatttaaggcatgtttggaggatgatatgtcattatgactggtgtcaaggtaagtggtgtcttcagagataagccgagtttcagttgggttagaaagttgaagaggtgtttaaggaaaagattaaaaacaagaagggtttgttacctttgaaataaagcaggaattccacaggactcagctaaaggtacagggtgaatggttccttataggcctgatttagttttctctcttctttttttccttataaggattaaatataacttttgtttcttagaattcctacaactttctgtattctgtgactttttcttatatcttcataggggtttgaagttttttttcttaaattaccatatttgatctacacagcaaccatttgtggttactcgtataaatattacctccatgtcataggaaagaaaattgagcctcaggatgataatgacaacttacgtcacagagcaaacaaagaattagagaccagactcaggcttttaaaattacagcttactgttccttaatttactcagtgttgattatgtacctcagcatatctgggccaaactcgttatctttaccttcacaaacatgatattcttccaggatttccctatcttggtgatgggtacctccatgcttccagtagtgtaagccagaaaccttgatatgctttattaatttggctccaggacaccatactttcggttttgctgctctccatcttactagtcatcctttttttattttttatttatttatttatttatttattttttgagacagggtctcactctgtcacccctcagagctcattgcagcctggacctcccaggcttaagcgatcctcctgcctcagacttctgagtagctgggactacagatgcacaccaccatgactggctgatattttggagagatgaggtcttgttctgttgccagggctgatctcaaactcctgggctcaagcgatcctcccggctaggcctcccaaagtgctgggattacaggcatgaaccacagtgcccagcccttactgatcattcttctgcaatttacttgatggtttcatttcttgacctcccgttgttgggagtgacacaaaatttagtttttttctctacattcacttccttggtgaacttatcttttggctgtattggccagtgactcccaaatttatgtctgtggccctctcttcttaatacaagattcatatatccacgcatcaatttgttatgtcagctagaatgtttggtggacagctcagtcccaacacgtcccaaattgaatacttgttcctcatgtctaagcctgtgtcatttgtagccttctttatcttggtcaatggcatttctgtccttccacttgctcaggccataattcttgtgtagttatcttttactcttcttacaacccacatctagtctgtctgcagatactgttgggtttcctttttgaagaaacaccccaaaccagtaaaggttcagaaagcttccgatatccagaatctgaccacttttcattagctccagtgttaaccactgtggtctaagcaccatgatcttttgcatggattattgcagtagtttccaacaagtgttcctgtctccctgaagtctgttctcaagatgacagccagaataatctttttaaaagcctatttgatcatgtccctttcactcagcagaaaagccagcatcctacagatgcttcctttttaccattctgatattctttcttctcacttaccctgcttcacccacactgtccagcttgctgttctttacacatactagccatactcttgtgctgggacctttctagtggtgattccttctgcttagaaatgttcttccctacaatatgtgctgggctaatcctattaccttcttcaaatctttgttccaacatcacctctgactcttaagttgaccactctatttaaaactgcaaggcagggcgcggtggctcaggcctgtaatcccagcactttgggaggctgaggtgggtggatcacgaggtcaggccttcgagaccagcctgaccaacatagtgaaaccccgtctccactaaaaatacaaaaattagctgggcgtggtggcacatgcctgtaatcccagctacctgggaggctgaggcaggagaattgcttcaacctgggaggcggaggttgcagtgagccgagattgcatcactgcactccagcttggccaacagtgcaagactcttgtctcaaaaaaaataaaaataaaataaaactgcaacctgcccatctcccctactcctaatattccttaccctgttctattttttctgttgcttttattactttctaatatactgtatgatttacttatttatcatgttattgcttattgtgtatttctacctgctagaatgaaaactccactagggcacggttctttgttgttgtttacctatgtatcctgtttacctagaacactgactggcacatagtaaatgtttaacaaacatttgttgacttgaatgctttcttcttttgccccatatatgcagtccattaccaagccctattgttgttttcctgaatagttttcagatcatttcacatctcttcatttctcccatcaccacctagtctaaacttctattatatttcatttaatctgctgcagtaacctcctctctggtccatctgcagccactcaaatttgccccctataatgcatctagggtaattttttaaaacacaaatctgattatgttacttgtctttcttaaaacctttcaatttcttcacattgctttaggataaacatgtggcctgtaaggtccagcacagcacagtaccaccctcccttctcctggctacatcttgtatcatattctctcttgctccctattctctattcattcatgccttttttctgtcctctgggctagtcttatggtttcctactacaggcactttgtatctgttgttcctcctacctgcgataagtttcccttctcattttgtttagtaaactcctactcattcttcagatctcaaagccttatccagtctcccagacagggccaaatcttcctatcatagtttatgatttatccacatacctctccttagagtggttgtcacaactgcagttttacctatatatgattatggtcatcagggtaatgtctctctcctcaacaaaactgtaattgctatgaggacaaaggccattgtatccacagtacctaatgcagtgcctggcacatattagatacttgataaatgtgtatttaataaattatctgtgtagcataacatcacatatattctttgtgaaaaattgttctgctatgatcctatgctagttggcagcatgcaatggcatccctgtatacatttcttcatgtcatttatatcattgagtagttttatgaaatacaaaacaaatttagcttcaaattggtttgaatattnnnnnnnnnnnnnnnnnnnnnnnnnnnnnnnnnnnnnnnnnnnnnnnnnnnnnnnnnnnnnnnnnnnnnnnnnnnnnnnnnnnnnnnnnnnnnnnnnnnnnnnnnnnnnnnnnnnnnnnnnnnnnnnnnnnnnnnnnnnnnnnnnnnnnnnnnnnnnnnnnnnnnnnnnnnnnnnnnnnnnnnnnnnnnnnnnnnnnnnnnnnnnnnnnnnnnnnnnnnnnnnnnnnnnnnnnnnnnnnnnnnnnnnnnnnnnnnnnnnnnnnnnnnnnnnnnnnnnnnnnnnnnnnnnnnnnnnnnnnnnnnnnnnnnnnnnnnnnnnnnnnnnnnnnnnnnnnnnnnnnnnnnnnnnnnnnnnnnnnnnnnnnnnnnnnnnnnnnnnnnnnnnnnnnnnnnnnnnnnnnnnnnnnnnnnnnnnnnnnnnnnnnnnnnnnnnnnnnnnnnnnnnnnnnnnnnnnnnnnnnnnnnnnnnnnnnnnnnnnnnnnnnnnnnnnnnnnnnnnnnnnnnnnnnnnnnnnnnnnnnnnnnnnnnnnnnnnnnnnnnnnnnnnnnnnnnnnnnnnnnnnnnnnnnnnnnnnnnnnnnnnnnnnnnnnnnnnnnnnnnnnnnnnnnnnnnnnnnnnnnnnnnnnnnnnnnnnnnnnnnnnnnnnnnnnnnnnnnnnnnnnnnnnnnnnnnnnnnnnnnnnnnnnnnnnnnnnnnnnnnnnnnnnnnnnnnnnnnnnnnnnnnnnnnnnnnnnnnnnnnnnnnnnnnnnnnnnnnnnnnnnnnnnnnnnnnnnnnnnnnnnnnnnnnnnnnnnnnnnnnnnnnnnnnnnnnnnnnnnnnnnnnnnnnnnnnnnnnnnnnnnnnnnnnnnnnnnnnnnnnnnnnnnnnnnnnnnnnnnnnnnnnnnnnnnnnnnnnnnnnnnnnnnnnnnnnnnnnnnnnnnnnnnnnnnnnnnnnnnnnnnnnnnnnnnnnnnnnnnnnnnnnnnnnnnnnnnnnnnnnnnnnnnnnnnnnnnnnnnnnnnnnnnnnnnnnnnnnnnnnnnnnnnnnnnnnnnnnnnnnnnnnnnnnnnnnnnnnnnnnnnnnnnnnnnnnnnnnnnnnnnnnnnnnnnnnnnnnnnnnnnnnnnnnnnnnnnnnnnnnnnnnnnnnnnnnnnnnnnnnnnnnnnnnnnnnnnnnnnnnnnnnnnnnnnnnnnnnnnnnnnnnnnnnnnnnnnnnnnnnnnnnnnnnnnnnnnnnnnnnnnnnnnnnnnnnnnnnnnnnnnnnnnnnnnnnnnnnnnnnnnnnnnnnnnnnnnnnnnnnnnnnnnnnnnnnnnnnnnnnnnnnnnnnnnnnnnnnnnnnnnnnnnnnnnnnnnnnnnnnnnnnnnnnnnnnnnnnnnnnnnnnnnnnnnnnnnnnnnnnnnnnnnnnnnnnnnnnnnnnnnnnnnnnnnnnnnnnnnnnnnnnnnnnnnnnnnnnnnnnnnnnnnnnnnnnnnnnnnnnnnnnnnnnnnnnnnnnnnnnnnnnnnnnnnnnnnnnnnnacagggtttcactctgtcacccaggttggagtgcagtggcccaatcatggctcactgcagtcttgacttcctgggcttccatgatcctctcatctcagcctcctgagtagctgggaccacaggagtgcaccaccatggccggctgatttttgtagttttggtagagacgaggtttcaccgtgttgcccatgctgatctcgaactcctgaactgaaatgatcttcccatcttggcctctcagagtgctgggcttacagaactgagccactgcacccgacataaaatgttatttttataacattttaaaatgtgaaatttgacatttttcttttatgatctctcactagtatgttcattcaaaatctttctctctctctttccatgtacatgatgttttgttttattttattttggcgacagggtctcgctctcgcataggctggagtgcagtgaagtgaacacagctcactgcagcctcaagctcctgggctcaggagctcctcctgcctcagcctcctgagtagctgggactataggcatgtgccaccacactcggctaatttttcaattttttatagagacagagtcttgccatgttgcccaggctgatcccaaactcctgggctcaagcagtcttcccacttcaacctaccagagtgctgggattacaggtttgagccaccatgcctggcctgtatcttacctttctatttacctagaacagtatctgttacttagtcttccagaacaaacacacacacacacacacacacagatacacaaaacacatattttattttggccagccttttaaatttcatttgcaatattggagtcaagttgaattttacaattcttggataaagcagtgataccaattttgcttttagaattcagggacaaacttcatgtactaagggaaagagttctacccgctaattctctttaatgtaggttttagaaatggtacctataccgtactgtttgctattagtatactaagataatatgggtaacagataatataaataaactaagtaaaggtaatttttgacatatccctagtccatttacaggtgattaaagatggtaaatataatataaatacattacactatttctttttctttcttttttttattttttgagatggggtctcgctctgtcgccaggctggagttcagtggcgagatcttggctcactgcaacttctgccttccgggttcaagcgattctcttgcctctgcctcccaagtagctgggactacaggcacgcgccacatgcccagctaaattttgtatttttagtagagatgggttttcaccatgttggccaggatgatctcaatctcttgacctcatgatctgcccacctcggccttccaaagtgctggaattacaggtgtgagccgctgcacccggcccactatttctttttcaaaagcttattgttatgtaatcatgatagtaattgaaatgcatcagaaaaattggtatttttttttttttttttgagaaacagagtctcgctctattgcccagactggagtagagtggtgtgatctaaactcactgcaacctccaccgcctggattcaagtgattctcctgcctcagcttcccaagtagctggaattataggcatatgccactacgcccagctaatttttgtatgttttttagtagagacggggtttcactatatgttggccaggctggtctcaaactcctgacctcaggtgatctgcccgcctaggcctcccaaagtgctggggttataggtgtgagccactgcgtctgtctggtcttagcttttttggctctcctgattttcctgcagtgtgcgtataactatcttgtcacattactgtaattgtcatttgattatttcccctgactagattattctttagaaggtagggatcatttttttttcatctgcttagagttatttaggcagccaataactgagtgaataaatttctaccttctgtcataagagaatggaattacaattaaccctagttatctgagagaatagaaatttgaaaattgtgctttgaaactagctaaggtaatcatcctcagctgatggtctgttttcattatgattatatcaatacaattctttatgggtatttgattaatgatgcttataattgttgtttcattcttagaatattgtatctaccttttaccatcagtagctatgagagtggaccagttaacttaatcatgaccataatcagtcagtgtgtaactttcttgcaagcttctttcattggttcagctgtgataaagcatcctttgtttctttagtataatccagttaatttttactgtgttactatgttgtttacagtggaaaagaagaaggaaacaataacagagtcagctggtcgacaacagaaaaagaaaataggtaagatgagatattagtcaaaatgaaatttgggttttcttaaaaaaattaattcttagataatgaaaatataaaattattaatagtgataactcacatttctatgattttatggtttataaagcacatgcatactttatctcacttgattcttacccattttgtgaggtgtacaggacaaatttaagcagttcctctatttttgctcttagctttggaatttgagttttgtaaaatgacagttgtggcttttgaacttggctgagggtttttggcatagtttgtaaaagcatgttgttttttatatctgagatgattatttccacttaagtcttacttgtattcattgtttccatggcttccttactgagtattgactagtgatggaaatccaccaaggggtaggaaattttctgagtaattttgatatacttggagaaataatgaccatatcatgtgtttttagttttttagtataacttagaatttaagtaattctgtttccaaaagacaattcgtaaaggattgtatatgatttgtttttatacattatgacatttcttgattctgaaattaggaaaaaaattattatgagattgtgtatttgttttagaaactgtgtctgtatccctaggtcactgctgttacaacccaggggagaattccatgcgattagactatgtcaattcctgttctgattaaagtttttcagttagtatagcgatcctggatgttttttaagtggtctgttcacttaattctatgagaaaatgctattgaacatttacgctgtatgtgtcagttactcctaacagcattggagaaacaaagtagaaaaagattctatttttatgagctctatttagagagggaaaatagaccagaaaataaatgattactatgcaggatgataagtacttttttgtttgtttgcttgtttttttctgtttttgtttttgtttttttttgagacagagtttcactcttgtttcctaggctgtagtgcagtggtgtgatctcggctcactgcaacctctgcctcccgggttcaagcgattttcctgcctcagcctcacgagtaggtgggactataggcatgcaccaccacacctggctaatttttgtatttttagtagagacgggattttgccatgttagccaggctggtctcgaactcctgacctcaggtgatccgccgcctcaacctctccaagtgctgggcttgtagacatgagccactatgccggccaagagtcttgaggaacagaaatttaaggaacaacagaagaagtaaagttctgaaaaagtattgccagataagttggaaagtagtagtgtcacagaagttgagaggagagtgtcagggaggaggaagggcctgatgatgatggtaaatgtctaagaaatggaggttattagtgcttctagcaaaaatggtttcagtggcatgatgggggacagaagccagatcatatagatgaagaagagaatgcagacattgagaatgcagacagtgagaaaatgaagacattcaacatggacaactctttcaagtacctttgctataaagaataggaaggatataaaaatggaaggcagattatcctctgtccttaaattggcaacacggtgtatctgaattcaaatgatcttaacatggagtgtaaccttgaattgtttgctcaccccagaaaaactcatcagaagttataagaaataatatttattgccaggcatggtggctcacgcttgtaatcccagcactttgggaaaccaagacgggtgggtcacctgaggtcaggagttcaagactagcctgaccaacatggcgaaaccccgtctctactaaaaatacaaaaattaaccaggcgtggtggtgcatgcctataatcccagctacttgggaggctgaggcaggagaatccacttgaatctgggaggtggaggttgtagtgcgccgagatcgcgccattgtactccagactgggcaacaagagcaaaactttgtcgcaaaaaaggaagtagtatttatgaagagttgcttatcaaaatcttattagaaattatgagatgtaatatttatgaagaatttcttgaaagatgatctatccattctctagatttgtacattttaatcttagattaagccagactatcagaaatctgtaaacctaaactggattattttggacttcataaaacgcttttactgtatttcgccttggcatttgcattgttaggcttattatgaaaaattcagccaggtataatacaatttgttatagtactactatggaatatattcaaaaacatccacaacattacacaattgtcttttgataagaaattgtggaaactgtttctattagttttcaatatcaggaaaagtagcagttctcataagtaattgatttattttatcttacggacactgtgctcgaactgatttttgttttcctttgaatcggctgctgataagcctggaatgagacttgctcattctcatgcaagaaaatcatgagatttgctcatttggtgttcatctccagcaactttataggaccaattaaatgtatttttatgtactgatcctatatagtttcattattatctaacccttactttttcttagcccagattcctcacttgagcttatttacaaatatatactatatttgtatatatagtatatatttgtaaatatatatatagtatctggggaaaagggagtataaagagtaaagccactgcactgaaagaagggagttttcagtaagagggaagcagccagcaatattcagtgttccggagaagcaaaatgtcattgatttcactaggtgaagctctttgataacaatccttgagagaaccattaatctgcagtggaagcgtcctttgctttttaactgaagatttgatgttcccaattcttaatttcaggagcaaatgttttgactattttgcatttccctcttataagaagaaaaatgaatttacttttggtatatgaattttatatagtttgttttgttgtattccaaataaagaagtcataaggggtttatttgaaggatatacgtgatgagaaactcaggcaaagctgaactaagtggttacaggaaggcaggaaccgtggtaaagcaagtcctgcaagcagagcaagtcttgagaaaaagctggacagggatcttcactgtaagacttcactaatttttttggcattcagcttttgtcttcacctaaccttccctgtgtccttccccactcccaaccccttaggaatatctgctccagatgcttgtgtccttgggttctatctcagtattttcataatgtgatccatagattacctacatcaatattgcttgagatacttgtgaaaaatgaagggttctaagtattactcccagactttactgaatcaggatctctggatgtgggacccaggagtctacttttttctttttttttttttttaaacaagctgcccatataattcttaggcaaattaaagtttcagagccagtaccatattataacttttctatttctgttcccatagttaattgatttattttcccaaaattttctagcataaattcctgagagaggaatctaattggcccagctgatctttttatgtcataggtcatgggagagcctatggtttggctgctacttgggtcagcagtagtaggacagagggtgttataaatcttcatgaggctaacccttcaacaaggtatnnnnnnnnnnnnnnnnnnnnnnnnnnnnnnnnnnnnnnnnnnnnnnnnnnnnnnnnnnnnnnnnnnnnnnnnnnnnnnnnnnnnnnnnnnnnnnnnnnnnnnnnnnnnnnnnnnnnnnnnnnnnnnnnnnnnnnnnnnnnnnnnnnnnnnnnnnnnnnnnnnnnnnnnnnnnnnnnnnnnnnnnnnnnnnnnnnnnnnnnnnnnnnnnnnnnnnnnnnnnnnnnnnnnnnnnnnnnnnnnnnnnnnnnnnnnnnnnnnnnnnnnnnnnnnnnnnnnnnnnnnnnnnnnnnnnnnnnnnnnnnnnnnnnnnnnnnnnnnnnnnnnnnnnnnnnnnnnnnnnnnnnnnnnnnnnnnnnnnnnnnnnnnnnnnnnnnnnnnnnnnnnnnnnnnnnnnnnnnnnnnnnnnnnnnnnnnnnnnnnnnnnnnnnnnnnnnnnnnnnnnnnnnnnnnnnnnnnnnnnnnnnnnnnnnnnnnnnnnnnnnnnnnnnnnnnnnnnnnnnnnnnnnnnnnnnnnnnnnnnnnnnnnnnnnnnnnnnnnnnnnnnnnnnnnnnnnnnnnnnnnnnnnnnnnnnnnnnnnnnnnnnnnnnnnnnnnnnnnnnnnnnnnnnnnnnnnnnnnnnnnnnnnnnnnnnnnnnnnnnnnnnnnnnnnnnnnnnnnnnnnnnnnnnnnnnnnnnnnnnnnnnnnnnnnnnnnnnnnnnnnnnnnnnnnnnnnnnnnnnnnnnnnnnnnnnnnnnnnnnnnnnnnnnnnnnnnnnnnnnnnnnnnnnnnnnnnnnnnnnnnnnnnnnnnnnnnnnnnnnnnnnnnnnnnnnnnnnnnnnnnnnnnnnnnnnnnnnnnnnnnnnnnnnnnnnnnnnnnnnnnnnnnnnnnnnnnnnnnnnnnnnnnnnnnnnnnnnnnnnnnnnnnnnnnnnnnnnnnnnnnnnnnnnnnnnnnnnnnnnnnnnnnnnnnnnnnnnnnnnnnnnnnnnnnnnnnnnnnnnnnnnnnnnnnnnnnnnnnnnnnnnnnnnnnnnnnnnnnnnnnnnnnnnnnnnnnnnnnnnnnnnnnnnnnnnnnnnnnnnnnnnnnnnnnnnnnnnnnnnnnnnnnnnnnnnnnnnnnnnnnnnnnnnnnnnnnnnnnnnnnnnnnnnnnnnnnnnnnnnnnnnnnnnnnnnnnnnnnnnnnnnnnnnnnnnnnnnnnnnnnnnnnnnnnnnnnnnnnnnnnnnnnnnnnnnnnnnnnnnnnnnnnnnnnnnnnnnnnnnnnnnnnnnnnnnnnnnnnnnnnnnnnnnnnnnnnnnnnnnnnnnnnnnnnnnnnnnnnnnnnnnnnnnnnnnnnnnnnnnnnnnnnnnnnnnnnnnnnnnnnnnnnnnnnnnnnnnnnnnnnnnnnnnnnnnnnnnnnnnnnnnnnnnnnnnnnnnnnnnnnnnnnnnnnnnnnnnnnnnnnnnnnnnnnnnnnnnnnnnnnnnnnnnnnnnnnnnnnnnnnnnnnnnnnnnnnnnnnnnnnnnnnnnnnnnnnnnnnnnnnnnnnnnnnnnnnnnnnnnnnnnnnnnnnnnnnnnnnnnnnnnnnnnnnnnnnnnnnnnnnnnnnnnnnnnnnnnnnnnnnnnnnnnnnnnnnnnnnnnnnnnnnnnnnnnnnnnnnnnnnnnnnnnnnnnnnnnnnnnnnnnnnnnnnnnnnnnnnnnnnnnnnnnnnnnnnnnnnnnnnnnnnnnnnnnnnnnnnnnnnnnnnnnnnnnnnnnnnnnnnnnnnnnnnnnnnnnnnnnnnnnnnnnnnnnnnnnnnnnnnnnnnnnnnnnnnnnnnnnnnnnnnnnnnnnnnnnnnnnnnnnnnnnnnnnnnnnnnnnnnnnnnnnnnnnnnnnnnnnnnnnnnnnnnnnnnnnnnnnnnnnnnnnnnnnnnnnnnnnnnnnnnnnnnnnnnnnnnnnnnnnnnnnnnnnnnnnnnnnnnnnnnnnnnnnnnnnnnnnnnnnnnnnnnnnnnnnnnnnnnnnnnnnnnnnnnnnnnnnnnnnnnnnnnnnnnnnnnnnnnnnnnnnnnnnnnnnnnnnnnnnnnnnnnnnnnnnnnnnnnnnnnnnnnnnnnnnnnnnnnnnnnnnnnnnnnnnnnnnnnnnnnnnnnnnnnnnnnnnnnnnnnnnnnnnnnnnnnnnnnnnnnnnnnnnnnnnnnnnnnnnnnnnnnnnnnnnnnnnnnnnnnnnnnnnnnnnnnnnnnnnnnnnnnnnnnnnnnnnnnnnnnnnnnnnnnnnnnnnnnnnnnnnnnnnnnnnnnnnnnnnnnnnnnnnnnnnnnnnnnnnnnnnnnnnnnnnnnnnnnnnnnnnnnnnnnnnnnnnnnnnnnnnnnnnnnnnnnnnnnnnnnnnnnnnnnnnnnnnnnnnnnnnnnnnnnnnnnnnnnnnnnnnnnnnnnnnnnnnnnnnnnnnnnnnnnnnnnnnnnnnnnnnnnnnnnnnnnnnnnnnnnnnnnnnnnnnnnnnnnnnnnnnnnnnnnnnnnnnnnnnnnnnnnnnnnnnnnnnnnnnnnnnnnnnnnnnnnnnnnnnnnnnnnnnnnnnnnnnnnnnnnnnnnnnnnnnnnnnnnnnnnnnnnnnnnnnnnnnnnnnnnnnnnnnnnnnnnnnnnnnnnnnnnnnnnnnnnnnnnnnnnnnnnnnnnnnnnnnnnnnnnnnnnnnnnnnnnnnnnnnnnnnnnnnnnnnnnnnnnnnnnnnnnnnnnnnnnnnnnnnnnnnnnnnnnnnnnnnnnnnnnnnnnnnnnnnnnnnnnnnnnnnnnnnnnnnnnnnnnnnnnnnnnnnnnnnnnnnnnnnnnnnnnnnnnnnnnnnnnnnnnnnnnnnnnnnnnnnnnnnnnnnnnnnnnnnnnnnnnnnnnnnnnnnnnnnnnnnnnnnnnnnnnnnnnnnnnnnnnnnnnnnnnnnnnnnnnnnnnnnnnnnnnnnnnnnnnnnnnnnnnnnnnnnnnnnnnnnnnnnnnnnnnnnnnnnnnnnnnnnnnnnnnnnnnnnnnnnnnnnnnnnnnnnnnnnnnnnnnnnnnnnnnnnnnnnnnnnnnnnnnnnnnnnnnnnnnnnnnnnnnnnnnnnnnnnnnnnnnnnnnnnnnnnnnnnnnnnnnnnnnnnnnnnnnnnnnnnnnnnnnnnnnnnnnnnnnnnnnnnnnnnnnnnnnnnnnnnnnnnnnnnnnnnnnnnnnnnnnnnnnnnnnnnnnnnnnnnnnnnnnnnnnnnnnnnnnnnnnnnnnnnnnnnnnnnnnnnnnnnnnnnnnnnnnnnnnnnnnnnnnnnnnnnnnnnnnnnnnnnnnnnnnnnnnnnnnnnnnnnnnnnnnnnnnnnnnnnnnnnnnnnnnnnnnnnnnnnnnnnnnnnnnnnnnnnnnnnnnnnnnnnnnnnnnnnnnnnnnnnnnnnnnnnnnnnnnnnnnnnnnnnnnnnnnnnnnnnnnnnnnnnnnnnnnnnnnnnnnnnnnnnnnnnnnnnnnnnnnnnnnnnnnnnnnnnnnnnnnnnnnnnnnnnnnnnnnnnnnnnnnnnnnnnnnnnnnnnnnnnnnnnnnnnnnnnnnnnnnnnnnnnnnnnnnnnnnnnnnnnnnnnnnnnnnnnnnnnnnnnnnnnnnnnnnnnnnnnnnnnnnnnnnnnnnnnnnnnnnnnnnnnnnnnnnnnnnnnnnnnnnnnnnnnnntttttttttagtgtaaaatgacaatttgttcgtctcattacaggttcgaatgaaatccatgtttgctattggcttttgttttactgccctaatgggaatgttcaattccatgtgagtgtccttttatatgcttttgactaataactattactctatatttgtatgtatgttagcatgaactttttgggtaaaatattttattttgatgtaatttcaaacttaaagagaagttgcaagaatagtatatccattacctacattcacagttgttaatgttttgcttcacttcttttttttctttttctctcttttctttctctattatatgtgtgctcatccatacattatttatgtatttttcttaatcatttgagagtatgttgtaggctgtatgccccgtttcccataactacttctctgtatatttcctaaggacattttcttatataacttcaaaacaattatcaaaatcaagggaatttttgttttttgggtcttttttttttttgagacggagtcttgctctgtcacccaggctggagtgcagtggcgcaatcttggctcactgcaacctctgtcttcctgcgttcaagcgattctcctatctcagcctcccgagtagctggtactacaggcatgcaccaccatgcccagctaatttttgtatttttagtagagacggggttttgccatgttggtcaggctggtctcaaactcctaacctcaggtgattcacctgcctcggcctcccaaagtgctgggattacaggcgtgagccaccacgcccagccagaatttaatttttataaaatacaattacacaataacttttttacccttttaatattgagggtgttttatgtataagacataaggcgtaggcattatgggttctctatagagaatttaatatgttccctctttttcagttgcttactaacatgctgcttcaaaatgaaggtagtcataaaaagatcttttgcttcttaaaatagagtcttaataactataatcttgtttaatgataaggtaaattactgttgtctaaaccagcatatagcagaccagagtaattatggaactgagtttgacagaaaatatccaacgatgatagtaatttattatctttttgttgttgttgttcgggacagagtctctctctgtcaccaggcgggagtgcagtggcgcgatctcagctcactgcaacttctgcctcctgggttcaagtgattctcctgcctcagcctcccgagtagctgggactacaggtgtgtgccaccatgcctggctactttttgtatttttggtagagacggggtttcaccatgttggccaggctggtctcaaattcctgacctcaagtgatcctcccacccaggcctcccaaagtgctgggattacaggcgtgagccaccacgcctggcccaggctaatttttaaaaagttttttgtacagacaaggtgtcactgtgttgcccaggctgaatataaactttaatacagaagaatggttgttttgtaacctgctataatttttgtccacacaaaagtctgtgggcaatttttaaaacatgatatatgtattaatttctgtaacttactcttttttgaaatgtctttataatgttccattgaatggatgtacttttttttttttttctttttttttttgagacggagttttgctctttatgcccaggctggagtgcaatggcctggtctcaacacactgctatctccgcctcttgggttgaagccattctcctgcctcagcctcccgagtagctgggattacaggtgcgaaccaccacacccagctaattttttgtatttttagtagagatgggttttcaccatgttggccaggctggtctcgaactcatgacctcaggtgatttgctcaccttggcctcccaaagtgctgggattacaggtgtgagccattgcgcctggccaggatgtactctgtttaactaattttttattaatcatcataaagaatttttagatagtatgtataccaatgtatacttattattcccttagggtatatcctagtatttcgtgagttaaactttggtatatattgttccttagaaagattttattaatttatatctttagattattgccatcagtacttgtgaatggatctttctccttatacttatcatcactggaaattatgatgtatctgcttaaaatttgccaattgaatagttgaaaaataatatttctttcaaattttttcatttttttgataatttgtgtgagatttaacatcttttcatatacttactatgtttttccagttttaagttcctagttcattccctccacttgctccctgccttcttttttttgacgtttattttttatgttttttatttacaaggagttttttacatatagaggctattaaactctttttttggaaaatattttttgttgttaaagctgttactcttttccattatgtaagtaatgccattcgtcatatcagattatagaaaaatttttttcctgtttttttctattttcttatttatttatttaaagacaggttttcactccattacccaggccggagtgcagtggtgcagtcattgcccactgcatccttgaactcctgggccccagtgatccctacctctggcctcccagagtgttggggttacaggcatgagccactgcacctagcctacttgttatatttaaatatttgtttcgtctacaatttattttggtatttggtttccaactttactaagtttttaaccattgtcaatatcacgtagttgaataaatcatcttttccctgatgatttgaaatgacttgtttattacgtatcagtagcttcccaaaacttaggcagtggatcttaaccaggaatgtgcatcagaatcatatacgggggaaaaaaatcatatatggagttttataaaataattttcttatatgagtaatatataaaacttatttctaaaaaattcaaacacttatatagaataaaaagtgaaagtgaacccaaatagattgaaaacttagatccacacaaaaacctgtacacagatgtttatagcaggtttattcataattgccagaagttggaaggaatcaagatgtctttcggtaggtgaaaggataaacaaactgtggtacaactagacaatgaaatattattcagtgctaaaaagaagtgagctggtaagccatgaaaagacatggagaaatcttaaatgcataattttaagtgaataagctcttccaaaaaggctgtatactgtacgattcctgctgtatgaaaaaggcaaaactatggagacagtaaaaagatcaatggttgccaggagttaggaggaagggaaggatgactaggcagagcacagaggattctttagggcaatgagattattctttatgatactataatggtagataacatgttattatatatttgtccaaacccatagaatgtacaacaccaagaatgaaccctaatgtcaaccatggactttgaaactcacttggaaccaattgtgttccctgtgaaagcagcattctcatccatatgttttagtggtactcaattctcatcaccaggaattcaaaccttttttgtttcccttcctctccctcttcttttcattagacattactccatatctgtcctgtcccaaatttaatgatatgtactggattaaatctgaccctttcaactttctcttcctctcagttaacagcccctgttttctgtctgtgtagtcattcattcatccctccctctcttctcattcatcctagcaccagctcccatcctagtttcaatgattatttccttttttctcctttgctattactttttgcttggtatcacaatagcctgctttcgctccctcaggtgtctcctctctatccaacattgttaagttagccatcctcagaagcctgttactcattgcctaataacattatctgctactgattaaatagtaacccatgttggggactgtagtgaactttttatatatgttacccttttactggtttttttttttttgaaatggagtcttgctgtgtcacccaggctgaagtgcagtggcgtgatctgggctcaccgtaacctccacctcccgggttcaagcgattctcctgcctcagcttcctgagtagctgagattacagggactcgcccccacaccaagctaatttttgtatttttagtagacatggggtttcaccatgttggcaaggctggtcttgaattcctgacctcaggtgatctgcctgcctcggcctcccagagtgctggtattacaggtgtgagccaccacgccctgccttcccttttacttttaacagtcttctaagataagaattctaatctttattttacagatgaggacgtgagactctaagtcacttaacttgctcaaggtctccaagctagtaaatgttgagctggggtttaaccctgtctctcagactctaaagtccacacttatcaccatgcaaccctgactattgattttagtcagactccttaccctggctctcatgacattccatgctttggccccagcctgtttttcaaactattttcttatcattgcctactacgtactctgttttaactgtattgttcactgttcctggggcacttattctttcaaatgaattttagaatcaatcaagtgtcagcttcctctaaaataatcccttctgagttttgtctgaaattttattaaatttgtacattaattttgaggtattaaatacctttataatttttagtattcccatccagaaacatggtatttctgccaagtctattttatatactttctgtagtttctttccaaataagtataagtaatatttcatattttctagtttgctactactgtctataagtagcttatcaattttttttttttttttttttttttttgagacagagcctcacactgttctctgttgcccaggctagagtgcagtggcacgatcttggctcattgcagcctctacctcccgggttcaagtgattctcctgcctcatcctcccgagtaggtgggattacaggcaggcatcactacgcctggcttatttttgtatttttagtagagatggggtttcaccatgttggccaggctagtcttgagctcctgacctcaagtgatccacctgcctcagcctcccaaaatgctgggattacaggcgtgagccaccatgcccagcaggttatcaatttttgtgattttattttctaattggacatcttcctgaactctcctagcttttaatttgattctctagttttctagatagataatcatatgatcagacaaataatattgtcatcttttccaaattctcttttccctccatcccttcctttctctccatcactgttctctagttctattgtgcaatgaattagaacaaccagaagagggttaaatactcaaaggtaaaataccaacgatactgcagtaaagatgggaacaagatgaagagaatgcccatatcactgctatgatatttatgaaatttttaaagaatggaggttttcaaagctatatgcaagcatatgtgatatgttatccttaatagagttaataatataataagcacttatcaaatatttggtgattaagttattagaccttggaccagtattgaaatgccagattatttttgcagttcatcaatataaaatactagatgctgtgtgtgtgtgtgtgtgtgtgtgtgtgtgtgtgtgatataggtcttccaagctatagaagtcaaagaagtcaagtagagtatcttcaaggaggaaaattatatgaaagcttcattataatcaggtttcttataaaaggatatgttggcaggaaagaaggctattttttttttttttttttgagatggagtctagctctgtcgcccaggctggagtgcagtggcacaatctcggctcactacgacctccgcctcctgcattcaagcaattcttctgcctcagcctcccaagtagctgggactacaggcatgcaccaccatgcctggctaattttcttatcattgcctactacctactctgttttgtattgttagtacagagggggttccaccatattggccaggctggtctcaaactcctgacctcgtgatccacccgcctcagcctcccaaagtgctgggattacaggcgtgagccaccgctcctggccttctttttttgtttttatgtatattattttcagcaactttcttattcagaacactggcaaacaatagctttttatttgcttgttttgttttcccaaactagtggaggttcgcataatatattttaccaatattagtgctgtattcatgtttttgttctggtctttgtaccctgtacatttaaaaaaaatattgtgtcttagatnnnnnnnnnnnnnnnnnnnnnnnnnnnnnnnnnnnnnnnnnnnnnnnnnnnnnnnnnnnnnnnnnnnnnnnnnnnnnnnnnnnnnnnnnnnnnnnnnnnnnnnnnnnnnnnnnnnnnnnnnnnnnnnnnnnnnnnnnnnnnnnnnnnnnnnnnnnnnnnnnnnnnnnnnnnnnnnnnnnnnnnnnnnnnnnnnnnnnnnnnnnnnnnnnnnnnnnnnnnnnnnnnnnnnnnnnnnnnnnnnnnnnnnnnnnnnnnnnnnnnnnnnnnnnnnnnnnnnnnnnnnnnnnnnnnnnnnnnnnnnnnnnnnnnnnnnnnnnnnnnnnnnnnnnnnnnnnnnnnnnnnnnnnnnnnnnnnnnnnnnnnnnnnnnnnnnnnnnnnnnnnnnnnnnnnnnnnnnnnnnnnnnnnnnnnnnnnnnnnnnnnnnnnnnnnnnnnnnnnnnnnnnnnnnnnnnnnnnnnnnnnnnnnnnnnnnnctctacaaaaaaaaaaaaaaaattagccaggcatggtgctatacctctgtaatctcaccttcctgggaggctgaggcaggaggattctttgagcccaggaggtcaaggctgcagtgagccatgattgcaccactgcattccagcctgaatgacagagcgagaccctgtgtgaagcaaacaaaaataatatcccttacactcttaaaatttgttaacagctggcagatgctttaaggaaaaaaatctatggttagactaagaagggaaggacttgaactcccagactgccagaaaaaggactagatatagctacttatttagtagctgtatctactttttggcatctcttcctgaatcatttacataaagttgaaataacaggattttagaattgaaattttttttttttttttttttttgagatggagttttgctcttgttgcccaggatagaatgcaatggcatgatctcggctcaccacaacctctgcctcgcgggttcaagtgattctcctgcctcagcctcctgagtagctgggattacaggcatgcgccaccatgcccggctaattttgtatttttagtagacacggggtttctccatgttggtcagctggtctcgaactcccaacctcaggtgatccgcctgccttggcctcccaaagtgctggaattacaggtgtgagccaccgtgcccagcctgaaagagatcttaaaagtcatttaacacataacttctctcctaatacagaaagctcatcactaatgtctctaacagataatttgtcatcctttatttccaacaatgaggagcttagtggtttctgagataactagtacttttattgagtagtttttagagtttgaaaataattcgttttactgggccaaaatatgcctccctatatctgtacttgtgagcagtgatcctgccctctggagtcatagagtaagtgcacttaaagaaataatccacctattgtaaatcatctctctctttgcaccttccttcttctcttcccagtttttttctttattgtgctagacaccaatttctgttccttataacaagcttctattcctgtaggactttgagaggctgaggcaggcggatcatgaggtcaagagatcgagaccatcaaggccaacatcgtgaaaccctgtctctactaaaaatacaaaaattagctgggtgtggtggtgcacacctgtaatcccagctactcgggaggctgaggcaggagaatcgcttgaagcaggaggtggaggttgcagtgagctgagacggcgacactgcactctggcctgagtgacagagcgagactccatctcaaaaaaaaaaaaaaggaattatcagaagatttttcagatttgttgctggtttaaagtctcatgcatgttcaacttcatataattaaataacttatatataaagatataaaagattttatatcgcttgaacccgggaggcgaaggttgcaatgagctgagattgtgccactgcactccagcctgaccgacacggcaagactccgtctcaaaaaaaataaatattaaacatttctcatttttaatttctaatacagtaaatattaataactataagctacagaaacacaaagtttttagggtcctaaataatttgtcagtatataaaggggtcttgataccaaaagaattgagaatgactaatttaggaaaagattgatgagaataatctaggctcttctttacatcaccgtacatcaggttcatgtgtatttttagcatgtcaccctctctttgtttttcagagatcagagacttaaagctctatttctgtcccagattcttctttggaagtaagaaagttgtcagtcttccaaagataacaattctttttttttttttttcttttagatttgatggtagagtggtggcaaagcttccttttacccctctttcttacatccaaggactgtctcatcgaaatctgctgggagatgacaccacagactgttcccttcatttttcctgtatattctctgtactatgtcgattcgacaggtgagtgatcacatctaccatttaatatgtatatttttcccttgctgtcataccaattagcttttacttttataatactagaaatgtttacccattgttcctgagttctttcagttgctcattttagaatttcagtgtatcttccaaaagccattttaaatggctgtaggtctagatgactgatccttagggatgagaagtagtgataaaaccaaacatggattccacatcccattcttagagctctcaggctccttctttattacaactgcctaaagctgcaaaagtagagagtgggtttggtcttcccagtaccatttcttcattatataccagcaccatttagcggctcaggagcacaagtaagtttaacaatgtggtaattttaggttattcacagttgagataaagtttaggttatagaatttacatttggccaacttggtgatttgacattcgtagtgaaaaagagtgagaactaaggagtaaaagggttatgaaggcccggaagagagctataacattcgattagtggggaaaggttcaggcagaaaggtttagagaatgaagtggctttcgagatgggcctatggaagtgaaaaggtggccaggtgccgtggctcatgcctgtaattccagcaatttggtaggctgaggcgtgagaatcacctgagctcgggaatttgagaccagcctaggcaacattgtgagattccatctctacaaaaaatttaaaaattagctgggtatggtggcatgtgcctgtagtcccagctaccctagaggccgaggtcggaaggtcacaaaagcctgggaatttgagcttgaagtgagacttgattacatcactggactttagcctgggcagcagagcgggaccctgtctcaaaaaaagaaaagggggggagccgataattaaggtctctggctgaacaattctttattttagggcattattcagtttctgaacatattgccgttcggcaggctttgtagtggaaaggtttgcacatgcagtaaataggaacataaaattttccttacacttacacaagtgattctctttttctcccctccttctgaatactgtctgtggcagaagatttttggttgccctgtgtattagtttgttcttgcattgctataaagaaatacctgagactgggtaatttataaagaaaagaggtttaattggcttatggctctgtagattgtacaggaagcatgatgctagcatctgctcaacttctgggaagtcctcaggaaacttagaatcatggcggaatgcagaagggaagcaggcatgtcacatggcaagagtaggaacaagagagagaggtgggaggtattacacacttttaaacaaccagatactcgtgagaactcactcactatcacaagaacagtaccaagggggatggtgctaaaccacacaatttgacatgagatttggatggggacacagattcaaaccattatcaccctggaatgtgagaatcaatgggaaatcaaattatagttcatggctcaccaagatctttgtcattgtattgcttaatattttttcccaattcatatcccatcacatccccacaaatacagcactttgcccattctggcttgcttaatagttttcatgttacactcactcagatgtactttttgcttctgtttttccttatttctgaatgcctccctcttcttccttttaaacacaatcaagttttaaggcttccttttctggcacatattttctggcacttactgcattgtgaaggttagctataagaggagcatgactaaaatacagaaatatcaaaagactattataatagtgtagcaaaaaatcattatgttataaactataacagtgaaaagagggatgaaaagaatgggaaaagattgagaaataaatagaaggggaaaccagctgaacttagttattgatttaatgtgaaggagaaaggaaaaactaagaggactttcaggttttttattttggtgaccaaatggggactagtttcactaagagactgggaatagaagaaagaagagtatgttggttagaagacacgctgagtttgaggtgtttgttgaatagctaaatgattatgtccaccaataagttgtactcttgcttagctgaggtatatacttaaatttttgaaatggtctctgtaatagagctgccctagcccattttctgttgctgtaacagtataccacagcctggctaatttataaagacaatttagctcacagttctgcaggaaggccaagagcatggtgctggcatctactgagggccttcctgctacatcataagatggtggaggacatcacatggtgagaaggcaagagcgagaaccagagagaactcacttttatagcaaagccactcgtgataaggaacccactccagtgataatgacattaatctattcatgagggcagagggattacatttccaccacatgaacttttcggggacacattcaaaccatagcaggagtttattgtgaaagctaaggtaatgacaacacagatctcttttggtttagcacagatcctttgatctctgtggaatattggtctttaatttgttaagtctgaaattttaaaattgtggcttgggttgacatcttaataaaacacaatatgatgggccaggcgcggtggctcacgcctgtaatcccagcactttgggaggtcgaggcgggcggatcatgaggtcaggagatcgagaccatcctggctaacacagtgaaactccatctctactaaaaaaaatacaaagaaaattagctgggcgtggtggtggtcacccgtagtcccagctactcgggcgactgaggcaggagaatggtgtgaacctggaggcggagattgcagggagccaagatcacgccactgcactccagcctgggcaacagagcaagactctgtctcaaaaaaataaataaataagtaaaacataaaaaccacgatgtatatatttcactttaagcaacaaagagcaattctgagtttgttgttgttgttgttgttattattttgagacagaatctcactccgtcacccaggctggagtgnnnnnnnnnnnnnnnnnnnnnnnnnnnnnnnnnnnnnnnnnnnnnnnnnnnnnnnnnnnnnnnnnnnnnnnnnnnnnnnnnnnnnnnnnnnnnnnnnnnnnnnnnnnnnnnnnnnnnnnnnnnnnnnnnnnnnnnnnnnnnnnnnnnnnnnnnnnnnnnnnnnnnnnnnnnnnnnnnnnnnnnnnnnnnnnnnnnnnnnnnnnnnnnnnnnnnnnnnnnnnnnnnnnnnnnnnnnnnnnnnnnnnnnnnnnnnnnnnnnnnnnnnnnnnnnnnnnnnnnnnnnntacttgtgatggatcaatagtaatcttagatgcaccaaaaagtcaccatctaaaactgtagagttttcaaaatgaaataaatgttgttaagaattatcatttagagccaggcacagtggctcacacctgtaatcccagcactttgggaggccaaggcgagcaggtagcttgagcccaggagttcaagaccagcctgggaaacatggtgagaccccatctctacaaaaaatgcaaaaatttaactgggtatagtggtgcatgcctctactcccagctacttgggagtctgaggtgggaagattgcttgagcccgggaggtggaggttgcagtgagccgagattgcatcactgcactccagcctgggcaacagagccagaccctgtctcaaaaaaaaattatttaggaagttcaactcaagctggtctttacactccttttaattatttctaaaaatgtgatgagttgtgtgtcagttattttatcaggaatgcaaagctcattttcagtgcggatcggcaaactgtttctgtaaaggtctagatagcaaatattttaggctttgtggagaactgaagtgtacggtatatgctattaagttaaaataagaaaatctgcagatcctagactggtacagcctactgaaacatgcttgctgaatacaaaaaagagggggaggtgggcagcaaaaaacacaaaaaattttcatatgtttgttttcagttaaggaggatatatactaacactttttatttccacttgtccaggtgtatgcaaattcagtgtctagtgagggcctgtttcctgcctggttcatagagagtgccttctctctgcatgacacgcatgagaaaaaaagtctataaggactatagtattgcatagctaatgtaaaactgttgtatttgaaggatctgttcttttggtatatagttgtcttccccaagatcccagctgaattctaactacttattgcagcatcctcagtgatagtcatcttgcagataattttattacttaaattctaaaaacaaaaatagtctgaaatacttaaagcttggaaaaatcacagaagtcacctacctttatactttttgttttattaattgtaaattgtttctctacctattactcactgttagcttatgcacaagagaattatgaacatattaatatatccagtctgaaatgccttaacagcatttgaagtgttatcatggaatatatgcttcttcctttgaactaaaatccttattagcctgctatttccacatgttttatttgctttttaagatcttaggttacatgttgttgttttatttgctttttaagatcttaggttacataagaattgactctatggttgcctgcgaaatgaatagtcagaatatgaggatttcagaaactcaaattgtagactgtaccgtgattttcccatgaatgccattggcaaagaaataggcctggtttttcggttgttttgttgttgtttgtttgttttggagacagagtctcgttctgttgctccggctagagtgcagtgacgcaatcacagctcactgcaaccttcacctcccaggttcaagcaattctcccatctcagtttcctgagtagctgggattacaggtgcatgccaccacacccagctaatttttgtatttttagtagagacagggtttcaccatgtcggccaggcttgtctcaaactcctggccttaagtgatctgcctgctgtggcctcccaaagtgctgaacgcctggcagctttccaatcttaagtgttcttggcataggaaacatggaggcatgaacgtttgtaatggatatagggactactgaatctagagctgttggtgggctgtaacaggaagtgaagcttgtcactgagaaggattgcctgaatcttcacctcatggtatagcattaaggaatttcatttttctttcttgtgcttcttatagtgcaagtctgctggtgacaaattctcttaatcttcatttatctgaaaatatctttattttatcttcattcttgaaggatattttcattggacatagaattctggtttggcttttttgttcgttttaacctttaagcattttaaatgcctttccactgttttctggcctccattgtttctgaaaagttcttcatgtctttgtgtcctcgtaagtaatgtcacttttctctagctactttcagattttctctttgagattggttctcagaaatttgactgtgatgtgcctagagtatttttatttaaagtttttcctgctaggacttatggttttcattaaatgtagggaaatttcaatcattatttctttaactgttttctgcctcattctctctctcttcttcttctggaacaccagttgcttatatattagtcattttgggtattgtccaacaggacactgaagctatgttgaatttttttaaatctttttttttttctgttcttcagatgggataatttctgttgatctgtcttcaagttcacagactcctctaatctgtgttaaccctaagcctacccaatgatttttgaattttaggtaatatttttcagtttcagaatttttgctttatttggcatccttcctgagatttcttgtttgttaatatattatgagccatattttatgtccataattatttagctgctttaaaaaccttgtctgctgggctggtgtggtggctcatgcctgttcagcatttaggaagctgaggcaggagttcaagaccaagagcccaagagttcaagaccagcctggataacagagcaaaatctcatctctacaaaaaatacaaaaattagctgggcacagtggcatgtacctgtaatcccagctgctgggttatggggacttaagtgggaggattgctttagccctggagatcgggtttgtggtaagctgtgatcgcgcctttgcattcatgcctgggcggcagagcaagactctgtctcaaaaacaaaacaaaaaaaccttgtgtgctaattccaacatttggaatttggactccattccctgttctcttttttttgttttttgttttttttttttttgagatggagtcttgctcttattgcccaagctgtagtgcagtggcatgatctcggttcactgcaacctccatctcccagttcaagtgattctcctgtctcagcctcctgagtagctgagattacaggcacccgctaccatgcccggctaattttgtatttttaggagagaccgggtttcaccatgttggtcaggctggctagtctcaaacacctgacctcgggtgatccacctgcctcggcctcccaaagtgttgggattacaggcgtgagcccccgcgcccggcctgttctcttaagtaacagtatattttccagtttcttgatatatctagtaattttggatcatatcctggataatgtaaacgataggttgaagatattctggattcttttattctttggaagaagtgttgatatttttgtataggcaggcagttaacctggcatttgtcttagtccattagggctactataacaaaataccatatacaatagaaatttatttcttactcttctagaggctgagaagtccaaaatcaaggcaaattcggtgtctggtgaggtcctgtttcctgcctggttcatagagagtgccttctgtctgcatcctcacatggtggaaggcacagggcagctcttcgggaccttttttttgaaaggacaatcccattaaagagggcagagccctcataacctaatcacctccaaaagttcccaccttctaacaccttggtagtttggattcaacatatgaatttgtaagggaaacaaacattcagaccatagcagcactcaaactccaaactctcctttgtggtagatggcagctgaagtctcaggtcagttattttagtcttaactgggctgcttattggctgccttgtacatagtttaagaattaagcagacccaggcgtggtggctcatgcctgtaatcccagcattttgggaggccagggcgggtagatcacttgaggtcaggagttccagaccaaccttgccaacatgttgaaaccccgtctctactaaaaatacaaaaattagccaggcatggtggtgcatgtctgtaatcccagatactcaggaggctgaggcatgagaatcgcttgaacctgggaggcagaggttgcagtgagctgagactgcgccaccgcattccagcctgggtgacagggcaagattctgtctccaaaaaaaaaaaaaaaaaaattaagcagagatttgggggcagagtttatatgcaaaatttgaggctccttttttgttgtctctctgttttccaggattctttctctatttccagtagctgtggttttccagtagctttttgattcttcaaaccagtaagattatagtttattctgagttttagacactcttcacagtgccaactggggttatgccctccattatgagattttcaaaaaataaaacattttgtctttctgcactaagctaaaattcagaatattctccttgactgatcctcaaagaaggagctaaaagagatctagggacattttcattggaaagatacgggagaaagaggaaaggaaggaggaagtgagagggagagaaagagattgtcacttaatctcctgaccgcagcagaaaagacctttattacaaagagggcctttgatcaacctaagacagaaaatattcattcatcattacaaaggaagtgacattactctagtgcagatttgatgtgcttatctttcagaatttttatttccactttataagatatgtgttaagaaggtcccagaagggagcttccgttttctaccctattttatttgttttctgtattgggcttttatacatcacattttatttttcaaaaggcttctgttaatctctgtgaattgtgtgcaaaaaaacaaaacaaaacaaaacaaaacaaaaaacgatgggccgagcgcggtggctcacacctgtaatcctagcactttgggaggccaaggcaggtggatcacgaggtcagaagttcaagaccagcctggccaagatggtgaaaccctgtctctactaaaaatacaaaattagccgggcatggtggcaggcgcctgtaatcccagctacttgggaggctaaggaagagaattgcttgaactcaggaggtggtggaggttgcagtgagctgagatcacaccactgcactccagcctggacgacagagtaagactccgtctcaaaaaataaaaataaaaaagaatagaaatttattttaaaaattaaaaaataaaagagttattaaaggctttaagggtctgaaaatgattgatctagtcaaccctcttttttctaacagtaaggacattgagatttggtaaaatgaaaagatactcctattgttttattgtctagtttgtcagcactgtaacccaagttttctgattgctaacccaataatatttcagcgatatcaagcttgtacgataaggtttttttagtaaatatttaatctctacattatttttcccaaatagtctagtcagatataatgtgagagccctggtaatattggaaagggtcgttttgaagtgattagattttatatacagctttgttgatagagtaaagattacattgtgggaattaatgagatattgcgattaattggaagtgaagactggttgccagatgtcagagaaactaacagagtgaactgaggattgccataggtgtgttattttagctaaatgactaaggaataaaattcagcagaatgtgtttattgccattgacctgggtcttcccaaaatatccagttagcaaccaacaacttccgtttcttgatcactggttcttaatcatggtaaagaggaaagaacacaaatcctgtgtttgtatttttcaggttttcctgccagtagaagacacaattatgggaaaatgtttttcctttgtttttctcttctgggtatacattcttcatttgttaccctgttatacaggactggacaggaattcaaaataattgttttacatttttccaaaacttgattgcatcttactatattttgcatttctattttctttcatagcatctttattatatattaaaactcctatcttttagctaaatgcatatttctttctttttttttgttttttttgagatggagtcttgctctgtcacccaggttggagtgcagctgcacgatctcctacaacctctgcctcccgggtttcaaatgattctcctgcctcagcctcccaagtagctaggattacaggcgcatgtggagacgggtttcaccatgttggccaggctggtctcaaactcctgatctcagatgatccacccacctcggcctcccaaggtgctgggattacaggtgtgagccaccactcctggcctaaatgcatatttctaaactaaatcttgctaattaacaaggcctgaaaacttgacctcaagaagaaagaaaaattgagagattataggaaagcagtcaggttaagtttaatggatgagattgttgaaagatgtaatgagataatatatacaaaagtgcctgctgtacagtgtggtattcagtgagtatttattgaattacagcctgaccattggtatcttatttttcttatctacatgcaaggataatgatgtccacctcattaagttgtgaggatttaaatgaggacatacatataaaggtcttagaacaatgccttgcagagtgtaagtactcagtaactgttaaccattattattgttgttattcttttttttagcttcatactatgaccttcactttaaaatagcacccacaggaatatttttctttattttaaaagtattccatttagcagtatttcaaaaagttggggaaggcaagatatgagaaaaagtatacaactattattaatacaactgttatcttactatatattcttaaatactttatattcccttttatagaccttattttttagaacagttttaggttcacagcaaaattgagtggaaggtacagagatttcatatatatgccttgcccccacatatgcatagcacacccctctatcaactttctccaccagagtggtacatttgttacaattgattaatctacactgacatataattattacccccaaatccatagtttatgttagggtccattctttgcattgtacattctatgggttttttgcatagcaactatattttatatgtgtatgtttatatatatatatatagagagagagagagagagagagagagagaaaccatttgctcatttaacagcataattgtgattttttaaaaaaataggcctgttacacgattttttattcctttttttttttttttttgcttctttatgtgatttttttattcctaagataacagtctgttacagagaggtggcttaataaaggaaaactgcactttgagttatatcagttcactttctgacttgtaacctctccctacatcaactttctcatctcaacagcagggataactaaggactactatctagtccttagaactgtttgcaaactttaaagtgtgtagaaatgtaggatgttactactgtagagatattagtgacgtctggtccttttacctgtggctcttgcatcttgagaccatcacttagttcctacatgggttttaggggaaaagatttcactgatggaaaagcaggggaaatctgtctgagaaaaatggaagacctaggtttcacctgtgagactataggaatttaaacagattagtttagaatttcacgaaaggataaaattgcatgcagtaaatgcagaatgtttgtgttaaaatacaaatacctgtgtaatgtaacaccgatacatttaatttagtgttcccaaaacgggtctgtggcaagagccacaaggaaaggaaagtatagagtaaaggaaagtatagagttgcctggatttccatgtactttggctgtggctactgaagtgtctcatttttaacacttttttgttgctgctattgctatttgagatattcccgtctagagcagtggcttaccctcagtagtcatttaaatattttgagttagtaaatgaaattcaacagactaccagttcagtttcttgtttcttcaaaatattattttttattttttcaatcatcttctttaaatcacggtaaacctataaagggcatccaacatttttacattggtttttaatctctaaaatgataaggactcatctatttgacccttcagaataactgagcaagaatcccttgtgtattttgtctaggctatattactgtatttgttaactagacaaatatgtttatcagcagctaattctgtatgtcttactgtttcaaattttatctttaaagcaatttcccttaatgcctagcttagtgctaaatacattgtaggtgctcaggaaatattaattaaataaagaaattgcaaactagtgacatcatttggtctttttactgctttgtgtaatgggttttttagaggtgagctttaaggagctatttttattataaaagtaatgcaggccaggtacggtggctcatgcctgtaattccagcactttgggaggctgagacaggcggatcacgaagtcaagagatcgagaccatcctggccaacatggtgataccccgtctctactaaaaatacaaaaaattagctgggcatgatgatgtgcccctgtattccctgctactcgggaggttgaggcaggaggatcgcttgaacctgggaggcggaggttgcagtgagccaagatcgcaccactgcactccagcctggcgacagagcgagactctgtctcaaaaaaaaaaaaagtattgcaaagtaggccgggcatagtggctcacccctataatgccagcacctgggaggctgaggtgagcagatcactggagcccaagagtttgagaccagcgtggccaacatggcaaaaccccaactctattaaaaatgcaaaaattagctgggcatggtggcatgcctgttagtcccagctcctcgggaggctgaggtgggaagaatgcttgagcccgggaagtggaggttgcagtgagctgtgatcacaccactgcactccagcctcagtgacagagcaagaccacgtctcagaaaaagaaatacaaagtctgatcattctccatctttactaaggagaggtatcctaatgtactaacgattgatttttttcttcactcatttcagatgtcttcttaaagaatgagctatagtattgttgaatgtatgtactgaaatattttatggtaaatataatttagatgagtccttaaagttatgtcctccatatttaaacattctgttgtattctaacagtgttacctcaatacacattctttttttttttttgttttgttttgtttttgttttgagacggagtctcgccgtcgcccaggctggagtgcagtggcgcgatctcggctcactgcaggctccgccccctggggttcgtgccattctcctgcctcagcctcctgagtagctgggactacaggcgcccgccacctctcccggctaatttttttttttttgtgtgtgtgtatttttagtacagacggggtttcaccgtgttagccaggatgatctcgatctcctgacctcgtgatccgcccgcctcggcctcccaaagtgctgggattacaggcgtgagccaccgcgcccggccgtcctcaatacacattcttatccatagtagtcatcattcttcatgatgaaggattgagggtgtgtatgcttgtagagaagcctggttatggatattctcacagtatcttatatctagtaggtactcagtaactactggatgaatagtttaatgcatgcaaacctgcctaccacagaatggagtttgttctgaagagcagaactttaacacagaaactactgtgtaagagaatccattagattaagggtcgaaacacaacaggtttaaattctaactgtgctcttaatttagctttgtaattctggataagccatccatcatacctttctgagttttagtttcttcaaatataaaatgaaggaactgggcaagaataatcaggatctctaaggtttttttcctcttataaaatgctacattggctgggcgcagtggctcatgcctgtaatcccagcactttgggaggctgaggcaggcggatcacctgaggtcaggagttcaagaccagcctggccaacatggtgaaaccccttctctactaaaaaaaatacaaaaattagctgggtgtgatagcaggcacctgtaatctcagctacttaggaggctgaggcaggcagaatcgcttgacccaggaggcagaggttactgtgagccgacatcgtgccactgtactctagcttggatgacagagtgagactccatctcaaaaaaaaaaaaaaagaattatgagaacaaagtatgtttttaaaaactgaataaaagtataaaagtgagtttcttaaaaaattgcattagatgtaggtgaaacaatggaaaaagatgacagggtcctgaaaatttaggagaattctgaactcagagtgctttgcaggtttctgagtactttcaacactgtaaagaaattgaaactggttttttttttttttttttttttttagacagaatctcactctgttgcccaggctggaatgcagtggtgcagtcttggctcacgcagcctctgcctcctaggttcaagggactctcatgcctcaccctcccgagtagctaggactacaggtgtatgccacaatgcccagctaatttttgtatttttctactaaaaagtagagatggggttttaccatgttgtccaagctcgtcttgaactcctagcctcaagtgatctacccacctcagcctcccaaagtgctgggattacaggcgtgagccaccacacccggccgaaactgaaaattatagacagtgcagtaatgacaaatccagccagcagacccgtactcaaagaaaatgcccataagaaatagctaatgaatattcttcatatgcttcttgttaaaaaaattatctccttttatgattctctactcgaaaaaaatcaaccactttcattagtagaccaaggtctcatcaggtaaggaaggcttttactgttctatgattttcattacattgtaggcctttttaaaaaataacatagtgattgccaggtgcggtgactccctcctgtaatcccagcactttgggaggccgaggtgggcagatcatgaggtcaggagatcgagaccatcctggctaacatgatgaaaccctgtctctactaaatatacagaaaattagccgggtgtggtggcgggcacctgtagtcccagctactcgggaggctgaggcaggagaatgacgtgaacctgggaggcagagcttgcagtgagccaagattgctccactgcactccagcctgggtgacagagcgagactccatctcaaaaaaaaaaaaaagtgataatcatcctattgcaggtcataatggttcctttaatctatatgagtatgagttccctttgcctgagagctacataaaacacatcttctgtatatttgatattaaaacccaatccttactgtgctttcttcacagaacattcagaagattctcggccttgccccttcacgagccgccaccaagcaggcaggtggatttcttggcccaccacctccttctgggaagttctcttgaactcaagaactctttattttctatcattctttctagacacacacacatcagactggcaactgttttgtagcaagagccataggtagccttactacttgggcctctttctagttttgaattatttctaagccttttgggtatgattagagtgaaaatggcagccagcaaacttgatagtgcttttggtcctagatgatttttatcaaataagtggattgattagttaagttcaggtaatgtttatgtaatgaaaaacaaatagcatccttcttgtttcatttacataagtattttctgtgggaccgactctcaaggcactgtgtatgccctgcaagttggctgtctatgagcatttagagatttagaagaaaaatttagtttgtttaacccttgtaactgtttgttttgttgttgtttttttttcaagccaaatacatgacataagatcaataaagaggccaaatttttagctgttttatgtacaaggagagatctgtttcattttgttttgccgtatttctagatataagttttagcatgggccaggaaggactaaaataaaagtttttaaggtactgtactttttgccatacttgactcatatactcaaaatacagagttgtcttggtgtaggaattggaaagcaagagtggaaaggaacgtaataactcgttggagtttaaaaatgagggtcttggcaagtaacactgatgtctgaaaaaaaattaaatataaataaataaataaaaatgagggtcctcagctgttctcttcatatcctattacagtctctcagattcttgtgggggcactcttagatctcccttggagacaaggttatagttatatgttgttaatctcgcagagcttccttttagtcacaatagccttcattttctgccatgccccttcataagggagaaggatgtttgtaccatgatcctccccgcataatctatggaattaggagtcctgtgtggagtcttatcaataaatatgcacattcatcaaatgtctacttaaatgtgagtattctaccagtgagaaaaaacacataattttcaaggtaatcattgttaaaccaacagcaaacttctttcttatcagcaccataaagtccagaagacagtagaaaagtatcttcaaagtgctgaggaaaataagtatcaacttagaattttatgtacaatattggaggcaaaataaagacatgtttagacatacaaaactaagagagttgaattattaaaggttatattccaaggacaaaaaagaggatctgcccaaggtgaaggtatggcatacaagaaacaatggtcaacagagaaataaaatatatggatgaatatatggataaatttgagtgttttatggattatctaatttaaggattatcccaagacaaccctacaaggtaattactgttcttaccttcatttaacagatgaggaaactggggcaggggaggttagtaacttgctctgcatcacagagctattgagtggcagtcaggatttgaattcaaccagtgtaaagcctaatagtccaggctgtcaagctctatattacagcctcctcatgggtatgtggtgattctcttctcatcccatctcctcaactagagtgtgtgagctctctaaagttggactttgtctttttttttgttctccttattacaaagtagtcaacgtgggtggaaacacagcaggagctcaataaaagcagatgaaagggaacagaagtccctattctgagactagttttatcagaaggatgtctgataatggatggtaatgacttttaatggtcttttctccatatcattgaccactctaagcaaaataataattcgaatgataatgaagaaaatgatgcccatgataacaataatgacaaatatgaaatggctaaaataaaacatgaaaccatcctcaaaattctgccatcacctttttaaagtgagaatatatagcacactctatcactcataccctgaggctttgaagttggtgctttctaatcagacttcttatggaccaggttttcatatacaaattatgtttccatggtaaggaataaataagagggagaagttaaaaaggagagattacatctattcaccctattcattaaaatttttttaaatttttttccaaatatgttctgcttatgtatattcactctattcttaaaagcacaataacaaagatatattacagaggaaataaaactatcacaagaattaaattcaaggagttattaagggctactgcagcctcacaattagttttttaaaatttcttgtcctgaagaaatttcaagactagttatttggatgacactctaggtccacagcatcaccggatcattggagatgacatttcaagacaggcctctgaacatctctcataacacataatttggttattttccctatgtaagatggattgtctcctgtctagggaagaaaaacagccattactaatatctgcattagtctactcaggttgcaatcataatatgctaaagtagtaaacttttaaaaatgacagtaaacctgagtttattaacaggttacattctaaaagctaagctagtttggaaattggaaagcaaatgtgtgtagatattcatatgtccttgaccagactgggcctttctcttcccaggtaagtcattctctccaatggggccagttacttaaaattacatcagacaattgatagagcttctagatcccccttctaaaacaaaagcattttgccacaaactaggatggagtaggtttttttcagactatttatacttattttatgtatttcaatactgccctttaagtaaaagtactatatactttctctttttttagattaattctgcttaagtcagtcttttaatttattctagtttgagtttttaaaaaattttagaatgaaaaatctcaaaaatatactattatgtatatacactattttatatatatatatatatatatatagagagagagagagagagagagagagagagagagagagaaagagagaataaagaacacctaggtaacccatcctccaccttcgacaattatcagctcctagctaatttgtgtcatctgtaaccccacctgcttctgccctttctgtattattttgaagcaaatcttatcatttatctgtaaatatttcaggactttaaaaaatatgtgtaatctgaataccatttttacacctaagaaaatggacaattccttaatataatgtgttgtctatagatgtcaaaaatttttgcagttttttggaatcaggaaccaagtaaggtactgaatattgcagttagctgatacacatcctaaatttcttcaattgttgtggtcctcaaactagagtgtatcagaatcactagagccttgttagaacacaaactgctgggccccaccccagagctggtgatctgtaagtctgctgtggagtctgggaatttgcatctctaacaaattcccaggtgatgctgaagctgcaggtttggggttcactcacctattggttcatcagcatctctctgccctcttacaatatatttgttgaagaagttgtgttgtttaccttgtagagtttttcttagtttggattttggtgatagcatgctggttttttcatactattggttgtctctgtaatgcgagcagcttttgatctattaattaatgagatattaaaagtgatggtattctaattgtagtattccttcatttatgatctaaaatacctctaaataggaacttcctctcatctactttttgggggaagttaagaataaatgcctaactccttggtcttcaaaataatgagctgtttattaacatcctccaatagtgaataattaatgtgtatgtcattagcaattcatgcatttaaacatatttgatgtacttcagtccactgaagctatttctcttatgaatgctcaaattgtcccatttttggccagcgagagcctctttcatttggctcctgagtctatttgcatgaccctcgttgtcattggtagcatccttgctaagtgatataacaagatgttctaaggctcatcttgtgtatttcctgcatgacttgaaaacaacaatttctccaaagaggcttgtttcatctttactggaaaatggcatttggagattgtgatcagagcactaggaatggtgagactgggtttttaggtttctaggcctttctgtggactaacattggtattatttgttgttgttttaatacaaaatacaacatgaagttatactgatactcagggctacagaatttttacttaatttctttggtctgtgtctcgtttatcaaaccatactaagaattccaatttgcagcagccggctgatataattagaatattacataattattcattagtacaagctaagaatatacactcagaagtctcagatattaacataaacattaccaacaatatagttaatgaaaatagttcaagttttgttttttgtggagtaaaggacagggaggattgtgtaaggtatatcacactatgagttcacagtccaaatactgagatttcaagttatctggaattatttctttaaggttattgccaacagaatacaatttacatttgtttgattttgtttccaactttagagatttctctttaattttactttatatagtgttttgaggggtttgcacaaaaaagcatatttaagctacatagagatgggtacccattatcacacttctcttatgggtttaagcccactcataagccccataatgtgtgaaaagatgggcaggtaaaattcttaccagaaacaatttaatttttacctaatagtggggctggcagggacactctctgcagtgacattgcccccttaacacttcacacttgttgactaaagggaggagacctattgtgaagagaataccatgtggggatgtcaccaacactgactcagatccttatcactgtccccttaatttttctgcaatagcctaccaggtagtttcctttattctagtttccctgactccagttcaccctccatcttgctgtgggatgatttttttttttttttttttttttttgagatggagtcttaccctgtcgcccaggctggagtgcagtgtggcattatctcgactcactgcaacctccgcctcccaggttcaagtgattctcctgcctcagcctnnnnnnnnnnnnnnnnnnnnnnnnnnnnnnnnnnnnnnnnnnnnnnnnnnnnnnnnnnnnnnnnnnnnnnnnnnnnnnnnnnnnnnnnnnnnnnnnnnnnnnnnnnnnnnnnnnnnnnnnnnnnnnnncgccgcgcgaggcggcgtgcaccggagaacactgccacgcgggaggctgtggcaggagcatcacatgttccacggaggcggaggttgcagagagccctattcacgccaccgtcccccagcctgggcaacaagagcgaaactccatctcagaaataaaaaagaaataataatacatctgattgtgttgctcctcaaaggaaagttgttcaatggctcccagtagcttttaagtaaatttaaactagttagcacacaaaaccatcccaacctggatctccagccttttcttatctctatatcccaccatatcttttttttttttttttttttgagagacagagtcttgctctgtcgctcaggctggagtacagtggcgcgatttcggctcactgcaacctccgcctccttggttcaagtgattctcctgcctcagcctcccgagtagctgagactacaggtgcccaccaccacgcgcagctaatttttgtatttttagtagagacggggtttcatcatgatggccaggatggtctcgatctcctgacctcatgatctgcctgcctcagcctcccaaagttctgggattacaggtgtaagccaccacgcccacctaccccactatatcttgtcctctagctaagcagatttcttaaacaaattctgcatttttcatgttcttttttatttttattaagctagagatgaggtctcactatgttgcccaggttggtcttgaactcctgggctgaagtgatcctcccacctcagcctcccaaagtgctaggattacaggcatgagctacagtgctcagcctttcatgttctttttggactttactacctttgttttctcggcctagaatgttctttgtcttatttgcctgatttttcttctcttacttttcctacttagcatcaccttttacatggttgagttagatttctctttcctgtatttctgttagagcctttcttatatgagtcattcatttaaaaatggacaattaactttctaagcttcaatagcctcgtctggaaaatggagttaataactcagtcaaagctcccttatctgatttccacttacctgagtcttcagatggatcctcccagttccctgtgaaaagcttgatgaccagcatccacatcacgctgaatgctctcaaccatgcttgtgcacaactcttgccagtcaattgtgtaacataatttatcttacttgttattgtaattaaatgcatggactaaatatgttaaattatgaaatatgaatacaaaagaaggattacttctgtgaaaattaaactgaatgacttggaataacaataaaaaaagttgctaaaaataattgctgttggtgaaataacaaagactaaaaaagtaacaaaaaatttagaaagattcagcattatttcttagtgttttaattcatgctccactttaaagaaaccaaaactggaaatcagaggtgatgggtttggtttatgcagaaaaaaaaacggtattgcaatcagtagactcatactcaaggaaaaggccttggccctacataaaaagtgaacaagtatatatttgtatgttttaagttaaacatgtctaaagtatgtatatatgtattttttcataactgtaattaaatttttagattaacctataaattactggttctagtcatatcagataaataggtttttacctcatagtgttcttgatggattctgtaaagcaattgatactatgcctggcatattaaaggcatttgtttttcaaacacaggaatcctatgagggagatagggtatctttttattatttccattttacaggtgacaaatcatgatttatccaagatcctacacgagtaagtaacagaaccaggaagaacccagatccttagttttcagggtccacgctctttctactgcagcacccagtagggctgtctccattggggctacaatataaaactgcttaacttgaatcccatctggacctgttaccctacatgcaaaagatcttcaaaatgtctttacataagacaagttggggtcttcagagtatcatttagatgattatcactgtctctattccatttttttacaaagctttcccacattactctcattgtctaaatagtatattttaacaagactttttgaatattagaagaaatttaaaaattattccaccatcaccagatgagtgaggaagaggataaacctaagtctacttaagcctactaagagatgatatttcaagtttcaaatggccttctgcagttggaggctaagcacattttaaaacccagaaacttatatttggctccagaattcatctggctgctcaggaatccttcaatataattttttttctttcctttttttttttttttttttgagacggagtcttgctctgtcacccaggctggagtgcagtggcgcgatctcggctcactgcaagctccgcctcctaggttcatgccattctcctgcctcagcctcctgagtagctgggactacaggcgcctgccacaaaacccggctaattttttgtatttttagtagagacagggtttcaccgtgttagccaggatggtcttgatctcctgacctcgtgatccgcctgctttggcctcccaatgtgctgagattacaggcgttagccaccgcgcccagccaatataatttttgttaatacaaaagtgattttggggtttatagctatttcagccatttgctgaacagtcaattggatcttaaacagaggtcatacatatcaagaaagtagaaaaagtctgaaagcttgatctggtgacagatttttccattctagagaacattttacatttttaatcaaactggggcaatactttagtgcagtggtcttcaaacttttttgaccacaaccccacagtaagaaacacatttttattattgcatcccagttatagaagtcccatgaaacaatacctcttttatgcactttggtattttatttcattcttcgaaaaatgtggtcataatccattaattttaccactgactaatgggttgcatcaggcagcaagccattggaaaaaaataaataaagttctctctggaacttgaagaataaggaaatttgagtgaagtcaagtttggaacactaaagaccactttaaattagatgtggtggacttatctaagattttgactatattatagcaatgaataactcggtgaaaataatcaagaacaaccaattttccagaaagacattagccaagagtgtgacttcttttctcagatatactttctggaggatcagaaagggcaagaacctgacatttgtatcatgctataattgcatacattcgttcacccatttaccaagcacatttaaagcacgacctctgtgcaagaccctgtgctacgggcattgtggacacaaaggtgagttgagtagaaatctgctcagaaatcttacaactggtagctactgtaagcgtcagtttccttgtctaaaaaaagaggacaataattcctgcaatggcctgcatactcataaaattgttacaaaaatgaaatgagaataatatatgtaaagttcctttgtaaattataagggaacattactaaaagcagttgaatagtgaagtgttcaaaaaatttagattcatattgtttctatatacactaagaaatcatttgacaatttgtttttctcttttcccctgtaatcattaatttataatgactctagattggagttagattatttttcttaagattattttcatttgtctgaaagctttaactttatcaagtaaaatcttgctgattaagcactagacttgtggatgaacacatttcattttcctctagtcttggctgtgcttcatgttcactggataatttaaggtgatcccactggataatttaaggtgatcctggcactccagcctgggtgacagagcaaaactctgtctcaaaaagaaaaaaaaaaactgtggggtgggggggaatgacttttggataatataaaaatactaaagaatatgcacaatgatttagagaggccattcgagatagaagtgggctgcccaaaagggtgattaagcccttagttcctttggcttgttggcttctcttagtccatgttttgctttttgctgccacctggttcagggatagttctttctatcactaccaagtactcagcctgaagttgtggggcacgaaaaaaagcaagttggtgataacgatttcaaaaaggcaatttaaatatgtttacctcattcttgaagttccttctttgttgttgaatgggtttgctttttctagttttccttcatcttttctgcaactcaactcactgcttatatgtgcatgccacctagtgacaaaaattggccctgcctgctttttagggagatgaagtgttttgtatccactgtttaggggaagggagacaggtagagtagattacacactgaggaaactttagaatgggttccctgggctaagtgcggtagctcacacctgtaatcctagaactttgggaggccgaggtgggcagattgcttgagcccaggagtttgagaccagcctgggcaatatggtgaaaccccgtctctataaaaaaaatacaacaattagccgggtatggtggtaggtgcctatagttccacctactcaggaggctgaggtgggaggatcacctgagcccagggaggtcgaggctgcagtgagccaagaccatgccactacactccagcctggtagacagaatgagaacctgtctcaaaaataaataaataagaatgggtcctctaatggggccaacgggaggctccctgtggttgaacatgaagacatagacctggtaaatgcacagcaagtattattacatttttttattcctggactctcctgccactcctcaagcttctcaatatacttccatgtaaaaacaaaacaacaaaaaaacaataaaaggctttgtttccccctcgacaaggtgagaaatcttaaaaataggagagaaagagagcaggtagatctgggagggtctctctggcatgccttttgacccccttgtccctcttctcctgggaccattgtctttcttatcgcatgtctccagtctgccgaggccttcctccatcctggctcacctttgctctgtatttaattttcaatgtgtcctctgcagcccctgttctttgctgagactttgctagattctcaattttatcatagaatactaccacttgaactaaaaacctaactttcttatgagggaaatgtcaatgtaattacacaaatatatctgataatccatgataattcacaacccttttgagcagacgctgctgtttctcttctcttgtctgaggaccaagaggcagggtcgatgtgctcctagctacccactgcctcatcctctttttcaaaaagcctttttttggctgggtgcggtggctcatgcctataatctcagcactttgagaagccaaggcgggtagatcacctgaggtcaggagtttgagactagcctggccaacatggcgaaaccctatctctactaaaaatataaaaatcagctgggtgtggtggcgtgcgcctgtaatcccagctacttgggaggctgagacaggagaatcgcttgaacccaggaggcggaggttgcagtgagctgagattgcaccactgcactccagcctgagcaacagagtgagactctgtcacaaaaaaaagaaaaaagaaaaaaaagggccttttttcttttcaggctcacatgttcaatccacaaagttctgtctttcttattaaaaataacaattgtaaaaaagcaatatacacatttggtacaaatacaaatatctgtgaaggtataaaatgaaaagcaaaaatctgtgcctctcttccctatgccgtcctcatgcaccttcccttacttcagattccaaaaggtaaccattgtcaatatttggttatctgtgatggtcaactttgtgtcaacttggctaggctatg

SEQ ID NO: 641 - DNA, 2126 bp, Homo sapiens
ccagcccttcagctccagtgagttgcgggttggtttcctctagactctcgtggccacaccgttctccgatacgagcctttccggtgctatgccccggaagcggaagtgcgatcttcgggctgtcagagttggtctgttactcggtggtggcggagtctacggaagccgttttcgcttcacttttcctggctgtagagcgctttccccctggcgggtgagagtgcagagacgaaggtgcgagatgagcactatgttcgcggacactctcctcatcgtttttatctctgtgtgcacggctctgctcgcagagggcataacctgggtcctggtttacaggacagacaagtacaagagactgaaggcagaagtggaaaaacagagtaaaaaattggaaaagaagaaggaaacaataacagagtcagctggtcgacaacagaaaaagaaaatagaggttcgaatgaaatccatgtttgctattggcttttgttttactgccctaatgggaatgttcaattccatatttgatggtagagtggtggcaaagcttccttttacccctctttcttacatccaaggactgtctcatcgaaatctgctgggagatgacaccacagactgttcccttcatttttcctgtatattctctgtactatgtcgattcgacagaacattcagaagattctcggccttgccccttcacgagccgccaccaagcaggcaggtggatttcttggcccaccacctccttctgggaagttctcttgaactcaagaactctttattttctatcattctttctagacacacacacatcagactggcaactgttttgtagcaagagccataggtagccttactacttgggcctctttctagttttgaattatttctaagccttttgggtatgattagagtgaaaatggcagccagcaaacttgatagtgcttttggtcctagatgatttttatcaaataagtggattgattagttaagttcaggtaatgtttatgtaatgaaaaacaaatagcatccttcttgtttcatttacataagtattttctgtgggaccgactctcaaggcactgtgtatgccctgcaagttggctgtctatgagcatttagagatttagaagaaaaatttagtttgtttaacccttgtaactgtttgttttgttgttgtttttttttcaagccaaatacatgacataagatcaataaagaggccaaatttttagctgttttatgtacaaggagagatctgtttcattttgttttgccgtatttctagatataagttttagcatgggccaggaaggactaaaataaaagtttttaaggtactgtactttttgccatacttgactcatatactcaaaatacagagttgtcttggtgtaggaattggaaagcaagagtggaaaggaacgtaataactcgttggagtttaaaaatgagggtcttggcaagtaacactgatgtctgaaaaaaaattaaatataaataaataaataaaaatgagggtcctcagctgttctcttcatatcctattacagtctctcagattcttgtgggggcactcttagatctcccttggagacaaggttatagttatatgttgttaatctcgcagagcttccttttagtcacaatagccttcattttctgccatgccccttcataagggagaaggatgtttgtaccatgatcctccccgcataatctatggaattaggagtcctgtgtggagtcttatcaataaatatgcacattcatcaaatgtctacttaaatgtgagtattctaccagtgagaaaaaacacataattttcaaggtaatcattgttaaaccaacagcaaacttctttcttatcagcaccataaagtccagaagacagtagaaaagtatcttcaaagtgctgaggaaaataagtatcaacttagaattttatgtacaatattggaggcaaaataaagacatgtttagacatacaaaactaagagagttgaattattaaaggttatattccaaggacaaaaaagaggatctgcccaaggtgaaggtatggcatacaagaaacaatggtcaacagagaaataaaatatatggatgaatatatggataaattt

SEQ ID NO: 642 - protein, 248 aa, Homo sapiens
MPRKRKCDLRAVRVGLLLGGGGVYGSRFRFTFPGCRALSPWRVRVQRRRCEMSTMFADTLLIVFISVCTALLAEGITWVLVYRTDKYKRLKAEVEKQSKKLEKKKETITESAGRQQKKKIEVRMKSMFAIGFCFTALMGMFNSIFDGRVVAKLPFTPLSYIQGLSHRNLLGDDTTDCSLHFSCIFSVLCRFDRTFRRFSALPLHEPPPSRQVDFLAHHLLLGSSLELKNSLFSIILSRHTHIRLATVL

SEQ ID NO: 643 - DNA, 2182 bp, Homo sapiens
tgttactcggtggtggcggagtctacggaagccgttttcgcttcacttttcctggctgtagagcgctttccccctggcgggtgagagtgcagagacgaaggtgcgagatgagcactatgttcgcggacactctcctcatcgtttttatctctgtgtgcacggctctgctcgcagagggtgagagcgggtatttctcagacgtttgatcagtccccgggaggaagggccccggggtcccctgtgccaccaggggaaagatcgcgagccttacttgcttgagaggctcatctactccacttcagggaatctctgggcaactcgtgaacaggagcaggaggggagtatggagtcgattgccgagttttctttggtctcaggcataacctgggtcctggtttacaggacagacaagtacaagagactgaaggcagaagtggaaaaacagagtaaaaaattggaaaagaagaaggaaacaataacagagtcagctggtcgacaacagaaaaagttcgaatgaaatccatgtttgctattggcttttgttttactgccctaatgggaatgttcaattccatatttgatggtagagtggtggcaaagcttccttttacccctctttcttacatccaaggactgtctcatcgaaatctgctgggagatgacaccacagactgttcccttcatttttcctgtatattctctgtactatgtcgattcgacagaacattcagaagattctcggccttgccccttcacgagccgccaccaagcaggcaggtggatttcttggcccaccacctccttctgggaagttctcttgaactcaagaactctttattttctatcattctttctagacacacacacatcagactggcaactgttttgtagcaagagccataggtagccttactacttgggcctctttctagttttgaattatttctaagccttttgggtatgattagagtgaaaatggcagccagcaaacttgatagtgcttttggtcctagatgatttttatcaaataagtggattgattagttaagttcaggtaatgtttatgtaatgaaaaacaaatagcatccttcttgtttcatttacataagtattttctgtgggaccgactctcaaggcactgtgtatgccctgcaagttggctgtctatgagcatttagagatttagaagaaaaatttagtttgtttaacccttgtaactgtttgttttgttgttgtttttttttcaagccaaatacatgacataagatcaataaagaggccaaatttttagctgttttatgtacaaggagagatctgtttcattttgttttgccgtatttctagatataagttttagcatgggccaggaaggactaaaataaaagtttttaaggtactgtactttttgccatacttgactcatatactcaaaatacagagttgtcttggtgtaggaattggaaagcaagagtggaaaggaacgtaataactcgttggagtttaaaaatgagggtcttggcaagtaacactgatgtctgaaaaaaaattaaatataaataaataaataaaaatgagggtcctcagctgttctcttcatatcctattacagtctctcagattcttgtgggggcactcttagatctcccttggagacaaggttatagttatatgttgttaatctcgcagagcttccttttagtcacaatagccttcattttctgccatgccccttcataagggagaaggatgtttgtaccatgatcctccccgcataatctatggaattaggagtcctgtgtggagtcttatcaataaatatgcacattcatcaaatgtctacttaaatgtgagtattctaccagtgagaaaaaacacataattttcaaggtaatcattgttaaaccaacagcaaacttctttcttatcagcaccataaagtccagaagacagtagaaaagtatcttcaaagtgctgaggaaaataagtatcaacttagaattttatgtacaatattggaggcaaaataaagacatgtttagacatacaaaactaagagagttgaattattaaaggttatattccaaggacaaaaaagaggatctgcccaaggtgaaggtatggcatacaagaaacaatggtcaacagagaaataaaatatatggatgaatatatggataaattt

SEQ ID NO: 644 - protein, 125 aa, Homo sapiens
MKSMFAIGFCFTALMGMFNSIFDGRVVAKLPFTPLSYIQGLSHRNLLGDDTTDCSLHFSCIFSVLCRFDRTFRRFSALPLHEPPPSRQVDFLAHHLLLGSSLELKNSLFSIILSRHTHIRLATVL

SEQ ID NO: 645 - DNA, 103471 bp, Mus musculus
  misc_feature (1)...(103471): n = A,T,C or G
taagaggaaattaagttactttgatatgactcaatcttagtaaacccacagagggttttaccgagaacttttcttcttgttctgtctagttacacataatctccatattttatctgagaatttttcttaggatcgctatcacctgtttgtctatatcttttgaagtatattttatttttatttttgaaaattgaaattatatcctctcatctctaactgtgcagtcaaaagtcttatgtacaggttccacatccttaagagtttgaggatcagggctggagagatggctcagcagttaagagccctgactgctcttccagaggtcttgagttcaattcccaacaaccacatggtggctcacaaccatctgtaatgggctccgatgccctcttctggtgtgtctgaagacaactgcagtgtactcatataaataaaataaataaatctaaaaaagtttgaggagcaaacattcttttgtgcagactctaccatggtgtacacatgcacacacacacagacacacacacacacatgagttgtggtgggaaattgttattattagcacttttgagtattgagcagggctttatttaaattccaaaactgaaattattcagagctgtagtgcttcctttttgcttcagaggaaccaaggccatagagcagtgaagagcactggggggtctggctgagtagcagtcttccgtggacaaacacttcaaatggtctccgggctggtaaaatgggcaggctggctctggaggttcccagggccctcattcattggtgatcttcggttcggttccctgcgtgggcaggagtttatggacaggctcgtatgacttagactcttccagagacaaggtagtgggagaatggaatgatgatgagatgcaacggttcagacatatgaggtgggggtgcgatgggctgttccgatacccaaagatccccaagtcccagaaagcatctgcattcttctcaggagttccagatgtcagactcagagtctaaatgactaagtttttctctactggaaaagtacaaagttacttttggggcaggaatgccaggcaccttgtattatgtgaatggtctcctctttcaatcccttgtcccactttctactatcaggacaaataggcatcttgaatttgagcctgtgaagacatagctactaacgactatggagtccaccctcgcttcattcactcaaggcagttttgctgcctacaacccggtgtcacctccaacccatagagagatgccttggggctggcgggaagcagcagcctagtgcttccttcctgcttcctgcttttgctcagaccccgtctgtgctctctccaacatcagcctagaccctgacccagatgccacgtctccttggtagtgcaaacaaatgatgacagtaatggtggcagtgaaggaaggagcctggatgcccgcagggtggaaggatgcattccttctgccattttctccccagtggccattgacttggggttaagagagacagtagtgaaattgaagacacatacacatcttaagcagtactatcctagaaagatttcagtgggatatattttttttgctttaatgttcattcgaagggaggggtttttattataagttaggtatctccacaggagtggttgtgtgggtgggtgggtggaggtgtgggagtgggtgtgcgtgtacatggacacacacgtgttcaatggagatcagtagagctctcgtccctcccattcctcctttcagcaacctgtgaacttctttactctttcttctctgctacacctcttccccaaatcacagagctcatttcactgcattgcatgtattgcaattatgtgtctaattcacatgggtctgccggggtgggggtgggggtgggtgggggggtgtcttagcaggaatgatgtcattttcatgtttgacttataggacctcacgctgtcccgggcatttaacaagggttctgcaaatatttgctaagatcaatgccatcaaaaggaaggttagaggctgtctagatgacactcacgcagcaaggaaaggcatttgccaccaggcttgaccacctgtgttcaattcccagggcccacatggcaggacaaaacaaaaatcctgcagattgccctcagcagtgacactgaagcaccccaccacctccaacatgaatgtaacacatttttaaaaggacgttagttagtttctcttctcactgggtggaggctaggaattagctggattttggcaataactttctatatgccatcttgcttcctgcagatgacgtcggtcgctaaggtctattacagtcagacgactcagacagagagccgccccctagtggccccaggaatacgccggaggagggtcctcacgaaagacggccggagcaatgtgagaatggagcacattgctgacaagcgtttcctctacctcaaggatctatggacgaccttcattgacatgcaatggcgctacaagcttctgctcttctctgcaacctttgcaggcacgtggttcctctttggtgtggtgtggtatctggtagctgtggcccatggggacctgttggagctgggacctcctgccaaccacacgccttgtgtggtgcaggtgcacacgctcaccggagccttcctcttctccctggaatcccagaccaccatcggctatggcttccgctacatcagtgaggaatgcccactggccatcgtgcttcttattgcgcagctggtgctcaccaccattctggaaatcttcatcacaggtaccttccttgcaaagattgcccggcctaagaagagggccgagacgatccgcttcagccagcatgccgttgtggcttcccacaacgggaagccttgccttatgatccgggttgccaatatgcggaagagtctcctcattggatgccaggtgacaggcaaactgcttcaaacgcaccagacaaaggagggtgagaatattcggctcaaccaggtcaacgtgactttccaagtagacacagcctcagacagcccctttctcatcctacccctgactttctaccatgtggtagatgagagcagccccttaaaagatctcccgctccgcagtggggagggggactttgagctggtgctgatcctgagtgggacggtggagtccaccagtgccacctgccaagttcgcacttcctacctaccggaggagatcctctggggttacgagttcacgcctgcgatctcactgtcagccagtggcaaatacatagctgacttcagccttttcgaccaggttgtgaaagtggcatctcccagtggtctccgcgatagcaccgtacgctatggagaccccgagaagctcaagttggaggagtcattaagagagcaagctgaaaaggaaggcagtgcccttagtgtgcgcatcagcaacgtctgatatcctgttctctcctccccagccctctggccttttcctcttccagtgctctgggaaaaggatacaatctgggttcgctggagagacccggaagcacccaccctcaacttccccttagcccggtggcctgtgagcagtcggggcctgctggagcccttccttttcctctcactgtccccttgtaccttcctctaccactacaccaatgtatatgactcttaagccagcttgggggaaagagagggaagatgaggctgacatggcttggaaggccgcagccatgcttggagattcacattcagaggaccatgtgactggatggatagactcccccccaaacgcccaccactagaaaatttgatggcttgagactggagcttcctccttttctcttccatctagctaagttccctgaggcagaactctctcagagagtcactctatgggctctgccctcagaagtactgggatctgaaatcagttttccctgggctatcaaatcctgaagaaagaagccagagtttgtcatggtgttttaatttcagctggtaactcctgacagagcctggactcttggtcaccacctaattttccctctccagttctcaagtggatcttctcagcaaagccggttctctctcagcttctgtttctgtagaactggggttgactcgagaaacacaagcagccacctttcctgcacccatcctggattctgagaaattcaattttggaaatactgtctaatactctggccctgtcctttgggcagctctgtcctggaaagatatgttttagtgtttcctgggaataggaagaccttaaccaatgctctctctctctctctctctctctctctctctctctctctctctttctctctctctctctttcatgggctgtccttgaatttactatgtagactaggctggccttgaactcacagatacctagctgcctccgtctcccatatactgggattaaaggcatgaaccactatgccaagcccccaatgttctcttgaataagtccattgcacatacctcacgaaaatatctaaaaccatccagattacactgtaccagttccattgcttccttttctcccaccccagaccttcccttaactcaaccttttgaagtaagagagggaaacatggtcatttgcctttcttaacatcgatctattaaaactagtcacagggcacagattccccaggaaagctgaacccacttctcagatttccagattgctgtacagagcctcggggaatttgtgatgttttgttatggtttgggctgaggcagaactctggctgacagccactattttgttccatctcctggtgcccttctgagaagtgccagctattttatgaggcaatgctgagaggagaggaacttacattctgatctctgccattctgacacctggcataaaatgatgaaaaccagcgccatctctcctcttttctgcctacgggccagttccaggcaaattacaaagacagcttaagatcacacccaagccattcctagttctctggtgagggttgtggcaggggtcatggaagggcatttgaagcaccaggtcctgtcctagtgagctttggctccacttgggtacccaggaaacctcgcaaggtagtttggcaggaatgacgtaagctgtaaggtggacttgacagatgacaagcgacacatctatacagaatgcatgcccggatctctgggcaaagccttgcagagaaactcagaagatcccaagactgagtggatctcaactgtgcacagtctttttacgttggtcttcccttgaactcaattaactgtagcctgaaaacgaagagcctttggtctctccttactgtaaagctcaccgttagcctccaactctcatcaacaaccagaaccagaagaacctgaatgtctgaaacaaagagcagaaggcaagagccagcttatgtgctttcaaatacattcaacgctgcgcttacctgatgtgtccagtgtgcaaggaccatgtgtactgctgtgtgtgtgtgtgtgtgtgtgtgtgtcttcttatcctgtggcaatttatcctctgtcctgtttcttcttcacattgctgcttccctcctgagggaatgaccctcgtcccagagccttgccaaggcccaactctcttcagaatcttggataacaatgtgagagagcatttcctgccttaaccccttttgaacttcctctacaatcccaggctttgctctaagttgcactttaaaatcatttaaaaatcattaacatctgtcctgttaattcagaattcagaacggcacctttctccaacaagccttatgttctgcagaacaactcccactcacaaccctaagtggttctttagatcccagcccgactctctgacctgaaatcctttctcaggatgcagggcaagctttactaacagccatggctgatgagaaatgggttccctgtctgtaccagctagagacttggaatgtcaggagagtaacaggtgcgctgattctaagtgggatgggagatttcaggtgagcaaaacgaccaatggggaaggatctccagagtgggaaaaaagtgaacgacgaggctaaggggcctagggagatgaagcccagagtcttacttacttatgactgacacacaggaggtggggggaaacttgggagattgagatatgatatatatgtttatctaaggagaaaaacagagataatatatacagagaaatgtacatagatgtacgtatacccaaatatacagactgtacagaaggaagtattcagactttaacaaagggacaaatattttgccttggtttgggggagcaggatagctggatcttctgtgttatggtccgaagaacagtgacagtagctgatggttttaagtttgcttgatggaaaagggagggctagaccctgcccttttcataaataaaggagcatccgtcgaggtttgatgaattgtgctggtaggacaagaggaaaactaggaggaaatgggacacagggatgctccactcatggagaagtaggaaaatctaccactcacacaatccctggccaacaacctgccgctgaacaagttctaaaacaagcaagcaagggagcaagtaagcgatcgagcaagcgagcaaacaaaagcatccttccattttcctctcttcttccaccaagatgggagctgtaggtctaggccccatcattaaaaattgagaagctgaaattttagtacgggggggtgtgtcaaatgcaaacactagaatgcaagccctaggactgatgagctgttgagctcaagatactctcaaggcagaggcccaagcctatatagagaaatcctaaagagggtacttcatctgtcatcgtctcagccccggcgtggaggcaggtgaatgcgatggctacaaggctccttgatggaaatgcagaattctgctttcctcttccccagaggctgatgcagttctatgcaaagcttctgaaatccctaacctgggcttcacttcattctggctgctccctactgttcctcccactctctgaaacccacaccagctagcacgactatgcagggatttccctgaggtcagcagaaaaagaaaagcagtcgtaatgtggctattagccagggacattgcacattctccaaggcttgctaccacaaacctttacccatgctagctaacctagtttctttgcaaaataacacattacctatgctgtgcatagctgggcttgcaggcccagtattggccagtgctactgaaacagaagaatctagggatgatttctctacacgctgcattaaagactaaaccaggtcaaatgtatttagaaaaaaaaaaaaagatgtgtgaggcatttttggtttatttttgtctgttcagaacaaactactaaataaactggatgcatctcttgttctcactgtgtctccttttagaaagggaaacctatcttgttatcaaggtttgaactcataggctgaatttggggagaggagggttcaactaggctctgttggaagaacttcccatccagtggccagcccttcctgctgacttttcctcacactggaacatttcaataatggtttcacccagtccttttcttgctccttcccttgttaaggtaagatcccttaacagatacattgcaaattcaggcaagccaggggaagcgagccagtaaggaacatccctccatagctctgcatcagctcctgcttccttatagaacccagagatagtgccactcacaaggggcctgctccccttgatcactaattgagaaaatgtccccagagctggatctcatggaggcacttccccaactgaagctcctttctctgtgataactccagcctgggtcaagttgacacacacagccagccagtacagtggggaacacttcccaggttccgaccccacggcaggaaatagtatctgttcaaaagctctgccactttctgcagctcgctcatgcgactccagggagagactgattcttttgattagcagtttcctttccttcctgaattggtgtctctcctacttattaggccagccatagagggagaattagctgaggcttttctgccagaatacaacaatcacaacaacaacacctaccaagaagaaccctttacttatattcagacatctctcttatattctttatggagactgagcgtcacttacctataactcacaaaggaagagaaatatcaaaccagggatataaagcataacaatgagagagaatatcagaaagacttaaagaagagattgagaaaaagaaatggaaattagaattccatatcagcgttttatttgaacgtttgtcgcacaatcattgttatcctgggctagacaggcctactttcaattccagttctgctactagttggctatgttttatttattctccataaatcctgattttgctcattgatacagatagggatatctactttacattaaaaagtagttagtatgtctgacaactgggaataagtccttaacaaataacaattatgataatttaggccacgtatactgtgataacacagtatcattcaaataactcttgacaggctcgacttctaagatcaagccagacagtctgtgtcagttaccatgtgcctgcaactgtaatgcaaggaagtacaaagaaatacatactttctactctcaagaaccctacaatttagttataaggttatttgaatggtaatgtgttatcacagtatattatgggcaatgcatagtaaaaaaaccaatagaggtagttattaatctacaccatgtaattacatcaaagcacagacataccagactatgactagaggttaatacggctcactcaaaggataaatgtgaagtgtaggatgagagatgtctaggccgaatggagccacttctatggtaatctagaagacattccctaggggcaggctcagtttgtaagatcaaggcagtctgcgtcagttaccatgcgtctgagactgtaatacattacaagaaagtacaaagaaataaagaaatactttctactctcacgaacaatttacttgaaactgaaaacattgtaaaataaagtatgaagttcttggcccggcgtggtggcgcacgcctttaatcccaccacttgggaggcagaggcaggcgaatttctgagttcgaggccagcctggtctacagagtgagttccaagacagccaggactatacagagaaatcctgtctcgaaaaaccagaaaaaaaaaaaaaaaagagtatgaagttttaaaaagtcaattataagtgcagtaagaaatcaggaaaagaatgaaagagttggagtctttggcaagaaactaatagtggtagggtgaacggagtgggttgacggccgattttgacctagttgaagagttcttgaaaagaacggagttgacagtactccaggggagacaatctagacgtatttcggtaggaggaaccttcttatcagggtaaaaagactattttattttaggcttattctttccatctgtatttcccactctcagtcctccaagccagttgggcgggatgtaagtagcagcaggtagcagctcactgtgttcagcgtcctcctccgtagatctgagctgggaacgcggaagctctggttactaaaaacaaagttcacccaggtcccaggtccacgacttctcagccactccgggatttccggacagcggaagcgtcgccaataagggaccggaaatcccgccttcgccggaggaagctgcggacgctagacagccaatcccgaggaaggcaatcgttccgcggagacagctgagagcccgcgcggggctggaggccggaagtaccgtgggggcgggacttggggtgccggaagtgatcattcctcggttcttcctgtcggtgctgtagcagaggagatgctcccggcggctgagaggcgtcagcccgaggacggttagcgagaggggcgcagtgtggacccggggccgggccgggccgggcgggtggcccgcactcggaccatgagctaccccatgcactggggggaatggatcctgaactttcgggtgccgcccgccggggtgttcggcgtggccttcctggcccgggtcgccctggttttctacggtgtcttccaggaccggactctgctggtgaggtacaccgacatagactaccacgtgttcacggacgccgcgcgcttcgtcacggaagggcgctccccgtacctgcgggcgacctaccgctacaccccgctcctgagctggctcctcacccccaacgtctacctcagcgaactcttcggcaagtttctcttcatcagctgcgatctcctcaccgccttcctcctgtaccgcctgctgctgctcaaggggctggggcgccgccaagcctgtggctactgcgtcttctggcttctcaaccctttgcccatggcggtgtccagccggggcaacgcggactccatcgtcgcctccctggttctctcgaccctgtacttcatagagaaacggctcatcgcgtgcgccgcggtgttctatggcttcgcggtgcacatgaagatgtacccggtgacctacatcctccccatagcgctccatctgcggcccgagcgcgacgatgacgagcgtctccggcaagcccggttctctttccaggctcgtttgtacgacttcctgaggaggctgtgtagctgggcagtgctgcttttcgtagcagttgcagggctcacgtttgttgccctgagcttcggtttttactataagtacggttgggagtttttggagcacacctacttttatcacctaactaggagggatatccgccataatttctctccgtacttctatatgctgtatttgactgccgagagcaagtggagttttactctggggattgcggcgttcctgccacagttcatcttgctgtcagccgcatctttcgcctattacagagaccttgtcttctgctgtttccttcatacgtccatttttgtgacttttaacaaagtctgcacctctcagtactttctttggtatctctgccttctgcctctggtgatgccactggtgaggatgccttggaaaagagccgtagtcctcttactgttctggttcataggacaggccttatggctggctcctgcatatgttctagagtttcaaggaaagaacaccttcctgtttatttggttagccggtttgttcttccttctgatcaactgttccatactgattcagattatttcccattacaaggaggaccgcctaacggagagaatcaaatacgactaatgtgttctggatcttctgcaacattctgattttgccgtatggactaggaggctttggaatttttctcctccctgaacattctaagcactctagtgaaagttcctttgttccaatagaaattaaaaccagtgttggccttatatataaagggggcccaagaactgaggtccatggtccatcctttagaagtcttagggctcatttgcttgatgagaagaaaaccattcctgtttcacagttgagaagccggtgaagctagaagatgctgaaatatttttgaacagtagaggaataaggtctctagcagcgtttgttcctgtcacatggtgctactgttgtaccttcagcccctgccttttttgtttttcctgcagttctgacagcggtggaagttgacaaaattcctaaagtacaacatttttacgtattaagtattaacagttccatgctcggttggggaagtctgaaatttttgtagtaagtgtgggggcttagaagagaactaatccaaagaatctaaattgtgatcatgtatttgttttgtaactgagtttttcagtattagtaccagtggtattcattttatataaaaagattaaatttaaactcatccactgtagacctgagtttaagaaaacgaaatggagcattattaacatgtatatgcttatcctttttctaactgctaggaagacttttcctctagagtttaagctgagagcggtctgttgtaaaagtggtaaaatttagatgctaaagcctaagttttgagtataacttcacttgctctcttctggttttatcatctaaattgttacaaaggagaacattgtttataaggcataaatcctacactctgaaaattccaggatagaaaggaagactgcttgctgtaaagcatgagtgctgcgtgctgtcattggacaatcaagaggtggtaagggatttgaggaattacagaaatgaggctgtgaggagcaggtctttctacttatcacttgaagtaaacacagtgaaactgtatgaataaactttctcaactgtatgaataaacattctaaaatatttttagaaaacatagagcctgtctgtgttgagggttttctaacattcaaagatgcagtagcaatagatgagtataattttttttttaaagaataaaattatcatctttaaatgcaagttcaagagaagataggatttttgtttgtttgtttgttttttttttggtttggtaggggttggtttttcctttgtctggttttttttgtttttttgttttttttttttgacccagggtttctctgtgcagccctggctttcctggaactcactctgtaggcaaggttgactcaaagatctgcctgcctctgtctcctgagtgctgggactaaaggagtgtgtaaccacactcagcaagaagaaagttttaacaggctttaatttatttttacttttaataagaatgttgattttgaatgtttatcagctagttctgattgttttatttttctttgagatagcactccattctacagcacaggctggcctcaagctcactgcactcttcttgcctcagcctctgaagtgctaggtctacatgtctgagccactataactggctttctgattgttacttctaaagcaagattttagggttaagagaacaactgctgaaagttgtcctctgacttccacgagcatgcagtgacgtgtgcttgtgcacgtacatgggtgcacacacacaaactaatgagtgtattctctcaagaaagctatttaaaacatgaaaaggtctagatgttttcagatataaaataagttgtctcaatgctgatgtctaacgacttttagcaaatgtggtagtaaacaatcacataaatatgtttttggctttaggaaaaggactttgttttttggagccaaagtctcactgtggtaaactcggatgcctcagactcagtgtgcaatcccgaccaacctccaactcattctcctgctctagcctcttgggtcctgggattaaaaatgtgccaggccagtttttactttgactgccatatgcatatccttaccatgtttttctctttctttgtaaagttccagcttccatgcatgtacctgggtgacatgagaattctaaaaaaaaacaagctagaaaatagttctgtctccagcctgcataagcgtagatggcgataatacagactctctcagtaggtcctctagccgcttctgttattccacctttgacttcgattcctcttccagctgcttacccagcctttcactctgctccgccttctgctggacggcatccaactcagccagggcgagctttagcttttccttaaagacattcttttcggaagtcatttcctcttagagcagagcatcagagtgtcctttcctaaggcgctcctgaaaagattcaatgacccttcgggttgtgctccatctccaggtgcttatgatggtaaaacttgagaagcaaactctccatgaatataatttttgtgatcatgatgattttgtttttaaattggattcttttccagggtcagcaacaacaaaacctcctgaaaaataagcactactccagaaaagtagtattctttccccctgtcacggcaagcctagaaagcctttgaggataaaatctttataggctggtcataattaaaaattctcttaggggcagcatttctttgctggattccttttgggattggccttagaaagaagaataggtggcttttctgttgcttactgtatgtgagaaaagtggtcaattgtagaaaacagtgacctttcctaaaatggcaagatccatatttctatttagctcctaacagcacactgcttaagacagtttaagaagtggctttccaattatggtacatgaaccttttaaaattattatggtgattgaaacccctattctaggcaagcagtctgccactgagtaatgtacccagccccaagtgaatatttgaaattgaaaatttgagcaaggaaagtatatattcatgtgtttgtataggcttgacttttgttgttcttttagacagtcttagtccaggctggccttaaactttgtttgcccaagataaacttgaactgatcttcatgcctctacctcctaaagagctgagattacagtcctgtgacactgtgcttggctcagaaattctttatcaaagaaatgcaagtgtttcttaagggatgcagaagatattttgccgttagtctgctgcaaacctttatttttttaatttgctttatatgtataggtgttttgcatatatgtctgtgcaccatgtgcattcctagtgcccaaggtggccagaagagggcattggattcctagaatagatggttctgagccaccatgtgggtgggtactaggaattcaacctgaaaatctccgggaagagcagctagcactcttcaccactgagccaactcttcagccccatgctgcagagacatttagtaagttaagcggagaaaagacctgatttgatcttttggcttttacttctgtgttgcagcttttaaagttttatttggggaagaggcgcacataccttgtcctgtgtatgcaggtcagatgcacttgtggacggcagaggacttgtggtagtccatttccctctttccattatgctggccctaggatcaaacttgggttgtcagtcttggcagctgtacctttttaactgcactgtctggtcgctttgtcttttttccgtttatgatatcttttgtttccttataagtccttaaataataccttaaaattgtgtcgctctttgacgtattttctgtgtaattctcttgttcttatactacctgcattatctttatgtcactgtagcaaatgcctatcataagtcaactctcaggagccataatgggacaagctaataactagcaggtgatcatcctgaagtggcctgcctcggattattatataatctgcgacaggtgcgcccttattaagaaaggctgtaagggactcattttaggaaagatgcctgctattaatgtgcttttcctgttactattaaacatatataacaatcactaagtagtagcacacccctgtggagcagatctctgcagatccacaaaaagcttgtcgtgttgctatatagacaaatagatgacttaagtcttcatgatgatcctataagaattcctaaaattatatctgtgtttattaagctcttttataacaggactgctattaggtccttttttgatagtcaaagctgcaatgagaactctgcccaagtgtccccagttaattgctcttagatagtaaccagactttatcctattcagagtacactccaagaagttgtaaaacaattaaccaaaggtcataaaaagggaactaatgatttattataggtgttaggacagaagataaaatatctattgggcttatctatacaaaacttcactgataacttagttatggttttaaaccttcagtgaccctgtggagctgagacaagtgacggatgtttagccatataattactcctgttaggagcgtgcatgtaaacattcactgttgtaaacttctatttcagtttatgatttgatttttatgtgtgaacttgtgatgaacttgtaacatgtgatcatgtattctggaagatatataagtactgaggacagagagatgaggggagagaaaggagaattttttccctttccccacttagagaactttttccctttccccactcaggatctttttgcttagatagctttcataggaaacttttttacaacttagtaataaactctataactacttttctaagtgtccttttttctccctgcaacttccaactagcaggctgaaagttagagcccagcagcaattcctgctgcgatagaacaaaggctattaacttaatcctttgtggtttgaggaagaggtgctaagtgccagaaagtgcagtctctggccttagaggatcacagaaggcagatcagctacaatagcatagtaacttagaattagacaggtaaactttttagtatatagcaaccctaaatataagaaccaagaaccctccgcctacgcactccccctctagaagaaccaagaagaaagagcaaaacccccaccagagctgccccgcccccccaacagtcaatttatagagagaaaagatttatttggggccatggattaaaagtttaactttgagattggttggccttgtggccacaggcctgtggtaaggtagcacactgtagcatgaggacacgataaaacaaactgttgacgttattgtgggtgcagaagacaagagtctgagacatgggtctctgagatccttttgagggcacacccctaatgccttaaaacctcacactgggctggcctaaagtttccacagtttccagtagtgccgcagtcaaggaaacaaacttttaacacctgggccttggggagagttcagatccatactatagcattaactgtgtaggacagactgactgacaggcaagcagtcattattagattaagaagaatgtttctccacacaggttgtgattttttttttctgtaactgcttttctgatgtccccaaaatgtcattaaaggtctcaagttccctggattgggatcattattgtctgttttgttttttagttgtaggagatagggtcttatatagctcaggctggtctcaaacttgttatgtaacagaggctggccttgaactcagcctcttgagtctacctcccaagtactagaattaacaggtgtgctggaccatgcctagtgtggattaggttctttggaaaagctgtgagaaatatgtacactactgggcaactcagcaaaaggattcttaaaactgtagatctcagtcactgacatctcgccatctggattttataagctgtataatgatgtttcataagttgtataaaacttgaactttaatttatggctgaatatattgttctttttttctcttaacatccgttattttatattcctacctacactctcttgccatctgtgatgtaagttatcagtagaaaagaaaaacctgaaaaattctacctgtggtggtctttaaatccaatctcttgtcgtttccctcatgctttattatttgtgtgtgtgtgtgtgtatgtgtgtgcgtgcgcgcacctttgagctggtcagattggctaggttgactggccagcgagccctaaggatctgcctgtctttgcactgggattctaagtatttatctccatacctggcttttgttttttctttaaacattagccatataaccattacttttctcagtctaaacagaattggcagctaagtaacctttccccttcaccagagttgaacacataacttttgtggacaattctgtctccctcctaagaaaaccaatttatcatccttgtgttttatggcaaacttcaagatgagaggaaatttccatctccatccttcatctccattcttttgtcggtgacaataattgcttagctgattttgtagcatggtgatggttttttcattgttaatcaatttctttactctgacacaagttaatttttatgacaacacttcagatttggtgtttggacttacttttatagacaagcttagtggtttaaagattaaatggctggctgataaagccagccagaactagaatttaagtgaaaatttctgactaaactaacatgcccttttcactgttttagacgtttgttttttttcccagagtgcccagctccagcagatgatttctgcaaaataaatgggactcaacacttaagtctggcagatgtcctgccaatcaatttgaccttcttgatgtgtaagggacagttcttgtaaaggacagttcttcacttctaccaagttcctgtgtgtgcttgatgctctcagaggccgaaagaagagatttggctcctctggctatgggattacaagtgtaaggtactgggaactgaacccaggccttctggaagaccagcaagggctcttaatttcaagcctatttctattgttcttaaacatttctcttagtgacttctagatatttaataatttttttcacatgcaaatcctcttgtagctggtctttgctactttgtgggttctttttcctactctttatgcccctggtttcactcccatcactagataggagagaaaggatagaggaaggagagagtgtgtgagattcctgaattgaattccctaattagatgataacctaatctttcttctttgagtacaactactaacgaaccacaaccaaccctgcctctgggggcgctaggatttatacaccctcggaaaaagatccctgaattccaaatgtcacacagtctcagaaactgtctgcagctgacaaaaccatgcctctacacgaggcaaatcatagctgctggagtcagaagcagccccagatccttacacctgggattaaaacaagcacatgcgtatgctgtttctgtatcttaaagaatcccaaattgtcactacatcctcttgcacctagttacatctttgttactgttctttccctccattcacccagcctatgaagtcaaatcagtgaattagatctgatcttagctcattgtaaaccaagctacaggtagtatgtggttataattccctacatttattcagttttttttgtgtgtgtgtgtgtgtgtggctgaataaaattccagtgtgtgtatcacattttctttattcactggttccactttttaaatcattgtaaattgtgcagcaattaacaaaaatgagcaaggatctctgtggaagaatttaaaagtcctagtttgactttggacctaggaatatatagttgattcctctggtggctgtatttccgtttgagacaccagcatcctgatggccacagcagctgccccagtttactgttacaacagtttacaacctcacctgcatccattttcttgactttcgccattctgaccagggtgaagacaaattacattatacactgcaatgctgatttgtataacaagcctccatgtggttaaaagaatgttctaagctgattaagaccctaagagctcgtggatctacacctaaagagcttaggttagatcttgagcaagatctccacatctagatatattgttttccatctgtaaaatgggggcaaacatataatcagaaaattgcttggtaaggaattagagaggcaggcagatttctgagttcaaggccagtctggtctacagagttccaggatacacagagaaaccctgtctcaaaaaaaagagaagaggaggaggatgaggaagaagaagaagaagaaaagaaagagaagaaaagaagaagaagaagaaattaagccaggcatagtggcacatgcctttagtctcagcacttaggaggcataggtggcagatatctgagttcaaggccattctccaggacggacagctacataatgagaccctatcttgaaaaaagagttaatatgcttaacattcttgtgttggtactaaatattgaaggcaaaacaaacaaacaaacaaaaacagtcaaatctcgtcagtaaatgggctaatgacttgaacagcagttctcgaaaggagaagcaaacggacaataaaccctgaaagggaaatgcatcttaaaagtgaggcttgtcctcacccgggacagaatggcttaagtcaaaaaaatgaacgcaggtgaggaggcagactgctgggacagtaaactggggcagctactgtgggcatcaggatgcgggtgtctcaaacagaaatgcagctaccagaggaaccgactatcccactcccaggtccaacatctaattctacagagatatggttttatttctgtttattgctgcacaatttacagtgatctaaaaggcagaaccagtgaataaagaaaaggtgaagtctacataccagagttttattcagccatgaaagttatggcattatcaaagcaaaggattcgattggaattatatgtatatattatgtatatgtgtgtgtgagttgggattatatattatggatgtgtgtgtgcggacacaggagcacacatgcacacacacacactagatggtggaataagaggagggaattattctagagttccaaaggaaatccagacaggatttctctgtgtagccctggccatcctggaactagctctgtagaccaagctggcctcgaactcagagatccacctgcctctgtctcccaagtgctgggattaaagacttgtaccactaatgcctggcactaatcagtggaggtttggcttgggccgccaatctgcatagcatttttttctccattgtgtggtactggggggcggaggttgtcgttcaaagcttagtgctctgtggatggaagcacatatcttctgcctgggtcagaagtatcacaatagcatgagcacattgtattcagcaccactctagcagaaccattcatttagtcaaaacgcattcatattcattatggtgaataaaacccagactaaatggcaatgtttctagctgtgcagacacagtgctaattgcagcgtctgctatctaaagtgaaatgacacttacagtgactatttaaaataatttggagcatgaatatttgaggttcagttcatttcacaaaggaacattttaacctgctttgctctccattctttgggcagttatttatagatccttgccatgtgtcaaatatggtcatagatgattcaaataaaataaatgttctgattttgaggaatagcagtaacattagaaacatactctgttagtaaaacctatgtgagaccccattaagcttccataaatatactgtgttttttaagatgagggtgggtaaaggcttgggtggaggatgttcctatgtttattttacagattttaaaaaagtctactcagaaactagtggctttccggaactaaagagcagtttgacgcaaggccagagttggaccctgccaccactgatcccagttctttattttctaattattttgcaagtttctcttaatgcttcatgaaaatggctgatttcctagggaaatttcatttgtgtagaatggactaaacttttgaactgtaagccagccccagtcaaatattttcctttataagggttgccgctgtcatgtctcttcacagcaatgaaaccctgagacaaaggtcatgtttatttttttaaaggtatgtttaatcactggctgattttttttaattttaatttcatttattttacactccaaccaaagtttcccctccctcctcccagtctcttccccccaatgtcccctccaccccatccactcctcctctgatacccacgatagaaccaaacacaattggaaaaaaagtcaatgaaatgactcttaatgatattctgtaacactcatagattggtggttagcccagttgtcaccagagatgattcacgtaggcttagagttttcaaaaccttcttcaataagggttcttaaatgcttcaaccttccttctagcccatcagccaccagaggtagtagaaaagaaaggttaataggaaacaggggttgtggacctgttcagaaatagttcactggggcagttccaatcctctagcaatcagcagctgcagtccagtccactcagcaatcaccactcaggaattagcacggcccgagaggctctgccaatcggcccgggtttgaagaaatgtcaagaagcctctggaatatcacgagaagttctttggtgagttagtttctacaaggtcatgacaagccaagatcagtgacacactacaaggatgaccaatgccagagccaccttccactgtctgtggagtcatatttatagtctttctaagcatcatgtgtcctcttacatgtctgcttcagcaaaacatcttctcacttatatctgcttcagcaaaacatcctttcacctatttgccccaacaaaacatcatatgacatagaaaccagaaatttccacttcagctttacccagcaactgatggaaacagatgcagagacccgctaaactttaggcagagcttggggaatcctgtggaagatgggaaggaaggattgtaggggccagaggggtcaagggcaccacaagaatacccacagaactaacttgagcccatggggcagacagagactgagctgccaaccaaagagcctgcatgggaatgacgtaggcacttcacatgtatgcaatttcagatgtcattctattgacctcttgatcctcaagacccacacactacaaagagaactgacttgggaaagctgtcctctgacctacacatatgcactgtagcacatatgccaccccccaaaatcaataaattactaaaaatatatatgctttgtccaaggtccaagatagtatatttaggagggctggaacccagatcttccaggatggtcctcattccttcctctggtgaacgttttgctatggtgaacagaaaatgatccactgggctctagaagtctggaagtgcaggaaaaaaattagttcaatgattattcattcatagtggatagtgctaggtatcaactttggtttcatactcaggctcttggaataaagacgataaaaataacagttctctcttcaagggtttcatagtctgatgcaggcaactgatgggaaagtgattgtaactcacaattcaatggctgaaataaatgtccacataactaatccatcctcggtctggataaagctagtgtagaacctgggataggtgggtactaagatgttatctgcttccctttaatactggataatagcagtggcttttaaaaatttccttcttaaaatcagtctcctagcaacaggggatacagtgcctgaaccagccatctcctgtaaccaggtaagacttctagtggagggactgagacaccaacccagccgtaaaacctttgacctacaatttgtccagcctacaagatgtgctgggatgaaggtggtgcagaaatttgaaagtggccaactagtgactggtccagctcgagacccatgccatgagagggagcccacccctgacactgcccaaggggtcaggagccagaggctagatagcccagagacccaccagagaaccaaacacgaatgggaaaaaaagtcaatgaactgattcctgatgatattctgctatactcatagattggtgtctagcccaattgtcatcagagagacttcacccagcaactgatggaaacagatgtagagacctacagctaaacatctggcagagctcgaggaaccctatggagggggtgcagattgtaggagcgagagggaccaaggaaatcacaaaaagcacacagaatcaattaacctaggcccgtaaggcccacagagacttagccatcaaccagagagcctgcatgggctggacctggaccctttgtacatatgttacagttgtgtagcttggtcttcttgtgggactcctaacagcaggagctgtctctgactcagttacctgcttttaggacccttccccttaccgggttgtcttgtctagccttcatagaaaaggaggtgccgagttttactgcaacttgatatgccgtggctggttgatatccatccaggccagcccttttctgaagagaaacataggggagtgaatgggacaggaagggggatgttgggagggaggtcctaggaggagaggatggagggggaagccatggctgggatgtcggtgattaaacaggcctttacaaaatcaacatgatcttctttgtcttagttaaggtttcactgctgtgaagagacaacatgaccaacagaaacccttataaaagaaaatatttaactggggctgacttacagatcagaggtttagtccattattattactgcaagaaacatggtggcatgcagggagacaaggtgctggagaaggagctgagagttctacacccaggcagcaggaagagaactggtttgagtttctgagccctcaaagcctgccctcccagtgactcacttcctccaataaggccacacctactccaacaaggccacacctccgaatagtatcactccctgtgggactagcattcaaacacatgagtctataggggccacacctattcaaaccaccacaacctttaaaagagagagagagagagagagagagggagagagagagagagagatagcttcatgaagcccagcttgaccttgaattcactgtatcaccaagaattatatatgagtgcactattgctctcttcagacacaccagaagaagacattggatcccattacagatggttgtgagccaccatgtggttgctgggaattgaactcaggaccattgcaagagcaggcagtgctcttacccactgagccatctctccagcctgccaagaatcatcttggctcctgacccacgacttacatgtaggtatgtgctccgtgccatgtttacacatagtgatgactgaacccagggctttgtgcgtgctaggggaacactccacccactaagccattgctcctcacccgacctttatgattggttcttccctgttctgcttcatctacctcctcccaaccaccttacccaaatttgccatctcttcacgctttgaaaacatgtgctgctcctgtggtaaaatgcccttcttgtctctctcaccagttcctgtttaagggtgacctttgcaaagcatcctccggtacagcacttttattttacagtgcaggtcatcttgtcctatagtttcagtgcgtgactatgccttgagttctataaggactggcattctctcttactcccttattttccaggggtttcacagacccaagcaaagatgggcgagagtagtcaacgccattgagctactgaggtgctccacctactctccctggtttgttgaattgagttatacaggagtacatcaagtgggaggtggggacagttgagttcttcacagggtgtccatggtgacagctgtgcaaagggaaagaaagcactttcttactgcctgtcatttccaaatgccatcagggtctgcctagttttctaagttagaagtttataatcacctcctattccttctcttactaccctgcccccgtctaatcagtcactaaatcctgtcggctctaccctttaatgtccccagagcccgctggcatcttgccatcgcccgttgccagttctccagcgcaggccctcattatcccgcacctagaatcgatagctctgactggtctcgctttccatctctcttgcccttcatcccacctctcatctatcctcccctctgctgccaccgtctgctttctaaggcacatctgttcctgtcaccattctgatgaaagcaccggggaagctccgtgacctgcaagaagtccaaccgccgctgcagcgccttctgtctcccactgctttccctccctccacctcactctggctcaccggataatgcagttttccggaatgaccccagttgcaaagccctcatttgtgctgtctctctgtcaagtgggcttgcctgtctcctggcgttcagaccttgtgccacccactcttcaaggcctaactcacaagcctcttttgagcgataaaaactccagttataaaaaccggagaggttaattagtaaggaaaaatgtgggtgtaaggctaatatttttgaggtattattatatttcactgggcttttatttctttcagatagattagctcctgaggacaatatgtgttggtatgtatgtgcatgcatgagtgtgtgtgtggtgtgtgacagtgtgtgtatgagtgtgtgtgtagtatatgtggtgtgtgagtgcgtgtgtgtgtgtgtgtgtgtgtctgctgcctgggtgtagaactctcagctccttctacagcaccttgtctccctgcatgccaccatgtttcttgcagtgataataatggactaaacctctgatctgtaagtcagccccagataaatattttcttttataagggtttctgttggtcatgttgtctcttcacagcagtgaaaccttaactaagacaaagaagatcatgttgattttgtaaaggcctgttattnnnnnnnnnnnnnnnnnnnntgtgtgtagtgtatgtgtgagtgagtgtggtatgtatgtggtatgtggtgtgtgtgtgagtgtgtgggtggtgtgagagtgtgtgtatgtgtgtagtatgtgtgtgtggtatatgtgtgagtgtgtgtatggtatgtgtgtggtgtgtaagggtgtgagtatgtgtgtgtgtgtgatgtttgctgagcaccatttgtgaacctatgtatgtctcatagtttcctttaactgccaaaataatttcttaaaatataactgctattgttaacaaaaataaacaaataaaataagtaaataactaagtaagttcagaggaaataattctgccttccacaaggttaaaggctgttttttgtttgtttgtttttgtttttgttttaaaggactggtttaaaaaaaaccccacaaggggctggagagatggttcagtggttaagaacactgactgctcttctagaggtcctgagttcaaatcccagcaactactgggatcacaagcatttgtaatgggatctgatgccctcttctgttgtgtctggagagagtgacagtgtaatcatagacataaatttaataaattttaaaaaccccacaaagctgtccagtttctgacctgtatgcagttttatgattctttttctttctagtctaccgagtcttttttctttccatctttcttctccctaccctttcttttctaatttatcttggagaaggcaatccagagcgcgccgatgttttcaaacctctttttctaattaaaaggaagaggcggtccataagacgctgcaggtttcagactgacaaggtctctagaagctgggaacaaggccaaaaatgtcaccctctgaaagtgacaacgagaagtcgatgagattaatcactatgataatcttcccaggaaataaccacctaagaaattcttgttaagtctgttgctggtaggatttggctgttttgtaatctcagctagggcccaagatgtctccctaccaaggaaagcatttaagatgcagcttgtgtgaggtaaactgtaatctaggaaattacaagtgtttgtcctggggttattaatgggagcgccagttagggacttctaagcatgactgtaaatgttgcagacagtctgtaaatgtggctttagtttctgttgttctttcttatcagggtaataaaccccaggaggtagaaactagttttgttttatcagcaggggtattgctagaaaaagagggattagtagggctgttagatgctgttgtagttccgatgcttcctccacccatgtaccagggtcggaacctcaggcttctgtagctgtggggtgtggtagggaccatagagaataggggaagtcttaggaatagggcagccacttggtaggactgtgggaccctcctctttggctcctactgtgtgacttctctcctttacctacattcttggtgtgacttgacacagccagggtggtcaccaagctgagccaaagaaacctcttgtctttgtacagttagctcgctttgagtatcttcttgtcatgaccaaaaatgagctgatacagctgggaatgtagttattaattagaatcccagtatcctggttgctatgcataattttacatgcacgtgtcttcatttttccccccttaggaaaatgtctgtagctctaatcaaaggaattcctgacctctcggaggttaagcccttgctttgatgattaaagttacaaggaacaataaaacaggagacaagggaaagacacagacatgagatcctccttggagagagaagatgcctttttagaactccgatttattggctttgcacgcacagggccctgttgtgtatacagagagagttcccaattctctcacaaaaacttcgagtgtgtggggaaatgaattgtgcgcagcaagggagagcagggatccaggattaaggctgaaaaagacgaaagggtgctgaagggcttggggaggaagctcttgtgttctcgtgcgcgtgagtgcaagcacatgcacacacaggtacatcttaaactgtcccacaagtgctaagttaatgcagagtttagatttcatagacagtctggggtagccaacagtcatcactaagaaaagagctcatgagactaaactctaggtaacagataattaaaggaattaagacgaggttccctctaaggctttgcagattataaattacagaacctaactttagctaaaggatgtatttaaacactacagggcagttaatgaacttgaaaggcgtgaacgagcaagcgtgggaaggaagaaactgatcggtctgtagacttccacatcaggggacaagctccagagagccccagtttctagatttctattttaggttttaaaatttcaagaacagagttcaccattggcactgatctcagaaaagatcagctccttagccagggaatggctccagctattcaccacactcatgaccattactggtatcctgtcttgaaaatgatgggagactgatgggagactagcatacaggcacccaaatcttcagattacgggcttcacattgcaagttttcaatatactttctctctttttaaaaattgaatatatatatatatatttaataaaatatattctgattatagtttcccttccctcgtctctgcctggatcgcgtcgggtagtggttggttacttccacagcttttgcgccgctgctgcaccagcatatcatgtaggcaggtcgacactgtagatcaaagggtttctggatgggttggtgtttagtctcttctggtaacatcaatgcacttttttttttttttttttgagtttaatcacttttttttttttttttttttttttgggtttttggagacagggtttttctgtgtagccctggttgtcctgggactcactctgtagaccaggctggccttgaactcagaagtccgcctgcctctgcctcccgagttctgggattaaaggcgtgcgacaccacgcccggctatcaatgcactttcttaacttctacagttcaaaacctaattgttagccacttattctttctctcttgagaactgaatccaatgcatttgcccatttactgattgggctatttattctattggtgtctaattgtttttttaatccttcatataaaaaaaatgtgaacggctaacaaatacatgaaagaatgttcagcatcctcaaccattggggaaatcaaatcaaaacagccttaaaattctgtctcactctcgtcagactgtctatcagaaggaaaataggggctggcctgatggctcagtgggcaaaagtcccaaatgaaggggtcaaagcactaattgcgcaagtccaatgacccaggcttgagccccaggacccatctataggtagaaggagagaaccaactccacaaacctctgcacagcgcggcaatgtgcaccctactcgcctctcatcattgtcaccatcaaaactaaaaagaagacggaagtgcaggagaatacgtggagggcaagagaagccttgtatactgctggtggaaacgtaaatctgtccagctactatgaaaccatagatgtcccttgaaacactacaaacagaagaaccacatagctcagctaggtgcatgttcgaaaatgtcatattgaattttgtgcaattaatattttgctttaaaagcccctaattaatatagagaagggggaagaaaggggaaggagggagggagagagacagagacagagagacagagagagaaacagagacagagacagagagacagagagaggagggagggaaggagggagggagggannnnnnnnnnnnnnnnnnnnnnnnnnnnnnnnnnnnnnnnnnngggaggaagggaggggagacttgaaatttaaatgctaagttgccagggagcatcaaaacaaaacaaaacaaaacaaacaaacaaacaaacacccctcaaattaattggagttgctcttctgaaaaccagtacaatagttagctctgctcttggaaatataaaacctagagatggaaagggagagctgggggtggggtggggtcatgagagctgttcgcctgctgtggagagccacaaacctgccctcgggttcccttcttgcttactcccttcgctggagctagccagcgttctttaaggaagtccttcggcagagggcggaggcgtgaagaggtgtgctggacttttagaagcagcagctctcagggaagacgaacctggctggcattccggaaatggaagaaaaccctgggatagaaggaaggcttggcttcaccctgttggctgtgggccaaggtgagaaattcaggcttgttttttgttttgtgtgtttattttttatttcctctcaggcctaataaaaagccactggagagatttaaatagaaaagagttctgtttttcataaggctccgccccctagataacgagccacaggcaattaatgtctgctgagagagagggagaatcggtctttcccttggatgcacttcctcatggctatccaataccaagtgctcatctctgaagcatgcgtatgaacaggagcactaaacagactcaggaggttgtctcatactgtggaggttgggataacagttcagtggatcacgtttttttctgcacaagccaaaaaaaaaaaaaaaaaaaaaaggagttagaacctccagcacccatgaaaaagccaggagagtgtggccagccacttgtaatcccaccactgtgaggcagtgactgggaagctctgaaacaagctggctagctagaccaggtagaatcagggccccaggttcagcgagaaacttcaataaagtgcaaagcagttaaggagggctcctatcatcagcttcaggccttcacacgagtgtgctcgcatgcctgtacactcacacccacacacgtgtacacatagagattcgaacgcgcatatgcacctgcaagcacccgccagacacacaccgctctgaagctgagtataatgctgcatgcttgtaatctctatacttaggaggtggaggcaaaatgattccctgggctagataatgagatcttgtctcaataaaccagaactgtccagaccaaccaaacagagaacacgacgatgacgacaacaacaacaacaaaaatggggtgtggttcagtagtggagcccttgtctagcgtgctagcatgtgcaggcccttagggtggatcccttgccctgcaaaaaataggaaagaaagaagggcagcgttcagaatcactgtagatgcttactagagtgtggatcctgctaagacccacaggaaatacccagataagagaccatgatggtagctgtcctgactactttagtgtctgtttgactcaagttgaagttatttgggaagagcgtgggaggtggggctgggggtggaggtctcaaccgagaaaatgtctccataaaatccatctgtagtgcattttcttagtgatggatgttggagggagaagcccactgtgagtggggaggccgtggtcctgggatatataaggaagcagtggtgaccagccaggggagcagcaatgctccatggcttctgctccagttcctgccctgggttcctatcccggcttccctcagtgatggtcttattagctgcaaaatggaataaaccctttcttcctcggttgcatttggtcatgttgatttatgccagcaatagagtccccaagacagtggcttaaactcaagtagaagcaacggctgggtttagcacacgtttgtgtattttggagcgagaaccatcaggacttgcccaggtgaaagagaaggaaaaaggctgttggtttgatcaatgagatggttagtgatgtctttcactgaactggagctgggaagggatagatttagggaggaagacagagtctagaatcgatcccgccaggtttgagatgttgatatcttggttaaaatcagggggcagtcagatagacatctgggaaccaccagactagttgtacttacacacaagggccggaccgaacttgtgcgcgagggtgtgtatgaatgatctcagggcactctaacgttaagaagtctgtctttcttgggggttgggactggggaggtggctcagttaggaaagtgcttggtgcgagcatgaagacttgaattcagatctccagcccccggctcccaccccgccctcttgtgaaagctctataactccagagcctgtgtgggtgggtctggagacagattgagatttaaccattgcattctagccagtccagtaagattggctcagtgagaaatcttgtatcaaattataaagtatggggtcagcaggatggctcagtgggtaaaggtgctttataaccactgcttagccttataacctgtgtttgatccctgggactcacatggtggaaggactccagaaagttgttgtcttactgtcttacttctataattatgccatgacacacatgtccctaaacacacatacacacacatacacacactacacacacacatcacacacatcacatctcacacacacatcacacacacactcattacacacacatcacacacacacacacacacaaacccagctttctgggccaacaacgagcaaaggagggtggctggttagacaaataccatactattttagaagagtaggctcttaccttgatatcttaatgtgcagaaatgtatttgatgctttgtttatctccgacatcaacattcttatttacgagtggactcttagatgggtgtaggaaacatcacagcctttggagggcagacttttccttccttgaaccaaggaaggcaaaatctttctggcttttctttccatatatttgaggagttgacaggaatccactgttcactgtgactggaacgaaggctaagtctgtcaataagtctctttgggcctacatatttgtgggagtccattagctgtactaactggccatggataaaccacatattttacttacacacaactctagtgagccacaggcagagaatctactctgtggattatttgcaataaaatttaatttttttcatagtgttaaattaaagcctgtctaagctctctttgggtatttcatatatttctggggaggctttctttattaacagtcagcatatgagtttattttagaagtggtctaagcaaaatacaagtagaaagatgggcctgctgcttataaatagtgtatatatttagtagaaataacacacacacacagagacagacagagacagacagatagacagacacagagagacagagagaacaaagttatataaatggtatttagctctttctagcacagctaagtaaccatagcaatcaattagttcatgtgataactccagcttgctttatttttaaataaaaataaaagtccctcttggtatcaaaacaatatgttcactatgaaaaacaggaacaaaatttcttaaaagaattatttaattatatatatacacatatacacacatatacatgcatgtatatacacatgcatataatatatatacactgtagctgtcttcagacacatcagaagagggcatcagattccattacagatggttgagagccaccatgtggttgctgggaattgaactcaggacctctggaagagcagtcagtgctcttaactgctgagccatctctccattcccaggaacaaaaattttaaatgaacatttagaacacagaaacataactccacagtccactgaaacctgctgctaataccttcggtccagatcattgtatataatctaactataattctaaataaaactcaagtcatataggctcaaaggctctcaataacagagtcttgaagacctccttcagaccttacgtgctaagcatttcgtcatccatctgggttggttttgtgggcttgtttcgttttagtattaaactagtggcattcttgtgtgctttgtttctttagactaaacttttagaaatgggcttcctgagtcaaagtattctgacgtgtattgtcaaattgctctacatggtttattaaggtagaccactaccaacaacaaacgcctttgtcgacgctaaaccgaaaacataattttaagaaatctttgtgaagtcagtagggaaaactcaatttgatttctttgattactagtgagggttgaacatttcactcactggcctttggcacttcttatgattcactctaccacagcctgtgttcagtattccctgaagacacctgttattgatttccaaggccagcttcattatataaggaatattgatcttttgtgtttaaatatttttcgttacatgaattcttttatattttgacctgaaatgctgtgggggaaaatgtatatatttgggcgggagagacgacttggtgcttaagaacactcattgcgcttccagaggtcctgagttcaattccgagcaaccacatggtagctcacaatcatctgtaatgggatgccctcttctggtgggtctgaagagagtgacagtgtactcacatacataaaataaataaataaatcttttttttttaagtgtatattcaaggtctgttttcccttttatgattttttgtatctatggctacttttaggaaaccttttttcatctattgtatagatgtttatctacatatttttgctactgacctctcctcctcctccccctctccctctttgtccttctttttcttctgagattaatatcacatagtcagggtaacctcaaatttgctatgtagctaatactggccttgaactcttgactgcacctcctaagtgctaggatcataggcaatgctccactattcctggcctagtttcagtttctttaacttacaaattttatttggtgtgacataagaaatgcttgattagccgagtggtggtggcgcacacctttaatcccagcacttgggaagcagagacaggcggatttctgagttcaaggccagcctggtctacaaagtgagttccaggacagccagggctatacagagaaactctgtctcgaaaaacaaacaaacaaacaaacaaacaaacaaactgaaacaaacaaaaaagaaatgcttgattatatttatttcagatggtccgctattaaatcaattttgcttcatttcccctttctcctaagatattgacacattagttacataataaagcacatttaatttaaagttgcacattactagggcatggtgacacacacaccttaatcccagaggcaggcagatctttgtgagtttgatgccagcctggtctacatagtaagttccaagccagctaggactacatgtaagaccctgtctcaaaaaaaaaaaaaattgcaccttagaggcccatgatcatatctagcctatggaaatatatgtgtgcatgtatgctcatacatacatatgtgaagatgtatgtattctgtgtatatgtatgtgcacttgttcttgtgtgggtgtgaatgcctgtgcacatgtgtgttgccttagttagggttttgattgctatgacaaaacactgtgaccaaaaagcagataagggaggaaaggatttatttggtttacacttccacagcacgattcatctttgaagaagtcaggacaggaattcaaacagggcagcatcctggaggcaggagctgatgcagaggccatagagggatgctgcttactggcttgcttcccacggctggctcagcctgctttcttatagaacccaggaccaccagcccagggatggcgccaccctccatgggctgggccttcctccactgatcactaattgagaaaatgccttacagttggatctcatggaggcacttcctcaaaggaggctacttcttccctggtgaccttgacacacaacactagccagtccacgtgtggaggttagtcagtgtcaggtgtctaccccagtcatcgtttactttgttttttgagacagggtctcttgctgaatgtggaacttgcaggtttagctagactttctagtcagcaagccccagagagcctcctgtcctctgtctccaaaggactgcggttacagccttacccttgcaaactcaggccctcaggcttccgcggcgagcactttgcaggctgagccacctctcaggctcctaacctacagaagagtttggttcaggtagtttttgaattgcttgtctagaggtaaaaaccaggaagttttattccaaaatccggctttacaaatgtctctggaagaaactaccctgtctggcaatacagtggttgttgccggactcgaaatcactccggacaaacacacagagctggtgacagtagattctaacagtccccatgagcttcattcatgtctggcgtctgctggttccttgtggcatttaagattacaaccactgctgttaatgtctacgctcatcttggcaattgaacaaattatgagaattaggaaaaactgaagttagttctgagttttcaagtaaactacacaaaaattataatacttaccttttcagtttgtacactttctcagtctttcttcttgctgtattacacttggctagaagctttgtaacaaaggccaagcatgctagcccacacctttatattatacctgtcttgatgtctgggcatctgacttttaagtatgcagtaaacattttccactgtcaaaatatatgtgttctatgagtttctgatgccctgtgttttattaatataagctgtgcttgttgaatcttaccacatcaaatgacttccatatgtattgatatcctgtggcttttctctaaatttaatgctttataataagattttctaatgttgaaccacatgcattcttttaatataaatcctaacaacatttaacactacctaatgtaccctaatatacttattaatctaatttgccttttaaaaataattaggaaatttgcatctcatttcaaagtaagatttgcccattgtaatcccctcgctcatccctctgtactctgccaacgttatcctaaatgtacatagtcaagtcttcgctgttgctatggtgaatttttttttcttgtattaactgatatgttccctaatttctttgaaagttaattttcatgtatacacatacatatagcagtgactaattttacatgtcatttgactgagtcaaaattgcagaggtagctggcaaagtgacatctctaggtctcttgggcctttgaatcagtcaaccgagtgtagttctccctgccaaggtggagccgtcaccagcgagttaagggcctgcatagaacacaaagagaaagaaagagtagaattgccaaggggtgagagtgagagtgcctatctttctgcccctaggcatggtcttggttcttttccacgtggaccaagactgggactaatacctttgtggggcctggttctcaggtctcaggctttaactaggactacatacttcatgggactctagccaaagaaggcagctactaggacttttctgattctccagtggttcgagccagtccctcatgagaaatcattttcaccgcacatcttttccctgtatccatccttgccgccctgtgtctctgaagaaccctaatagatactgttttctatttgattgacaaataatagtttgtgttgtttgtttgtttatttattgtgtgcatccgagggtgtgcaagcctgtcacggcacatgtgtagaggtcagaggataatgtttggttcttttcctttgaccacgtggattcaggggttcaacttcaggttgtcaggcttggtcagaagtgcctatatccactgagctgtctcatcagtcttttaaagcaaaattataatgtgaaataaatcatatgtatggaataacctatgggatgcaattatgtaatttattactttcttctctgagacagggtctcactgtttagccctctctggtctggaacttgtcattcagacgaggctggccttgaactcataaaactccatctgcttctgccttctgagtattaggattaaaggtgtgggccactatgcttggccatttatataataatgataataacccataaatcactacccagcaaagacatatcaccagtacttagaacttgcttccaactgtaccccctttggatctcccaaaggaaaccactatactgatttttgaaacaatgtgttcttgattgctggttacagtttttacatcttacctgggtatcctttaactaactgtgtcttgtcttatagattcgtgtttgtaggagactctttttgctcagtattatgtgtttgcctctcacctgcactgcctcgcatcccggactgcactcgttttcacagctgtatcattttccattatacagatttgttatctgttctgcgattgagtgacactgttccattcaaggttgcagaagagaaatctgctatttttctcggcgtgaacagcttattttgttttgttttctatctggatgatcataggatttttttttttaaagtgccgttgtcatcttttactagaataaattcagacagctcttttaaatttgccgggcgctctcacggtggctctcatctcgtgcctgctcagttttctctgtgctctctccctcacaatggacgagcttcgtctgtctagatggggacggatggtggggtctcctggagatgatgggtctctgcggaaatgtttcagtctcaacatgggaaacaaatttataatgtcctcactaaaaccacccttgaagtgacattgcatgtgagaggtgggcggcctcacctaaaccaaaagggacctcttaagactatcatggaacactcctgtgtcccacctactctccaccctcaccccaaccctctcacgctctaccagcacccatttaccctccacccacaccctccactccaccccaccctccacacccccacacccccaccttccacccgatcccacccacaccctccaccccatcccacctccaccttctcattccttgccctccaccctccatctgctatctgcggatctgacaaggcagctttgcctggaagcaaatctccactcttttctcagtggtagctccaacaagcctagagcagcctggggtcgcgagcgagtgagctatcgagcaagcactccagccccaggtggtggtggtgtttgactttgacagcccagatggtggtggtgttcgactctgggcgacagcgtgactcgtgactcgcactcctctctggactctgtcacacaatgatttgtttgttctcttctaccctgtaggtcggttcatcagagaatccccaagggaaagctttaaatgtattggcttgggttgcccctgtgggctggaaataccacctatttagcttgtattgatcctcaaattgaaaagtgggcctcttgtgcagcaagctgcctccctgagccgggtaggagggcagagtggacggagagtgatgggcagcctctgttttcccgtcggtaccttgagaaaaactcgcgcttatttagcaggttggcagggaaaccgaacactacccaagatttatagtcgcccgagggacaagctcttgtttgtggtgttgaataagacagtctcttcctcaaagtctctgtacaacaggcagggaggccaatcatttgccaaacatcttgtagaaaagaaaaagaaatgcatcagatgggagactggacaatgtccttaatattcttcctttccagaaatcttgtgactagtgttttctttggatgctcagggcatgtgtgtgtgtgtgtgtgtgtgtgtgtgtgtgtgtgtgtgtgtgtttatttctccagtcctgtagtcctgagttgtttctgctttaatgtcacctaaggatttgtagtcagactgtggtgggtttacctcatcgctgcatatgcaatattttattgccttaaagggtctgacaaattagggatagcattctttttggaagacttctggttcagttctcctctgtgggccttgaagggcctgtattagtcactcagcaagcagttaaggttttctcctttcctcctgggaaacaaaagtgattaggaaattgtgactttgctattgttctcaagaaaattgcattaaaatttacaggtacctttccaaaagaagacaaattatacacattacaagaagggaagaaaagacttggtgattatgtcattcctctgagagcagctcattgttttgcttgctacagaatgtatccatcggagcagacctgtccttctgtgggtctgtgatgctggtaaattctgaccgggagaaccaacctactggccccatttctgggaagataattgaaaagttaggacaccaccccccccccttgagaattgtctgtgcccttggagtacgggtcttcctccttgattggagacactggggggggggagggtgcggggggggggtgtcccgtggcagtgctcttaggttaatcagatatttgagaaaaaaactttattttcagccaggacctgcaaaccacatatcctgtctagtgtttcttgaactatctaggatagggaagaacaggagaggtatcgtcactctggttctgtgcctgttagaatgtggcacctgccagcacgttctttctaacaccacccaagtgggcccaacctgagaaagaaaacgagctgattggtgaagttacaatgcatactaactattccctttggttgtaatagggcacaatgggcagatgctaagagacagggacgtgaaagctgttgactgactctgtgtccttgcataccacgctaggcaacagccaagttgctcctctgcggttcctagatttgtgcaggaggaggcttctctggcttgtctgaatggtcagggagcctgcagctggagtcaggacataactgtaacttcatggtttatttaataagtgtgtttcagtctcttcttctggaaaaggggaacaaaatgggggcactttctggcaatgctgtgaataataaataagctgtagttgttagaaaaacctcaagatcagagaaaatgattaatagtaattagttggaatatgattattgccttacttgaatatttgaaaaaataaattccttcccaatctccagtagaaatattttttagaaatcaaacaagttggtcttttaagagaaactgaactatcgtgggacacttgctgttattttatatgtatgcccttggtgataaagagtggatatttgtgttaggacacctgaatcttatatactttgcttaacgcaatagataatgcccacaaatctcttaatcgcttcagttcccacgagaagaaacagagctacacggtgatggcctccgagctcagctctgtctcgagttctccccccagagactcctgaaacactagttttatagcaaagatgccttccagctagattggctataaaaagatctctttctctctctctctctccctcccaatctctctctctcttcccccattgacttttgttataaaatcagagataatatctcatgggggggtcctccaattgatggaccagattgttaaagaccgggaagatgacgcacttgccttatcctgcagccaacatctgagttcttcgctgggactcctgtttttatagctcataaagatttagtgtggagccttaaaaagttgtaggtgcagtaaatgttgatatgggctgaccatatctgtataacagaaactacacactctacacacacacacacacatacatacacacacacacacacacacacacacacacacatgcatagatgaaatttattgaagcactgtggaagtctttgcgaaaagaacttcattcaaaaacttgtatatgtgaaagggataagacatgcctgaatttgggtctgaagaggaagtcaccacacgggctaaccttttgtaaaggggtctggcagtgagcttagtgttttgaagaacataactgaaaaaagcctcgagacaaggtacttaagatggaacgacctacccaaatctgtacagctaattatggaaacccaggaccaggactcagtactttggctgtgctgggagatattaaagctacttttctgttttctcttcaggaaaagaatttgttactccggagatcatattatttagtcccaacctgctccttttagttccaacccaagatggctgcaatactacaaacataccagtaggtgatgctacaggctacgatattgtatgtctgtcccgagctgacttttacttggaatttcatcatttgggcgttctgaagactccttagaattcctgcaaatatttgggggaatccaaaagaaatatgaaaattaaaaacaaaactatactataacagtgattgaaaatttaaaaggttatatgactagtaatacatacaaattttagttgaaatcagtttttaacagggagaaaagggggcttattttatgctaagctccccagatagaagcagagtttcgctgctccaagtggctcacatcttcattttgttcagcaaagccttccactgtgtcagagacggaactctgaggaattagagaacgaagtgagatccagaacacattgcctagctgtgctatcctggactggttctttaacctcctctggctttgacctaataacacgattacaccctgctgtgagaatgaatgagatgacgtgtgaaaacaaagattagctgtcaccattaactacctttctttctttctttctttctttctttctttctttctttctttctttctttccttccttccttccttttttccttccttctttcttcctctctttcttctttctttctttctctctttctctttctttctttctttctttcttctttccttccttccttccttcctttctttctttctttctttcttcctctctttcttctttctttctttctctctttctttctttctttctttctttctctctttcttctttctttcttcctttcttcctttctttctttttcagttagaaacatttgaaaaatactgacgactttaagtttttctctttaaaaatctgcgaactgggtgggggggaggacttaagaggctgtgtggttgggttctcaaatcaggtttcacaatttcatgatacaatacaattatttatgtaaaaccggacactccgctcctaatcttctacaggtgcaccttgcccccctccacttagggggaacctgatatttcttctttgggtttaagaaactcgcggaatgcaaagccatcctttttatcatttatcgtgcaaaacattccgctttagttttaaatgtagtattcgtttgttctatttataaaagtaatccagaacaaatttgttaaattccaccaagtgatgtgcttatgcaaggattctattaacacggccaaagaagtttaatcagtaaatacagatgttttcctaactttccagccagtgagccaaggctttgatttacctgatccgatgcttagaaaaaatattttggttagaaaagttccagtttattaaatagccgagcaggctactgagccctggcttccaagaagtagcagtgtttggtgtgagaccttatggtactgactgctttgatgaattattgacgggtctctcagttttgtgggcccaccctcatttagttttatctctctaatgataaaaaaaaaagtctaccatgtagatatgtaaccctagcttattttgaattcatgattcccctgcctcagcctctcaaagtgatgggattaggtcatgcaattttacagtgatagaattccatcccaatgccataaactctaatcacaggagaatatatagattctggaaacaacaagccaagggtaagttagttgattggatcttggattttctggctattttgaagatttccatacagagaggctatcaagaaccacgggccccaacacttttttacaaagtgaccaagacttccctgtggtcctagagaccgcttttgctgcttctaccggcagggggtgcagcaagtgtttccctttcaagatacaagggccacattgattaacatgtggtctagggaccaaagactttctaggggaatcatgaaataattttaagtaaaaataagtgtaataacgaatatgcaaccaggatttcagcctagattacatttgcttttatatgaacacataactgaattagaataatagtttttgctaaaggaggaaggaaaacacaaataaccaaagtgtctccggcccatgagcagaataactaaccccaaattgtacctccaaactcagagttctaaatttactgtaaaaggcaggggaagcagagactgtgggaggggggaaattcccaccttctcctgaggctgacactcttctatatgctgggctctggaaggctgtagggaggaagcctggaccatccacatagttttgagttgtttggcccaaactgataggtcaaataaagatatttctgaccttacggctatctaactcttcatctctgactccttcctgaagcagaaataggctctaaaacaaaacaagtctgggctagacaatgcatggtcaagaaactggatgcctcctccccatccaggcttcaggcaacactacttcaggcaaactatagatgagtcaaactatagatgagtcagtttccccctcctcagggagttactcaggaggtctcagagatttctctgaaggacacacgaactgacaagagccccaccttctgcgtgagtagcagaccttgctggttggctgaggactgagggagaaagttccagacatcggctgttcaacgtggtctaatacctcaaaccctgctctggctgcctgcggggagtacctgttgatgtgtttataaaaagagaaagagaagagggaatatgttctaaggaggtgtggtgaggtatgggggaagggtgtgcctcagcaggcccatgccaacacatcccttcccctgagggaccagccacacaacagtatagtatagaatagagtttattcagggcatggggaggggagttaagagggagagagagagagacagacagacagagagagagggagagagagagagagagaggctggccatgatcacgtgaagagagaagggggaagacaagagagaggcaagagaccaagagagagagagaggagagggcaagcagccccttttatagtgggtcaagcctacctgcctattgccaggtaactgtggggtggagctcagacagaatgctaacacttgtaccccttggtctgtggttccacagcctagggtcttcaaaggttttctttcctaagcggggtggggtggggtggatggggagtgagagggtgtgagtggtgtgcaggatagcagggaaaactgggaggcctgattggaggggagcgggatgaagaattcgaccaccagatggcgctaggcgaccagtcagcggcttgcagcattgagagccacagtatggcaatgagggggtcttggagtctgtaccttcaagagtttgggcaccagtgtccttccatttgaccccaaagagggggggcctccttccagcagcgcaggaataggcagaggatgaagagtcatcctgactgagggaggcagcagaaaagcctgggggatggggaagtgttggctgcggagatatttccaggtcccttgcttctcgtctttttgaagaagcaaattcagaagagacatatgcagtttcatcagtttatttagcaaagttaagcaaagcaaacactccagtgaatttgcagtagacaacctcaagatgcgaagcaacccagcatgttctgattgtggtttatagaagttttggggtttgttgttgttgtgttgttgttgttttgttaatgaatatttaggaggagggtgatgtattggtagggttaggtggcactttgcctctccaaaatcatggtggacctcttaggctatttattctcacgaccttcctcctgtgtagtgtagaaactacaatgtaacaatgttatgagaatgttaaatgtttggaggatccttggttagtgcgtatgtgtgggagaatgcccccgcatcttggtctgtgataccgcagaaacaactatctgtacctttgagggtctctaacaacaaagtaacattctgactgtctagggagcaggtgcagttttctagcccttcgtgtctacctccttgcccacccagtttcagatgggcatagtgtgatagcaacttagggcaggagaagggaagagagctggactttagtgctttgtagcataagaacctattagggagataggtgtgagatctgtctgtggagtgaggcttaatcaggatgtaggtgcgcttactcatttccaaagatgtcacgcccactacctcctgcagaataagcttcatccattatgtgaagcccctaggaccaagtgataactctcgttgcttaactactgccccatccttgtagcaccaaagacaccctggtcttttcactaggctgaccctggtaggccacagggaaaagtgctctagcaacaccattcccgtgtccatttatggctgtaacttttgcctttggtggagctaggcctggagacagaaatgaataatacataaccactgccttcaaggagctcaaagtctggtgggagagacagaaaacaaacaggctgttggcacacagtggtaactgctgggcgggaggtgtgcccagaaggtggtggcagctataactggtactaggacagggctggcattccagggaagagaagtcttgaagggctcgaaggtattagttagccaagcagcagccagggaaggacacataagcttccactgccacaaaagcaagtgcttggggctgcaggtgggtgttgcaggcaagtgttgcagcaggtgggaatgggttgcgtcagcttgacacaaactagagtccctagaaaaagggaacttcaattgaagagttgcttccatcacacagggacatgaggcattttcttgattgctggttgatgagtgagggcccagcccatgatgggtagtgccacccctgggcatgtggtcctgggttctacaagaaaggaggcagagcaaggcgtggagagtaagccactaagcagcactcttccatggcctccacatcagttcctgcctccaagatccagtcctgagtgtctatcttgttgtccctcaacgataggctgtaacctataagccaaatagaccatttcctccccgaagttgcattcggccagagtttgatcacagcaaaagagaagcagagtctgacacgtgttagaccagaaactgagcgtcagaacacagagaggcaaggctggttatgccaaggagtcaggctctctccactgaaggactggggcgttgagagatcccctcatgctgagagagatacacacagtaggatatggatggcatggtgacttcatcagggaggagaggagttgggagttggcagctctgctagagggtcattgccagcaggaagtgatgtgaatctgataagggctgggaaggtggcttgtgaggtaaactacttgcttcccaagcatgccttctgatctccaggatttacaaaaaacactcagggggtggggggtggggtggcatgcgtttgtaatcccactgttggggaggcagagatgggaggataccttggaccatctggttcagtgcctcaaacaatatggtgggaagtgagcttggagctcctggtcacagaggaaggagtccacgcacgtctcagggatggaaagggctttccaacactcctcatcttgtctttctagggaggcaagtaggcaggatggtatcctgttggctatggttggagagctcacacgtgcatgcatgtgtgcttgtgtgtgtgtgtgtgtgtttgtgtgtgtacaagtgtatgtctgtgtatgggatgtaggagaggagcagagggcccaggaagcctaagctagcgactataatccagttagtgaaagggtgggaaagccaaagaagtttggggtagagaagtcattccaggctggttaatgattcagtctggtaagggcctagtctgaagcacagagtgagaagggtagcctgggctacccaacaagaatctgtacgtattactttcctgttatctatcggcacagagtttttctgtgtagttcaggctgtcccgtaactcatgatctcttcctgcctgtgccaagtttgtgccaagtgtcactgtgccaaccaagcttgtactcgctgtaagagcaaacctcagaactctcctgcagactggcaaggcagtctagacggataggtagacagcctgggatggaggacggaccttcttcccttcctggctcttttaccactaaggtgggtgaccttgggagggggacttgacctttctagatttttcttttgtgaaatgacagtgggccccatgtatggtagcaagctcaacatgagaatcttctttaagcgtgtataccccagtaccagtcaggccagagagggcgagtcactgaggtaacaggggaaggcttgcagcatatgctcaggcaaatgctaactccctctctcgcagctcagatttcaaacagggtttagtcccagtcccctccacttttctccatgtgccctcatgggacatcaagattgttgcttcttctggcatcggtcatcagcaaatggtgcccggtggctcccagcctagacactgaactcattccccaccctcctctgagctttggaaatgctgtcctcatgctcgtggggtgggggcggggcttgtttttgttttttttttttttttcctctaggagatttttaccttgttggttaacagttctcttacttgggtccttgaatatatgctatcattcatttcacaaatgttctgcttagatgacagagagatctacttggactgaaacacacacacacaaacaaaccaactcatggcactatctatagtccttcaaggaaatgatcaagatttcactgtaagtcaggtaacttcactgacttgataacctagatttgaaaccccccccccccggccaggaacatctcaaaggggttaggagcccttatttgtctagttgtggggccactggctctgcctcctaagagctgggcatgtgtcaccatgccatcagctgtaattgaacacttcccatgcgacatgtcttgaatataaaagtagtgtcttgatccaagtctctctctctctctctctcttccagtgacagataagtacagaggtgagattcatgcattgtccgctcagtgattgaaatcggtgcctcacactgatgtcactggacctgaagtggtgacttccatgttccttccaatgtcagagccctcccccaccctcccatcccccaccccccccacctcgctgatgcacctggcagacacttcttgtcctcagttccctatcagtcttgatcctcaaggcctcagtatttcctatccagttcccagggccgcagagggtgcgtgacttcccatgagaagggaaaattacactgtgtgaactaaatggctcccaggtctaggcctacgtggaaatccctcctgttgaatgctctgagcagaagtttaaccctcctccagccctgccggagagaactccatcttgactgtggatttttattctagtctctcctcccaataatcacatatcctcattttatcttcgatcaatcgatttttttctaagttcataattagttaaaaacttattggcaaagacccagtctccagacgagaacccatccttgtagcataaactttgtaagatgctgttcagcctgggacactctcctaatgcattacatgtatctcctacatatttgatctcaggctgagtcgatggtcccttaaatattttatgtagataaatggctgacataaatatttttggaaaactaagcattgagattgatagattttatcaaattttatctcctgttaaaattcatgggccatgaatctggccaaatgtcaacccatttgattgaatactactgagcagatacacatgatataaatccaggaaatgcatggtgtaaatccagagcaggcgtcacccacattttggacctaaggatcgatcgtccattagttggcagttgcttatttcgtctttgtctcttggcctctttgaagtatatgcttcagaccttaattatagctgtttacaaacctgttttttgttttttttctaagtctatcagcgaggactgggaggtgaaagaagcgtagggatttgcatgtaaatagtaaaaaaaaattattttgtaacaaaaagaatggttttgtttgttgttctcacatcttattgcttaaaaaaaccacattttttcataaaattaataataacttatttcagaagacttggaagaagcatataggcacaaaagtgaaaagaaaatgccattgtaatcccaacaaccagaatagttgatgttagtacggtggaggaggcttttccagtctttttcttttttcaccatatatatgtggaaatatggggtgcaaagaaaaagacctacatttacacacgtgtgctgtgagcactgaaggtccttctgccttttaaggatacgatcatctcaaggaagactttttttttttctgagacattcctaacaggctcatgaagttgaataatgatcactaatcacccctataccaggacatgctaggaagaagagagcctcaaaatatcctaattcatcttcacagagcaagtcggatattgagaatttgctggctgctcaagggattgtgtgtggggctcggaagatggctcagtggctaagagcacagactgctctccctgaggatctcaattcccagcacctacaccagacagctgataatggccagtaaccccggctccaaaaggatcctctgtgggcacttgaatttatgtatacataacgcccccccccacacacacactcacacactctccacaacaaatacataattaaaataatagaaatattttttaaaagagagattgtgtatactagtttcttctgcttcatagtaaccaaaatgcttgacagaaacagctcagtgaaaatatggattttttttaggggggagggggctcattgtttccgttcaaaagcccacttcaagcccacctccttaccccgcgcccccctcgccctcctccacccccactcccacagtgaccctctaggccccatatcctgactcagtgccactagccagggaaaccatactcaaagcatgggtttgggggaaacatttcagattcaaaccttaaccctggggaaggtgagggcgaacagggcggagcctctggagaagcctgacccgtggggagcttcctgtggctggactgtcagctgtgtaatgcaaagtggtttcctgctgtgtgcggtacttactctcacctctcagcccttcaggaggcgtttgctgtaattacacccttgggtccagcgttgctcagcttaaaggaggcatggggtgaagtgcagtggagacagaagaactgagcagacattagggaagatctagaatgttctgtgaacacagagttttgtggtaaactttttccatttaggtaaataaacaaataaccaatcaacagcatatcttcatatcacattacaaccttgcacaccaccatgatatccagtcttacctttccagcactcttgcttggatagtggagctgttagaaacactcaaggcaggatggagagacagctcagtgggtgggtgaggacgagagttcaatcccctccccatttttatttattagttatgattattatctctgtgtatgtgtgagtgcaggcccgtgtatgtcaaggcaagcgtgtggaggtctgaggacatctttgtggagttggttctctctgtctatctgtgtgtgggctctgggaccaaattcagacctcaagcttggctggcaacactggagccatcttattggccccttaattactttttatttttgagatatactctggagatttatttttccctcttttaatgaaagagagttttttctcccataatttatactgattatggctcccctccctctgctcctcccagttcctccccacttcacttcacatctgtttgttgttgctgctgctgctgttattgttttttcctcttattgaaaacagattttgccccttatgtaatatatactgattatggtttcccctcccagttccttcctgcttcccttcccaaccatttccaccctttttctgtttcttattaggaaagaaaaaggctgagagcaggagagatggctaagcggtcaaggatggttaagacccgctaccagaggatctgattcccagccaaccacaggatggttcacaaccatctataatggggtctgatgacctcttctgtcattcaggcatgcatgcaaatagagcactaatatacacataagtaaaccttttttaaaagaaagaaagaaagaaagaaagaaagaaaggaaggaaggaaggaaggaaggaaggaaggaaggaaggaaggaaggaagggaggcaggcaggcagaaaaaaagaaaacaggccatggtagcataaacctttagattcattccagcactcaggagacagagacatgtggatctgtgagttcaaggccagcctggtctacagagtgagttccaggacaaccagagatacacagagaaactgtgtcttgaaaaacaaacaaacaaacaaacaaaaaaccaaacaataaataaacttttaagggatgataataaaataaaatataataaggttaaaaaaaaaaccaaacacttcagaataggacaaagtaaacaagggaaagaacctaagaaaatgtaaaaggaacagagagagacagagacccaactttttaataaatgcaggcatctcataaaagtactaaagtagaagccatgatatatacccaaggacatatagaataaacagagagaaaaaataagtaagtaaaataaaataaaaataaatatgaaaaaatacgataaaagaagaagccctgacatgacagtctgaggaaaggcgcctctgacggatgctgtcaagttcaccttctcttggcatctcctgctgggcacgcagcctgcccttaagagtgctttccttccccagtgagactcccttggagaaaattaaattttcctttgccagtggttctcaactgcagatattctgtgttgggggttgggtgtgtccacggctcctctcagctctaggaccccatctggtgcgaacctgtgaacgccttgtggtgctgcctcagtctgtgttcctgtgtgtatcgatcacatttagaggatcttgttgtcttggtgtcctccatcccctctggctcttaaactctttctgtctcctcttccgaagggttccctgagccctaaggggagggatttgatggagacaaccattttagggctgagtgttttaaggtctctcactctctgtatattatctgactgtggagtctctgtatttgcttctctgatgatgtctgagcaataggcattggtctatgagtatagcagaatatcattttattgctatgttcttttaatagaatgatagtatttggttttaacctaggttcccaggctgtctagtctcaggttcttggacacccaagcagtgctggatatggattctatcttgaggagtggagtttaagtcaaatcagttattggttggttacttccgtaagctttgtgccactattgccctagcttaagctgtaagcagaacaccattgtaggtcaaagggtttgggactgaccgtgttggtgtttgtttctcttgtgagagcttgaagagtactgtattctactgaagacactaaaacataggtggctctttgtaggcaacagctcagcttctttgtgttcagtgagctgtgtagttgttgctttcagcaatagagctgtcaacttatggagagcaatctatcgtctcggtaacatcctgggttgtgtggggatgcccatgggacccctttgtctaacaactccttagatgtaacccattcccagtactgcaagcttcattttgttgggactctgtctctccattatttggaaatttcatttagattgccttcatatatgtctgggtcatcaattgattccattgatcagtgtgtctgtctttgtaccaatactatgctgtttgtattgctataactctatagtacaacttgagcctgggaatgatgatacctccaatagttcttttattatttaagattgttttagctatgctgaattttttgtacttccatatgaagctgaaaattgccctttcaagatctgtaaagaattgtgttggattttggtggggattgcattgaatctgtagattgcttttggtagaacggcaatttctactacgctaatcctactgatccatgagcatgggagagcttttcgtcttctgacatcttcctcaatttctttcttcaatgtcttaaagtctttatcatacaagtctttcacttgcttggttagagttactctaagacattttgtattacttgaggcagttgtgaaaggtgttgtttccctgacttctttctctgtttatcagttaatattataaccagctacttgttttggaaagtgtttatcagctgtagaagtttcttggtagaaattttagggtcacttatgtatactatcatatcatttgcaaaataaaactactttaacttcttttttttttccaatttgtatcccctcaattttcttcagttgtcttattgcttcaactaagacttcaaggactatattgaataggtgtggagaaaatagatagccttgtcttgctcctgactttaatagaattgttttgagtttctctccatctaaattgatgttggctgtgggctttttgtaaactgcctttattatgtagaggaatgtcccttttgtctctaatctcaccaagaaatttattatgcaagggtgttggagcttgtcaaatgccttttctgcatccaaggagataatcacatggtttttgtctttcattttgttatatggtagattgcgtttatcgatttatatatgtcaaaccatccttgtatctctggaatgaagcctgctagatcacggtagatcatatttttgatcgctctgttcttggatttcctttgcaagtatcttacttagaaattttacatcattgtttataaggaaaatgggtctttacttctctttccttgttgggtcattatgtggttttatcggggtaaccgtggcctcataaaacaaaattgcacagtatttcttctgcttctattttgtgggatattttgagaactattggcattaactcttctttgaaagtctggtagaattctgtgctaaaaccatctagccctgcttggtttttttttttgttttgttttgtttttttgtttttttttggttttttttttttttctgtttaggagactttcaatggttttacttcactaagggttataggtctatttaggttgttttttctgatcatgatttaactttggccagtggtatttattgaggaaattgtctatttcttttagattttctggtttggtggagtacaggttttttaaatgtgtccttatgattctctggatttcctcctgttgttatgtttccctttcatttctaattttgttaatatgaatataggtttgtgactcttactgatttttgaaatctttgtttcattgattctttgtatttttgttgttgtttgcttatttctattttattgatgtcagcctcaagtttgattatttcttgccactcactcctttggtatataacttttttctttctctctttctttccttcctcccttcctctttcttcctcccttccccttccttccttccttccttccttccttccttccttccttcctttctttctttctttctttctttctttctttctttctttctttcattctttctttcttgtctgtctgtctgtctgtctttctttctttcctcctctctctctctctccccccnnnnnnnnnnnnnnnnnnnnnnnnnnnnnnnnnnnnnnnnnnnnnnnnnnnnnnnnnnnnnnnnnnnnnnnnnnnnnnnnnnnnnnnnnnnnnnnnnnnnnnnnnnnnnnnnnnnnnnnnnnnnnnnntccctccctcctctctttcttttttcctttagggttttcaggtgtgctgtaaagttactagtatgagatccctccaggtttttttgtttttgtttgtagacagtgctatgaatttgcctcttagaattaccttcattgtatcccataagtttgggtatgctgtatattcatttttgaagggacccacacaccatggggtgttccctctagaccctggattaggcacagatcatatccaaacaccaagaaactgtttactaagcaaggcaaagagacaaggtggctgagtctgaatcaggcagacatagcagcaaatagctttgcaggagtgattttaaaggaaaaaggggaagtctgtgttagagtgagccagggtgagttggtaagtcctgattgggcatgctagtcagggtagccaagtagggatctgtgactgcaaaaccttcatattttgacagttgggtcttggtgatcagctttaagaatgagtcaggctttaggaagtggccaaataagggaacagaactgggtggctagctttaggaatgtggaaatgcctaaataagggaatctaaagattcagcaagggagagggaagaggggagggcaagagctgctggtgtcatgttggccttgcttgggccgattagagccctccaattttcactcaattctagaaagtctttcttcttcctttctgtcttgaccccctgttcagtcaatagtgagctgttaggtttctatgtgtttgtaagctttctgttgtttctgctgctgttgctatccagcttcagtcagacaggatgctgtagcataaggtttttactactccactttatgctcctggtggatcgagcttcctgccactcgccccaccagggaaacacacacacacacacacacacacacacacacacacacacacacacacagagagaagcttatttttaatgtactgtttagctcaatggctgggcacgtctaatcgtctgcctgctaccctgggcccaaacggggaagtgaccagtggccacttacctgaaatctcacatggctggttggctttatttcttggtgagtggcgggtactgaagtttcccactatcagtgtgtgaggctcagtgtatgatttaacctgtagtaatatttcttttacaaattggctgcccttgtgtttggtgcctagatgttcagaattaaaatgtcctcttggtgaattttcctttgacgagcatgtagtgtcctcccctatcccatatgattagttttagtttgaaatcaaatttgtcagatattaaaatggctaccccagcttgtttcttaggtccatttgcttggaacatctctttccattctttttcccagaggtgatgtctatcctggtgttaaagtgtgttcctggatgcagtagaaggatggattctggttttttacatccattctcttggtctgtcttattattggggacttgaggccattggtgttgggggagtggcgggtccacaggtgggaggaaagcaggtttccatcaggatttgctcggtcctctgtggattggggtagagagtgaggagaggccgtaacaggtggtccgttacagagctgaggacgagacttgggggttggatatggagaggagtgcagagctggcactcaccaacctgattagttactgatggcctacttgtttctctcaaggtgtggttgctggtactagggtgtctgctggagttcgggactgggaaaacaggatgagtagggaggaaggttggaggagaaggtctctgtgatggatggagatgggaacagagggggtgtatagcaggtggccacagagctgagggtgagacagggagactggatctggaggaaaaggtgaagatctatagttaacctacttggccagtgagcgatttaatattttttttccctgaggttttgcttatgtctatatggggcatacatattaataagcttatatttgtctcttgtttttcttatttaaatcactgttacattatattttttttattggttatcagaagtgaacttaatcttaagctggactttctataacaagaccgtgtaatttgattttaacatggagggataatttaatatgtagcaatgtaacaacacagttctctgtgttagtctcttctctcacttctgtaacaaaatgcctgcagaagcgacctgaccttcggaggggaggggttatcttggcttactgtataaagggacacagtaaagggaaggtgtggtggcaggtgtctctgtggtgacaggagagtacatcaaagccctcccacaaatcctggaaaaggaagcagagaaaaatactggaagagaggccatgctttaaaacctcaaggtccagcccagtaacccatggtcaccataaggttctacctcccacagcttccctaaacactaagctgggaaccaagtgttcaaatacctgagtcagtgggggacatgccatatttaaacacaacaatattgctctttcttctcctccttttcctcttcctcctcttcctcctcttccttcttctttcttaaagatttatttattgtatgtaattacactgtagctgtcttaagacaatccagaaaagggcatcagatcttgttatggatggttgtgagccaccatgtggtttctgggacttgaactcaggatctctagaagagcagacagtgctctcaacctctgagccatctctccagccccaatattgctcttctttatcaattttttttgttcttatctgttgtttttggtagacttcatattaattatgctaacttgcaaaagggaccctttgagatttgcattaaggtcacattaattttatgggacaatataaaaacactgatgttgggctggagagatggctcagtggttaagataactgactgctcgtccagagnnnnnnnnnnnnnnnnnnnnnnnnnnnnnnnnnnnnnnnnnnnnnnnnnnnnnnnnnnnnnnnnnnnnnnnnnnnnnnnnnnnnnnnnnnnnnnnnnnnncagtgtactcacataaataaaataaataaatcttaagaaaaaattggtgtcctccttcccttcttcctcttctcactctttacaagttgagttttgccatctacaaatatagtatgtcgctcaaggttttttgcactccctaaacaggttcgcaatttttctttgtatcaattttatcacgttttaatgttcactttcagatatcttttgtttgttgcattatttatgttacaagtggaatttattctgcaaattatagctactaagagacagtcaacttttttttttttttgacaacttcgtgttgtgtagaaagcatctaaaacaaacaaaagaacaaaaaaacaaaaaccaaaattaagcaactgcagcttcctggggaatgtccaaagtctagatctcagatcctgtcttaagtggtaagtctcaaagccaggacaaacagcggagatatcattaacatatcaaagcagacctggctgccaggttctcccagcatcccttagtccctacctgttacagcatgtggctggcacatcacacccctatcctaaacttccccagcctaggggctgggctgcccttctcctagctgcccttccctatataatccagccattttgctatgctgggccttttttggcctccaggccctctctgttttctggctctcccctctcctaagccccttctcctcacaccgcccagctcaaggtcatgttcactttagactctccccagatgtccctgcctcaagctatgttcttcctcttaactataataaacctccttcaccaaaccttggagcagtcatgtcctttaaccttttttttcttcctctttttttttttttattcttctagtgctgaaacacacaaacccagccagtactgtgtagaaggctgtgagagatacttatgcatagacaagaagagagacaacctgtcctgacttcctccagtgatggactatgacgtgttctgctgaataaccctttttgcttttcggtcacggtatttcatctcagcaatagaaatcctgactaaggccagttggtgccagcagagtgggttattgctgtgacagacctgacatgctttggggaagattgtggaagttctctggaagtttgggcaagaaaagccattttgggctgacgtgctcttctggtgtgtctgaagacagctacagtgtacttaatcataataataactaaatcttaaaaaacaaaagaagaaaagaaaagaaaagccattgggtgttaagagctgtgaggaatggtctgtaggagcctggaagataagaacgttgagagcagcgcagaagagggagtgaaatttcggagggaagattaaaaactctatgggggtttgggctggagagatggctcagcggttaagagaactgactgttcttccagaggtcctgagttcaattcccagcaaccacatggtggctcacaaccatctgtaatgggatctgatgctctcttctggtgtgtgtctgaagacagctacagtgtactcatataaataaaataaataaatattaaaaaataaataaaactctaccagggccatttgctgttttgatttaagattctgtggttctgatcagctgggattgaagaatcagttatggttaacaacaaaccagagacactgaagggaaacttttaagttactggaacaactgatgctggttagcttgaggtaagaaattagtggtggttaagaagagaccagcatcactgaggtgaaatctgggaagtgttttctgggggtacaaagaagcaaaggttgtacctcatgctgcagctggacttggtactgtgtaagatgcatccaagtggtactgggtttgaaagcttggagggctcatggagaacggcagctgagacttggctctgtgagaggccaggagaggccactggtgaaggtgcagcctcagtgacagttgaagggccaggactgaaggggtcatgcagtgaagttaaggcttggcaccatgaaaagagcctaggagaggctactggtgaaagtaccacctagttgcagcagaagaccccagtgttttggagatgagaaaatgtgagatgactaccaagaacagcagcagaggtggagtggagtcagcttttgcctagaagacaagctgtgcgctacagagtacagagcaggagagataatccaagcccattggagcacgccagaagatcttgagtggatcccagacactggacaattggagtttgattttgatttgatttgattgtgactataccctggtttttcccttttgaaataataataataaaaaagattcagtttattttttattttactacagcccacacttgagagactttaagtttttaaaagatgccaaattttaaaagagattggctatcttggagtgattgaaattttaatgtatttgagttcgtaaagactgtaggatttccaacgttatttatgttcttaatgtgagatcttggagatgagtaagaaaggaatgggttgtggcttaatagtgatgtgtttgtgtgtcaagttgacaaggggtcagttgttctggctggttttgtgcgccaatttgacataagctagagtcatcacagaggaaggagcttcagttgaggaagtgcctccatgagatccagctgtaaggaattctctcagttaatgattgatgggggagggcccattgtgagtggtgccatctctgggctggtagtcctgggctctataagaaaacaggctgagcaaacctggggaagcaagccagtaagtggtacacctccatggcctgtgcatcagctcctgcttctaggttctagtcctgcctgaactcctgtcctgtcttcctccaatgatggactatgaggtgtaagctgaataaacctctccccaacgtgctttttggtcatggtatttgtcacagcaatagaagccctgactaagacatgcaccctcccaaggcggcacttgtctagaatctctcagttctgcccgactagtctgggtctctctgctaaagacacttactgtctctggtgcccttgctctcttgtctgctctgtctttttcttaagctctcctaggcctctctactccctcagggttcctcccacagcatccctaaactggagcccactaggccactaatctctctctcagctccccctgggagcttatggaaattccttcccacagggttccattttttcacactctctctctccatcttagactacaaagcacttggcctcagtacagatcaacggccaaagactggcacagttggtttttcaaattctctcatacggtgacaacctgtgccactgcacaaacagatgatccccaaatctcttctatctagacttgctccactctacactttcaaaggtctcttatctctgagggttttctgcttcccactcttagaaatcttttatctccgagatttctctgcgctctgctctcaaaagaatcttttgagtctatgctctcaactctgcctcaagatttgtaggttcattgggtatagttaaaagtctgtaaaatctgtaacagaaaaattggctagaaatttataacaaaaggcttataattaaaaaatctatacgtgggaaatcttaatttgctataacttactatatatgtgattcaagtcttgatgagaatatactgtatatgtaacttagattcagctcttgtttagaaatagattatttaaacatagatttaccaaaaaatagatgttttaaaataacagtcatgtggctggcagtcatctttactaaggtaaaagagggtacataccatatgacttcactcccatctgaagatggccacatgttagaaagcagctgaggtggcaccttgaagagaacactttctgagagctgcttagtcctactcagcccttggtttatcactgtgtcccctttcggattagggtttttatatgatgataaattcctaaggttttaaaggcacacgcaggtcaccgaaagctaacttaaaactatatggctaactatttacgtctttgttaactctgttcaacctcaggcttctagaaattttaaaataaaaaacaactatatatatgtgtgtatgtgtgtgtataatcaaataataagttatatttgctaagtaaggtttataagctcctaagatctactcaggttcacagtaattatttgtctagcctctttatctttgcttgctttgttgatctttagctatctggataaactgagtcatatgaaaaaaaagcctgatattccgtaatgatcctataaaaggaacaagttcccagtctctctatttttttctggtttaaggttttatgttgatgctaatgaatcttcaattaaatcttcaactaaaacctttaagtctcaaacttaacccaggtacagctgtaaaatcctaatcttataaaaggcactaacttgtaaatcgttatgtaatttacttactgacaagctttgtttagccccgtgtatgtgttttcaaggtcaagcctaaagcaagtaactgccaactcaggtatatttaatagatggtactcaaagtcttaagacatctgctggttatgacattttttgagtttagtaaaaaaagtttccatgataggcacagcagattctggaaggaaccctaaggtctccatagaagacagatggggcaggatgcctgaatgatggtaacactaaccactggggaaaaccactgctccacccctcacctgcctccagggctctgcacaaactatgagcacttttgggtttattgtcctactctgcctggtcaaagccagtcacccaagttcctcattcacggggaaatctctcagacctgggtctggcagccaacggcggctgctgccccatgtggtggctggagactgaccactgtccctaatgaagccatggagaccacaggagcctaggacaaccggctaggtagtgggtaagtctctgttattttgattgatagatatgccatgatacacatgatatctccggctatgatgtatccttctaggctctctgatgatattggctgactaactgtcgctttaacagcagcaagctcctccctaaaggcgacagctgccttctcttcctaggtaaaaatcaggcctcaggctttgctttcctagagctacttactgagaaagacagcttaccttgcccagacttggaaaggagatcaactcctagaggcttttaaccctgaatcattttgggttcccaaacttttactatgactcaaaggcataataagtcaactgctctttctacaatgtggatttcagtacggattacaaacagtggtaatgctaacatatctaaaactttttaatctccgtaaagttaaaaaaattttttttcatgtaaacatcagggagttaactcgcatctgcttctctaagaggtccaagggactccagataagcactcacaagtatcccaccttcctcttcctgagggtggggatgagatctctctcctggtcttggggctccccttccccagatatcaggactgtttatctactgtacatctacctggaagtttcaaatgtacacccaagataaaaaatttttcctttaaccccttaactttacactctgtccctagtctctgtcccagcagatttcaaatcaactgtactcttcagcagttccccagccccaggtatttaatttcctcagaatctgcaacccacacagctccagagtggctagcttcaggcagtccagcctcagcttcaacttggcctgcacttccctagcttccgatgatcccacacagcctggtcagcaggccaaacagcttgcattctccaacccccagacatccccaccccctccctgcaccttggctagaagtccagccttcttggctcctcaacaacagccagcaggccccagcagacagcaggaagttgtcggagaaaagattgttaccctttgtcatttcttatcaacaaaaagactgggatgttaggtctcaaacctgggacaaactgccagctgatatgtctatttaatatatcaaagtgtctctagctgccaggttctcccagaatccctcagtccctacctattataggttatggctggtgtaacccaccctaccctaaacttctccagcctaggggctaggctgccattccctatgtaatccagccactttggctttgtgggttctttgtgtgccctcctggccttttggtctcctagtctcctagctccacccccttatcctcacatagcccagccagagtcatgtttattctggactctcccagatgtttctgactctgcctattctctcactcttatgcacaataaactttctcctacttcatcgtacctaggagcagtcatgtccttccttctgtccttctttccttccttccttcctttctctctttctattccaattcattaatcaaatgtatggatggagctttttgttcaagaatggtgtagccttgtatggtctgacaggacctgatgagggctggatgactgttgtattttaagtgtttgcaagtggagtgagggatagagaacgggcatgtgggaggaatgggaagaggccagtgagagggatcagggggtaagcacatttgtggccaagcctgaggagccgaacttgattttcaggacctacatggtaggaggagagaaccctatgaattgtcttctagcttccacatgtgtgctgtggtgtgtgcatccaaataaacagataaataaataaatgcagtgcaactttgtttaaagagaggagtgtcaagcgtaggtatagaaggacaaagggagaggctgccatgcatggtgcgctgacatttaagaagagctgtggggagcgagaaagtccctgtgctgagaaatggaagctacatttatgaccgggggcttccgactgggtattgctgcctacgtctgagataagtgtatttctttattttcccagtcgttctggggactagtctagtctgctctgtacagcaggcctcccttatcagtggttccccctctcgccacccccacccccgtgatgatttaagttatctaaggtcaaatgtccaatggaaaattccgttgaaataaatagctctcaggctttgaattgcatgctgctttgggaatcgtgatgaaatctcatgccgccttgcttcatccttcccaggtagacttccctcgttgtccggggtatccatgcagtatgcactaccttcccatcggccacttagccatcttgtttataaggtcaactgaaggtctcacagtgcttgtgtttaacttcgtcttactgagcagtggtcccgaagcacatgagcagtgatgctggcaattcggacaccacaaagtgcagcatcacagggcatcctttatgagagagggtgaggatacaacgaggtattttcgaggggccacattcacagaatctatgtgataatatattaatcgttatatttcattattaactgctaacctcttactgggcctaatttagaaattaaatgtaatcacaggtatgtacagtatgatctctggcctcggacttctatctcctgggggcgggggcagttttagaacacagcccatgggtagaagagcaaagccctctgggaaattgctgctttggtgagtgaagttacaggtccagcatcccctcacctcagagaaagaataaaattgttatgagaagccattgaagcataaaggctgagaattcagcgacagaagtcatagctaaaaataagcagaggaaatataaaagtccccagagaaaaagactcagtgaggaggaccctgagtgtgctactccggttggggtggggattgggtaggcgttctgagttatagagaacaataatcaaagaaggatgactgacagagctaggcattgaagatagtggggggtgggagtggagcttgggggtgtgtggagggggggtgccataccctcgcagtcaggaggctgaggcaggacagttgggagttcaaagctagcctgagctatatagtgacatcctgtcgcaaaaaagctaagaaaacaaacaaccccttcccaacctaaaaacaacaacaaaaaataataaaaacaaccaagaaaacaaaccagaaggctgagtagctcaaaggcgaaattctaggttgtaactgtatgctttattttctggttgttgttaaggaacagggtataaaaacaggccgtggctggttcatatatggccacagatagtcgacctacagcctttgcagcaagcaacggaagagtcaaaccagctttgctgcattaatgggcacaagaaagccaggactcagctaaaaatagcatttctccaaggtttggcctcggtttctaagacaggaccgaccagggaaagtgaaatatggtcctggagacagtcccctaggtacttccggttagcccgcctccagcttcccagaccagcaattttatcagtcttagttcttgttgctctgaccaagggctgctctatgtgatttatacgtgatatccatttatttctcaacgttccatagaggggaagcctgggggccgagtgtggcaccgctgtgttccaatgaggacagtggaagagtcccccacccccaacggccctctcccctgcaaccccccagcttctaagaaaggtactagctccatttatgatggctctatcaccagggtctgattgcttcctataggctcaactttcaaacactgtaagattaaggttttaacatacaaagttgaggacagctgggttgggggagatggacaaacatttagtccctgacagagagcgcagaaacactcccacaaactatgaagcttccctagtctcttcctgccgcagaatcttccaaatgcaattgatgactcctctccctgctagtagcaagcccagagtagatggtcatgtggtttgaataggaatggccctcatagattcctgggtatgaatgtgtgatccatagagaggggcagtattaggaggtgtggccttgtaggggtgggtgtggctttgctggagaaaatgtgtcaccatggggggcggggggaggcttgaggtctcatatatcctcctgctgctggctgcagatcaagaactctaggctgctccagcaccatatctgcctgcgggtcactttgcttgcaccacgatgataaggaccgaacttttgaaactgtaagccagccccaattaaatcttttcctttataagagttggcttggtcatggtgtctcatcacagcaatagaaaccctaagacagatggtttctggttatctgggtaatctttgtttatttttacagtatctttggcttttaaggcagacaggtatgttaactatagttaaggcattctttcagaaagctgtgcatttattgtgtttctgacatgatgactgtacatctatatttttggtagcagcacatatcaaatgaccacaaccatacgatatgcagatggcaatagcaaccattttgatcttactagtaactttactgggaaattctctaaaactacctcccttgaaatgcaatgtcacctattggtttgaagtagatattcctctcctattaaataagtgtattttcatctccagattattttttttccttttttatttgcaaaaaaataagttttaagtgtctattgagttaatctttttattcgtatgggtaatatcatattaatagaaattctaatttgggtccttacttgtattcttataaaaataaacctccttgatcatggtacattattctttttatcacactgctgcatttaattggctaatattttattcaggatttttgcatctatattcataagtcaggttggtctgtaattttctctctctggtgctattttagttccatttatgactgggaaatctattctgtctgctattaatattataggctctccttttcgctagttttaacaactggctgtgtgtttgaagtgcacacacacacttcagtcacgttaggagctctaccctgaccatcatcccccgaggatccagctgtctggcaatgttgttccggtctgtctgtccaaagccaattagtttttcaaagcctttgcattcttctaacccaattttgattacttatattcttccatacctctgtcattttatcaagattttcaagtacactgacataaaaatttacatggaaatattaaaaaagattaacccgtctacccttgtgtgcttatgagccgtggttccaatctgtggccaagtagtggtccttgctagcttggtttgtccctgttttcatctctccctttctataggtgtaggtttctcacattatttatcctgtgtttgtgagcatgggtgcacacacttgtgtggaggtcagaggacactttgagggagtcagatttctatttctatcatgtgggtcctgaggtgagagctcaggtcataagactgggcagcagatagctttactttcataggtatcttgcagacttggtatacggactttaaaaaattcaatgtgcagcttggattttcctatgagataagaatttgattttggtagtgtatttggtttgggcagaaggatactggaggggagcagggaggtgctatggaggtgggaaggcagctaataccatgggctctaggatcctgggagtatctgaggcatggatgcatgccttagtcgggggagtctcccacaggggatgacagtgaagttatttatacacactccctagggtcattggttgagcgtaactgagtggaaggcggagtgggtggcatgtgagggagttaattcctgtcttaggtggaggcagaagggcctcccacagcctcgggaaagctgttgtctaaggaatgcggctcctgacactagaattcttctgcaaggcaaactagtgatgctctgtgcacatgggaggggcgggacacctgtcgttacatcatctggggctcaggtgtcattttttttttatagctttcaactagttttgtcttgctaatataatcttctgtttaagattcatttaattaagctgggggtggtggcacatgcctttcatcccagtactcaggaggcagaagcagacagagatctttgtgagttcgagggtaacctggtctacaaagtgagttccaagagtatacacagaaaccttgtctcaaaaaatttcatttaattaattaatttatttttgtgatactaaggattgaacccaagtaggctgagtaaatgctttaccgttaagctgtacctacagcccttgtctttgtctttttattttgagatgggatctcatcaagttgcccaggctggccttgaagttacagtccttctgccctaacttccccagtatctgggatcacgggcctggattatcaggtcttgcaggaaagggcttgtttgtcttacatgtcaggatcacagtccatccttgagaaaaccaaggggaaacccaagcaggtcaagatcctgggggcaggaaactaaactagaggacatggaaaagagctatgtatggcttgctccccatgggttactcaacctcccacccctaccccnnnnnnnnnnnnnnnnnnnncatagactcaaaagattcttttgagagcagagcgcagagaaatctcggagataaaagatttctaagagtgggaagcagaaaaccctcagagataagagacctttgaaagtgtagagtggagcaagtctagatagaagagatttggggatcatctgtttgtgcagtggcacaggttgtccacccctcccctcccccagtcttgcccttcccccttctttctccccttcccttctctctttccccctaatttcttgtccctcctccttgaaccctaccctcttctttcttctaatccccccttccttccttgttttttctgctctattccaggggggccttgatctcagtgtttctgcttcaacctcttatgtgctagaattataagtgtgcactgcaatgtctcaggttaatacagttaaaattttaaaagtgctgtcatatgtaaaattagtatgatgtgtgtatgttcaaatacgcgcaagtgtgtatgtgtcagtgcaattggaggctagagatcagctttggtattttcctttagaaactactttttttaacctgctttcttaatagcacccagaacacctgcccaggggtggcaccacccactgtgggctgggtccacccacatcaatcatttatcaaggcaatccccccacatacttgcctataggccatgtgatagtcattttcccaattgaggttccctttcccaaattgtatcaagctaacaaaagaactagcatctatctctatctatctatctatctatctatctatctatccatccatccatccatccatctatctatctatctatctatctatctatcatctatctttgggtatatgtgtgatataagcatgcatgcaatgtgtgtgctcatttacccatgtgggtgtatgtggaggacataggttggcatccaatgtctgcctcaatcacttctctattgttttgagactgtctcttgctgaaccttaaccctctttcagctccagggatctgcctatctcagtgcccagtgctggggtttgcagaatagtgtatccacacctgacttccttacaaagtgctgggactccaaactcaggccctcatgcttgttcagcaagccatttactcactgagctgtctcccatgtcctccgttttgaggcagcatctctcactaagctgggcactcactagtttgtttagactggcaggtcagcaagtgctaggggtcttgctgtcttagtcttctttagcactggtattataggtgtaagctgtcgcacctggctttttcccatgggtgctgcgggtctgaactcagtcttcatgtttctacagcaagcatttactgactgagttatcttctcagaccctctttttaacttcttgagttgtattcatatcttttcagtctttctctttagttaatgcagtaaaaatggttcaggtggctgaggccaagttattgagatactagttatacaagtgcttaaagcacagtgtctgaaacaaagtgttcaataaatgctaatgatggttttgattaaacactttcttttctttcaaatatatatacatatatcatctatctatctatctatctatctatctatctatctatctatctatctttgagactggatttctctgtgtagccctggttgtcctggaacttactcagtagaccaggctggcctcaaactcacagagatctgcctgtgtctgcctcctgagtgctggcattaaagttgtttgccaccatcacccagtattgactgaacactttcaagttgctcacattatcagaagctaagtttaaatgcaataaactaattaatttgaaagaggatagctcaggatggtatagtactcaggatgtagcatggattagtgcagactgcttttagccaagtttatggtgaggatcaggaacaaaatacaaagcagaaggattggaaaagtgaagtagtctggcctgaaaaggagcaagctgaaaaccgtggacaagtaaggtatgtctgtgcaggagattagtgtcactaaagagaagtcctttcaaagggatgttagacatggcctgaagccattctaagtgatgagatgggctgagggtattgctactattgtgttactgacagaagtaacttgtggaaggaaggagggatgggtttattttacctagcagtctacactacagtccatcttggttggggagtcaaggcagcaggagcttgaagtattttgacatcacatctactagaataaggaagtgtaggaagttttgaatgttagtacctgcagctagctttcttaattttatacaatccatgatcttcacatagggagtggtcctgcccacagttaagatgggtcttcccaaacatattagctaaatctaggtacttgctcacagacattcttataggctcaccttagtgtagatctctccaaggtatgaccaaagtgccatctcttaggtgatttcagatcctgacaagatgcctgcccatgctggccatcacactagggacagaatgttgtcgtttgaaatggtgtgcttgggtgtcaggcaaaaggtaagcacacactaaaaagactgagcctcagattctggggaaggaatcggtgcattttctattgtatgttagatagttttatcatattaggtggaattatgaccttgttagtatgtttggagattaagcaggacataatgagatgtttttaggcatctgtttgacaaaggaatagaattatgatggctatggctggatgagaaatgtctaggatgtgcttcttggagggcatttatagagactgacatataggatagcaaatgttctggatagcttttacttgatacaacctagtcacctgggaagagggaaactcaactgaagaattgcctcaatcagattgatttatggccatgtctgtgaaagattgtcttgattaatgattgatgatggagggccctgcccactgtgggaggcaccacaccctaagcaggtgggtctgcattgtttaggaaagctagctgatcatgagccaatgagtgagtgagtgagtgagtacggatcattcctccatggcttctgcttgagttcttgccctgatttttctcagtagtgggctatggagacatgaaaatgcaaactgaaataaacccattcctccccaaagtgtttatcacgtcaacagacaacaaactagaatagcaactgagggggatccaccaagaatgtaagtgctaccaccctgcagactaagggcccagacggaatgacaggtgacaaaggagaaagcagaccagtgacaaaaagtggaccccttctctctgcttcttggacttttttttctctttgatgtaccatgcctataaatgggctaacacctctgagaccatgaacaaaatggttccttccatatttcggttgtctctgttagcatttacgcagcaatagaaagcagttaacacgtgcaccaaccgtgcaccagccccagctttctctttctttctcttttaatcgttgcctctgaacaatgtatagttggatcccatataagaattttagtcatttaacagagacatatatagctatttgtataatatacattgtcacagctatggactttctggtggaattatctggatctgttaatgagatgcagttttttttttaaaggtagttttttgcctcctgtccctaagtatatttcaattgtgtctatagtttttctaaggaggtgactctcagtagaggcccctggattgactcaggatgggcactagacatcagagaccaagccttgcaactttcagtcctacccccgtggctatggccattgattgcattaattaaacctgctgacaggtcggtctcttaaaagcccctaaacaatgggcgcaagagcttcttggatggcaagcacattcgtgtgcaggatggtggcatgtcccaattctatgggggacagaaaccactgtgctcaggaccctcctgaaccttccactatgaacccttcctgttagctgttcatttgagtccttcattatagattgggaactaggaacaaggtaacttcttcagtaccaggtgttgtactagcaaaccactgagtctaaatgtagacaatctggcaaaccaaattcctgtgatgagtccctgaagggaactgagccctgtggaagtcagtctgcaactccaggtagtctgtcagaactgagttacgaaagctcctgctgagacagggaagctggagaagagtatggaaaactcttctacttagaaaatgcgacaacctgcttttggtatatgtatttgctaatacttaatacttatttgctatgtagagggagggaccggcccagactagttccaacccattctcattgatacagtgcgtaggactcaagtgagtcaccttactaggagcacagccctttgtgggtgctgcagttgtcttttgtttgtgattcttactcccgccctgggccttttctcctgatttctcatgaagccttctgtggctgccatgcccaaacagattccacctggacccttcccggattgcctcctggccagcctttgccgctggaggctttgtttctttaactagggatgtctgagctttttggctttcaaggctgagggacgatagaagccacacctattaagaggagaaagttttaagatcgatcagaggtgatagccgtcatgacactttcttcagtctggaaaccatctagtgctatggctgaagcttttgacatgtgactggcattctgctttggccattggctaaaatgtaattttcaaaaaacgtaaaaatatgcaataagaaactagatcacatcaaaattcagctctttattcaattaagtccttaatgcaggaacctgttagaactggtttaaggaacatctgaaaaattaaacatattacatatagctattcaccctaatatagaaatgttgatgtaagcctggcatggtggtgtatatctgtcatttcagtagttaggacatagaggtaagagaactgcaagtctgaggccagcctcagtctcatagtgatcatgaggccaacctgggctgcacagtgagagcctgtcccaaaggaccaagggaaaggtgtggttctttgttttgactttgcttaataagaagacagcatttaaaaagctgttctgtagcatgctaagtagcttagtccatagaaggtagaccctcactttatatcacttatgacacatttatactgatttcatatattaccaattgttatttttgagtgtgtgagctgaaaatgcgggattatcgccagtacctttattgccatcttttacagagatggaagaaagtcctcagatgtggtacagcttccctctgagagcttgctttgcttttctttaatcaatggactattggcaggttccatccactctttgataaactaagcctcttaaagtaaaaacaaagagacactcctccaatacttatcccaattgtctcattaatttaaaagtgcaaacacaagagctcaaattagtgaagggccgcatgatattcttgtccaacttatctattttagcagtagcatgctgtaactacatagggcattccttgctcttccgttaagtgcgagctgtagagtgtggtgtgaaggagacaccagctttcctcttcataaatgccaattttcttgtgtgatagcttgatacaatgaatgtgagtctaatgtttcaaaacacatgtaattttgaactgaatggtccctgagagaagctgcttgcttccgctggtgctatatgctctaatctagaagaaaaagcccgtctgtgttgggcatccatgccagctttcctgagggtttcatggatagtttaaacattacgtttaatttgcctccggggcaaattaaagcttttagagattgcattcattttctgttgctgtgtaacaaacttgccacatgtccagcagcttaaaagggagcgcatactggctcccagttcctaccagtgccttggcttggcctattagtactctgtacagggctcctgaggtgcctgtcaggattataactgggatttgtttccttgcctctggaggctctgctgcagagtattttctgcccatctcttggagtttgttgaccaaattcattttcttgagagtgcatggtcttatagtgtggcttggtgccagctggaggcaggtcccaggttccagatgctattccctagctctttaaggttaaggtctctctgacctcagggagggcctgattcttcttttatagggtttcatctgacccatcagacccatctcagatcatcttcccttttgtgaatgcaaactcaactgtttagagactttaattccatatattaagtccccttcgttacattctgtgctttagacttaggtcgcaggcgcttttcccacttaaggcgaaggaaggttctagaatctctgccacagagaggaagccctcagagtagtacttacccataggaaagcagagaccacacatgcatgctaacagaatgtgtttaatatgcgaaattagttattgaatccagggggtgggggcacttaacttttagtggctggggagcaagggtgtaaaggcagagttattatgccctacaatagaggtaaaaggtccttacccacttagctaagtccctcttcctcactagttctgtggaaggaggagcctggcagagctcagatctctacacatatgtgtcacctgcctgtcgtagacactccagaaggtgacgtgagattccccttgggagcgctgatatgagcttcagaccaggtagcttcagcctcctggtagaatgaccaggaacagccagcccgtggagcagccagcccgtggagcagccagcccgtggagcagccagcccgtggagcagccagcccgtggagcagccagcctggagaaagggcagttcttcctgccgccttcttgtttctctctagcatctatccctcttggcagaaattgaccatgaagaagctaccagtggagaaacatgctgtgctgactcctggacccgcccgtcccgagctagggagctatcctaatgaccagcccgtcacaactgctttccctaagactgctgaaacatggctcaggaccaagccctggctctgatcatctactctgatggagagttgggattttaccaactttgtctgagttctgcttgagttctcaactatcaagtgagaaattctgtaattagacactggtagtaaagactatcagtttataaagccaggtgtggtagcacatacctttaaccccagcattcaggaggcagaggcaggcagatctctgagttaagaggccaacctgatctacagagtacattccaggacagcgagtggtacacagagaaactctgtcttgaaaaaaacaaacaacacaccacaccacaacacaacacaacacaaaaaacctagataaataaataaatcagcttgtttactaaaaagtctctggtgtcaagtgtacctctgatcagactttgccagcatcctgtaactgtggcttcttgggccaaggcctacagacttaaggaggaggagaatgtatttttcaggtggccaccaggcttcaaggagaggcaaggcaacacctgaatgaagcctaccatgagggaacctggtgcagaggagctgaggacgcctggagggtttccccggtggaggtgaacaatgaggactgtgtttcctcagactgggaacctgagatctggctctttttatagctggagcttagatggcaaagtgcttctgtgatatgcccagagcccaggttcaatccatgcaccccataaacgggatgtggcagagcacacctgtaattccagaacttggggagtgagggcaggaggatcagaaggtcaaggccagcctttgctgcaagtttgggacgatccagggatgcatgagatcttgtctcaagaaggaagaaagaaagtaaagcattcaggagcacattatcaatggtaaaaggaaatagatgaaatcaataatatattctatgaaatccactctgccgaatccatttcagcacacagtaaatgttaaaatgatagagctacttcacaggcttctttggtcttcgctaagtgcactagttgggggttctccagagaacagaatcaatatgatatgtatgaaatgatgagggcatttataaactagctttaatttttaaaaattaaaacataattacatcattttctctttcctccctccagccctcttccgtgcactaccttgccctttctcagatctgtggcctccatttctgtatcggttattacagacatacatattgctgttacatacatacgtatgtgataacaattaaagaatatattcctagtatatatttctaaatatagacatgcatcctgctcagtccttacaatgtatttcagtgctgatctttgcattggctgaccaaccaggggctcttcccttgggagacctatttctcccactctcagcattctggagttgtctgtagtccccccccccttttttttgtagggttaaagtcctatgagacccttcccttttcacctacatatgcccattggcgtccttgttcaggtcttgtttaggcagccattttgttgagacttcacgtgtgtagcttctctaacagttccacgagacacaatccacagcaagcttcctgttcccccggctcttaaaaaatctttgatcagctttcctgctcagaggttgaatggccccacaaagtccatctgcaggccggaaagccagatgagctaatagctgttcagcccaagaagctagaatcctcagaagaaagggacccgcgaggcagctccagtctaagactggaggcctggggaacttcttagttagtgatgtaagtttacattcagtggcagtggcgcccaagtcatcatgagaaaaacctgctcaaaagttgagaactttggggctggtgagatggctcagtgggtaagagcacccgactgctcttctgaaggtcaggagttcaaattccagcaaccacatggtggcttacaaccatccataatgagatctgactccctcttctggagtgtctgaggacagctacagtgtacttaaatgtaaataaatctttaaaaaaaaaaagttgagaactttggggccgtgactgctagctctgtgaatttgacaggatttagaattaccatcaaaacaaacctctaggactgtgcatgagccaaagggaactcctgtgagttgctttttttttttttttctttctttctgtttttgtttgtttgtttgtttgaagacagggtttctctgtgtagccctggctgtcctgcaactcactctgtagaccaggttggcctcaaactcagaaatccccttgcttctgctttctaagtgctgggattaaaggcatgtgccaccactgcctagcttgtgagttgctttttgcagacatttcatcaatgatgagaaaagagaaaaattcttcctccttccactttttgtttcatccagcccctctcagcctagtagatggtgccacccacattcaaagagaacattagtctcttgattctctgaccctcagatcagtcttctctggaaataccctcattcgcacatcccaaagtatgtcaaattgataactaagattaaccactataataaacatttaaaaatttgtgtttattttatatttacaacacaccttgagtcagaaaagccacatttcaagtaattaatagtcacctgtggcttgtagtcaccacactggaaactcaacttgaatagagctggagatgtagctcacttagtagagtgctttctagcacataccatgccctgagttcaatctccagaatttaaagggggtggagtgggagtaactatgatagtcagcatttattgggtgtaccaagtaattttgttttcacaggaacactgcaaggcagctgctatctcctaaagaatacaagggtatttcatggtctgccattgtgcttccccatgtttaagaagcatctttcatccctgggtgcttccctctgtgtgagcctgccatgtttgcctcttccagcgctcctacgattacatccgtcttgtgcgggaaatccaggataatctccccacctcaagatctttggtttagttacatctgcaaagtcttttcttaccctttaatataacattgacgcattctgggaattaggatgtagacatctttggggaccattattcaacttatgtagaagtgactttttcacgattatatatggaaagctgttagctgagtctgcagttttcctgcttccgcatccagattcagtgaactcagctcacctcgctcctctgggggacggttgccttcatcccggcccatcaggagcactgctggttgttaacagaggcacagtcttttatctccttgtcccttgtctccttgtcctgctctcttcccatcccaggtctcttactgccatgtgtgcttcttcagggaactgaatgccaccctttcccttcagacttagagactctcaagaagccttttgttgttgccctttgcttttaatttgggtgagaacatggaggtgaatggctacaaccattgaccagaagagggatctatgacctcatagagaggccagcatgctatacttgccctgtttttcagatccactatgctctccagtgtcctggccaacaatgaccttcaacccaagcttgctcacgtcagagtctgctacaggagacttgagagcttcagtttagcatagaggccccccgcacgcccagtatgagctagtcaagtcaatttattcctaataaacatctctcaagttagctcattgaagtcttctaattgttaataatagaaatgagagctggagagatggctcagcggttaagagccctgactgcactggaggtcctgagatcaaatcccagcaaccacatggtggctcaagaccatctgtaatgagattggatgacctcttctggtgtgtctgaagacaactacagtgtacttacatataataaatacataaatcttttaaaaaaataatagaaataaacttggattaacttaacaacaacaacaaaaaaaatagtgctgatagaacctttcctttgaagacccagtttttgcttttcatgataccttaagggtcccttctttgggaaaggggactttctttgttcccttcagcctctgaggcatgttggttgtgaggttcaagaccagtcttcttcaaacacctaccagtcccatgtgtccatacaagtccatccaaagattgaagaatcacaaatccttgatgggaccaggcaaacggaggctgggcatgaggtgaagtgctgccagagaagcttggcagggcacacatggctaagaaagtgttgggatataagctagaaactttactgtgatgtcatacagacacgtatgcgtgcactaaataacacatggaggtacacttaccgtcccacaaactttgaacatctactatgtatgtgtactgtactaaagttaagaatacagaaatgatttgtactctaatggttttcctaagagaaagaattgttggtaagtttggggcaaaaatgtgttaggtgttagtgttgagtacacaaatagaacaatgggatacggttttgtttgggtggctgtgtccttgggtggcagtgtctgcttgtaccttagaatgtgaatacaaatgtatgtagggtctcttaagggcactttagatagataggtcattagagttagtcctaatctaatatgatgtgtctttttaagaagagggaattggaagactttaggggttactaggacagaggaaaggccaggtgagctccttggaagaagatggcccgttacaatgcaagaagcaagggctcaaagggaaccaacctggaagcacctgcaacctctggaactatgagggaaaaatgtggtccaggatcctaatccctgctatttgttaggaagctgtactgactggttttgtgtgtcaacttgacccaagctggagttatcacagagaaaaaaaatcctcccttaaggaaatgcctccatgagatccagctgtggggcattttcttaattagtgatcaaggtgggagggcctagcctattgtgggtggtgccatccctgggctggtagtcgggttctataagagagcaggctgagcaaagccagggggagcaagccagtaagtaacatccttccatggcctctgaatcagctcctgcttcctgacctgcttgagttccagtcctgacttcctttggtgatgaacagcagtgtggaaagtgtaagctgaataaaccctttcctccccaacttgcttcttggtcatgatgtttgtgcaggaatagaaaccctgactaagacaaaggctgtggtgtgctcaagaatgaagagtgtgtgtgtgtgtgtgtgtgtgtagaaaggctggggaatggggaaggatgttccatgaagggatctttagccaaaagccttgatataaaatagcacttgggcttactcgagtacagaacatcacgtgactaacagaagtgggtagggatcggagccgggagagcagacagctgggcacaggctgaacccaaagagacttgtgttctttaactgtatcttgtaaatgtcccagtatcttgaaagcagaatgcaacaagatcagatttgaattttagaaggtctctgggtggtgtggagaagggattaaggaaggaggctggggcagcctgatcagtcaaaagaagcagagaggataacagaattagccctgcgggagtttctctggaggaagtgctgcccctatgaggctggcatggggctgtgcaaagagaggcttcagctatcagtgtagataagacacctatagagagactgggtagggaaagagggctgacaggaggagtgggttgagaaagcctaagctggctcagggtaggggtgtccccgaacagaaactgtgtcctggagaaattcctggtcacacagaaaatagtattgcttttcttttcttttcttttcttttcttttcttttcttttcttttcttttcttttcttttcttttcttttcttttcttgatattttctttacttacatttcaaattctttccccacagaagcccccctattctatcccctctccccctgctcactaacccacccactcccactcccctgtcctgggattccccctatactgactggggcatcacccccttcagctccatgggtactttttctagctccttctttggggaccctgtgttcagtccaatggatggctgtgagaatccacttctgtatttgtcaggcactggcagagcctctcaggagacagctatatcagactcctgtcagaaaacagtatttcttgagtactcagctgtgctcaataattgactagaaacatctgggagcactctgagtaagcctcagacccgtccagcgactggaggccgttcatccagctgagcgctacgggagactagagagcttcagtttagtgcagagggccccagcagctccagcacgagcgacagcggtaactggagaatagggcggtgggaaaaaggtttccttcacctgcagtccgtgtttccggaggaccccgttcggacccatacggaagctgtcatctgctcgccccttctatgggcttcagctgcgtctcctgttcatatgattgtggcccgcttccctttttcagtcaggccaggatttcctctttcattcttttttggaacaccgcagccttagtagaattcaggcttccataacaaatagcttggggttgggaggaggggtgggtgggttgaacaggttaacctcctcatagttctaaagaccggaagtctgagagttgaggggtcagcagggttggcatcttctcagctcgctctctctctctctctctctctctctctctctctctctctctctctctctctctttctctgtctgtctctgactcacagatggccatcttctcccagtgtgctcatctggtctttgcatgcatatccctggggctagatgtcctttatgtagaaggacatccataacagattatgtcctatttaatgaccttatatctgattaatgatttctttactggccctgtatctaaatagttactctttgaggcgctgaaggtcaggatatcagcatatggtcttggaggggaccacagatcagccatagaagtgatcagtcttctttgggctgagagaatagtgtcaatctgccaggctctttccattcagcttcttagtccctaggactttcctgctgtccagattctggtttttgtttgatgatggtgatggtggcggtggtggtggtgatgatggtatgtgtatgccatggcatacctgtgaaagtcagaagacaactttgtgtgtggagttagttctttttttcacctttacatgggttacagtgatcaaatttactcttttctccttcctggggggggggggtggtcagctatctatcatctttcattgcctgcttaccagttctgggactagtttataagaaactttctttcaaacttactactttcaactttctccttcagtacactatgtggaatgctgatttttatttttggacacgttgtcactctgtatatgtagttcaggatagtcttgtgatccttctgcctctgcctctgcctctgcctctgcctctgcctctgcctctgcctctgcctctgcctctgcctctgcctctgcctctgcctctgcctctgcctctgcctctgccttcaagtgttacaggtttataccacaacactcagtttatccattgcttgaggtcaaactcggggcttcagatatactagacaagtaccctgagctactctgagctatatcccaaccctctcctctgtcctcctatcatctgtgtgtgttccttattttatatgcatatacaaaagatgtagatttgttcttaaatgttttcatatcaaatgggtagtttataacttgttccctttgagacaagttctttcctttcaatttctggtgtacacagatctgctatgttgagtagttcctgattgcagataggtgcagatagggttgcagataggtgttggagttagtatcattctcgagaagataattacacactaagcctgaaagacagcatggttgttgtggcagggtagcagaccagatgggcagcctagtgtctcaggcttgggagcgttcaagcaagcactaaggagtaagggttcttctatattaacagtctcccagtctggcctcgtggaagagtcaggaccacttcatgacactttggctgtacagagagcctgctgtccctgtgctgaaggggctttagttatagtttgtctccttcctcagctatgctgtctgctttcatttctttctggattcctagcagatgtttaaaggtttctacgagagcttggctatgtacaaagtagagctctcctctgaaaccactatgctagccaggtctgtgacccctggcctgttcagtgatatctggggtagctggaccataaaactcaggatctggccagttttgcaagtatcaacacaaaacgggcttcttcagaagaggtacatggatttggcaggctctgaggatattatgaatatctcttggtccatctgtaattcagcatggttttaagaggctcagtcagtttgctgggatagctataaaaatataccatagacataggggcttaagaaccacccgatggaaggctgaggatgaagctcaactgatagagtgtttactatctcatatgaaagtctgagtttgattcctagcactgtgtaaaacaagagtggttcatgcctgtaatcccaacacttgggagatggaggcaggaagatcagatgtcaaaggtaatctctggctatgtaggaaggttcaagctagccagggctatataagaagaggaggaagaagaagaagaagagaggaagaggagtcaggggaggaggaggaggagaaggaggaggaagaagaggaagagaagaactgggattttattttcaagcagttctgggtaggtcctagaagtctgaaatcaagatgttatcaagtctatttcttctgaggccagctgcagctgaagtaccatcttctccctgggattcacatggtcttctgttgtgtctctatccaagtgtcctccttatgagaatatgagtcccagattggattagggcctgtcatagttagggttatggcaattgtgatgaaacaccatgatcaaaagtaagttgggggaagaaacagtttgtcttactcttccatatcacattccatcactgaagaaagtcagggcagaaattccaacagggtaggagtctggagacaggagctgatacagaggccatgggcagtactggtcacttgctcactcccatggatctctcagccggctttcttatcgaacccaggatcaccagaatcagcttggattttcccaatcaatcatcaatttaaaaaataccctataggtttgcttgtagtcccatatgatggaggtattttcttaattgaggccccttcctctctgatgactctagcttgtgtcaagttgacataaaactagccatctcagagctcattctaatctcatttttattattacctctttaaagacaccaatatgaaataccaggggccagagcttcaaaaatgtgaatttctggaacccataaaaggaggcaatgaatacacttgctccctcacacatggattagtgctagacttgtggtggatgtgggggccttggtctgtatttcctgcttctgacatgggtcatgggggggggcacttgggtaataatgcaggacatctatcactgtcacctctgagagacatccaaggtagctgtgaggtgaaaagacaaggggttaagttgtgcttaactggccgagggagccagggatatgtggaaaaggaaacagtctgggaagagtggtaagacaaggaaggcggagccagatgtggcgagaacagatccgagtagaactgtggatttgttcatcgtggaggggcttgggtggtccataggtccaccctgggatcactcaggtggtgatggagagcttccagtcactggaggaagctgtaaagagtggaaggcacagttatcgactatccctaaaaccccctctgcttcatctcggtcccggggacagttgtcgcccactctcattttctgtcacctctttacttttttattccatgctccatctagacataatcacgttttgttgttgttgttgttggttggttggtttttattttctaaaataccatgtgaacccccaaccccacgccttgaccttgccagttccttcaggtataacttacaagtccagtacagcagctttctaatcctcctttgagccattctagaaacttctactttgctctgggcccttatatctgcttattttttcgtggcttgcaagggtttcatacagccttgtggagcattaaacaaaaaacaaaaaaaaaacaaaaacaaaacaaaaccagtgttgagtagagtaaaaagaattgctttgtgctattttcttcaggtcatttatagtagagagttccataaaattcctttcagaaatcaagaaaacaacagctacaaccaccaccaccaccaccaccaccaccaccaccaccaccaccaccaccaccacaacgcccctgacgaggccttgactgttaacttctgccttttgaagccgggatggatttaaagtactttgttttcaatgcttatgctcgcatttaaaaaaaaaaaaaatatgagctcatagttccatctaagcctgcttacccaaggagatttacacttttttttctgaacatttataaacatctagaacagtttctaaacagagatactgcagggcttcttcttagcttcctagcaacatttacatatgaaaaaaggacttccagcagggggtgcggggggggggggagtagagtggggtctggtagagactactgagaaaagtcagaggaaccgagtgcagaggaagggtggcaattgggagtggcttggttatttttttctctacccgtggtggagtttgaatgcagagccttgcacttgaacccaggcaccccgtgcctcctggtttgtagccagtgttataactctcctctctgcttatgccaagtatgcaaagtgaatgaatcacaaggttgaaagaatgaacatggcaaaatagacataaaacgcaaccagactgacagcagaccgaggttcgttcggttgcgcacaagactgacatcctgcctcatgaaaaataagggtaggtttccctaaccttcccaacccaaaacaaagcctgtgttttcacacaaacccagttctcttagaaagtttcccgcctatctccaagtctacccctgcatcttttcctccttccgtcttagagcctgtggtaactatgacctaagtaccatctggcctctgcttgttcctcctgaggcaatagtagagggaaatgggaaaggcagctggggttggagatcttacagctagggtggacagaggtcatgcagaaatacccccggggagggaacatagtaggaactgagactgggcagggccagggcaggggagccatggggactgtcactccctacatccacacagaaaatataaggaggctgcacagatctcctatgagtatcattgcaatccttaactattccctctgccaggaagcccctgttattttaatctaatcccctctcttttctccattgtgggttcctgtgatggaaagttcggtgagcctttaatttcatgttcctgcatgtctctgtgtactgttcctgttttcacgttccattctgaccacccacgctgtcaaagaggacagctgtctggcaaagggttccacaggccccgactttagatcagtcagaaagtcgggctccattctattaagctcagaattatatatatatatatatatatatatatatatatatatatatttgtacagtctgttttgatgttctgaagtttttgaacatgagtagttctttttatttacaagtaaagatgtcctatatatatatataatgtctttatatatatataaaacttcatattctgcttttacctcactccactaatcccttatcttaggactcattcattctgtgtatgtatttaaggattcatatctttatttcttgaggctcgatcaagttctattatatagctacattataatttatttaattaacccaaagtaaccatttttgtggggtttttttgtttgtttgtttgtttgtttggtttggttttggttttctgagacagggtttctctgtgtagccctggctgtcctggaactcactctgtagaccaggctggcctcgaactcagaaatctgcctgcctctgcctcctacgtgctgggattaaaggcgtgcgccaccattcccagcccatttttgtggtttttaacctttactattataaactacatatattacattattatatttattataataatattaattgtattataataatacattattatatgtattataataatattagtcctgattagttgttgtcaacttgacacatgctggagttatctggaaaatgccttcaaccagactcacctggttgataagcctgcacagcattttcttccttcatgattgagtgggaggacccaagcccattgtgggtggtgccactcctagacccctggtcctgggttgcataagaaagcaggctgagcaagccctagggagcaagccagtaagcagcatccctccatggtccccccaacccccttcagttcctgacaaacctttacttccttggatgatatcctacaagctgtaagataaaataaaccctctccttccttcccaaggtgcttttggtatttatcatagccggggaaacctaagtcacgcacatatttacataagaacaaaggagtaccataaacaggctagtcctccacctgccctccttgcttgaggatgaaagtattctccctgcacaattgccttataccaccacgtgctaatgactctccgctctcttccggcccagaacggacatttaattgacacagactctaaactgacagatagccccagcaagcaacgtcaaaagcacctcaccttaagatgggcacattttagtgtctacctctccatacctcacttctttccctgcctcccatgatccgcagcccctctccttccacgcgttcttcctgtgctggatacctccaccttcagcgcctcatacattcactccctcatttccacctcattgccagtctctcggaagatgccctcctgcctctcctgagccattgcagaaacctcactgtttgtttgttgtttgtttgttagtttttattcaccttctcttccagtccctcttcacacaatttataggaactcaagtataaatctaattgtattcttccaaatccttaattcttcccattgttccggcatagtgtgaatgtccctggtcaccacctctccagaactcacttccccaataccatcccccacccccacagccccgccttttcagccttgacacatttcccagattccaagaattctcctctgctcccaccctttccttacgtgccttcatcttgtaatgggaattcctgatttctccatcttactgaacacttgcctatgctgcaaggtgaggccgagatgacctgtccaatcagactctccaggtagaatggaacaattacttctatgtatttatacctacactttgtctcttttcttgcctatcagacttgagttggctcatttcctcagtgtatggcctgtagagtgtatttaataaaagtttgatggatgaataagtcaatgaattaataataaataaaccccgtttctctgcctttcagtgaatcagtcaaaaacaagaaactatgacagactcgtgagttctcagacttccggtgagttatgaatgtcacttcttgtgggagaaactgtagacacttggaaactcaaatgataagtggctagtactgatcaaggaaccaggcttggaaaatgggaagtatgttcataactctacagaccttctgtgtcttaagagtgatacaagataccctgtggtccagaaaggaggccaagtacacctgtattcctcttcctcataaagggacatataggaacctctcagtgcatcttatttctacagttcttcatcaagattatcaggcatgcgagctgggcgtggtggcgcacgcctttaatcccagcacttgggaggcagaggcaggagggtttctgagtttgaggccagaccagtctacaaagtgagttccaggacagccagggctacacagagaaaccctgtctcgaaaacaaacaaacaaacaaaaacaaaaaaaataagttatcaggcatgaataccagcagtggattttggctcttaaggataccttgtatatatagggtttgacttgtgatggattcagagcccagagaaagacctctctgttacatcagggtgttgcttcggatgagaaccagcaagccaactacacgtctaggtagagagtaagggacccagtgggaatatggactggtgtgtgccactgacggaatttaaacctgggaaagcctttgaggaggaactggaggttaaaaagccacatcgggctttctaatttgggggttcctggatgaaccttaccacttccccttcccttctggggaggggatgaccgtaaaggctttctggatgtgactctgggaatgtcagaggggccaagccctgaagaagttgttttagcgtccctggataaagacaagacaggctctggatttcatacctgcagtctatgagctacactgaagttcagtcctcaatcttgtaggcttcgttgttcaagactcttttcctaagacctggccttgtgtctccccagagctgctccaggctcctgtgctgagccccatcccatctccagaatctcaaaagggcaaccacctgactctgcggtatcagatgaagctgaacccctagaggtcacttcatgggtactcttcaccacctatgagacagacagacatgctttgcaaacagtagtcaccacccagaactctgtatccaagaaatcaaagagggagacccggagcactactgatgtgaggtgggccctgaggatgtctgagatcaggaactggactctgcctatagatcagactataggataagtgagaaagggaggggtctagatatcaggggccaggcctcccttggggtggaggaggaagcctgcagcctgaaaagtaaggctgtcttcactttctgtcagtcagagtctgagtcttgtcctcgtctcactttgtgtcaggggctgctcaccctgttaaggaaacagtagagctcttctgtctaccgtgttctaccgagatggggtgatcttggggagctgcctggctcctcctggcatagttactccctcccaccactatggggtgagtgcatcgtctcctgagtgtatcttatttcccatgtagagcctctgctttgggtctgggatcactgcatatcctccaacctcagcagctggtgagatgtagagagagtggaggggcagacatgtaaggggagagaagtcacaatttcatgtaaccacagaagttgtgatttcttttttccctagagaactaatttcctgagatctcaccaatgctaagccctgcatttcttggcctacaatatacacatctgccagactgggtgagggagataggcacataacccatgagtagagagacacagaggtgtaggagtcttgtgtgtcgttgagcttaggagacctacaaatgtccagaactgacaacgattctagtttttcctgattgggtgagccactgatatgagtatatatgccatgctccatagagagtcaacagtcttgaagacaggtgtgtgtgtgtgtgtgtgtgcttgtgcatgcttgtatgtgtgtaagtatatgcggtatgagtgtgagtgtgcatatgtaagtgtgtgtgtgtctgtgtatacatgtatgtatgtaagtgtgtgtatttgtgtatatatatgtgtgtgaatgtgtgtatttgtgtatatgtatatatatgtgtgtgtgcatgtatatacatgcatgtgtgtgtgagcacgtgtgtgtgtgtgtgtgcttgttgggaaccataaggttctcagaatgtcagagatggagctgtttcacgcagatgctactgaaggtttctttagagtggctctcagactctagagtctgagggtcaacaacatcctcaagtcaatgtctttctcaaatggtcctgaacatccgctaggagtcccaccttctaccacacacaggtccatcctaatccaaataaatgagacaataagacatgtctgagacagtctgaacacctatgctttccttggtcccagagagcactaaaggacaatcctcctcatcttagagtaatggggatcctggttcctatctccatactagggttccatacgtagtaaaatcagtttacaaggtggtcattgactttggccacagagcccttctgaagtccattgattcttctccggggttttgatcctgttatcagtgaagatccatagcctggtcagacctctactcatttgatttggacagttatctgttccagatttatcttacagtgatgtttttttgtttttgtttttgttttgtcttgtttatttcaagacagggtttctctgtatagccctggctgtcctggaactcactttgtagaccaggctagcctcaaactcagaaatccgcctgcctctgccttccaagtactgggattaaaggcttgcgccaccatacctggctggctgtgatgaattgtatattcaatatagtaagaaattattcttctctaaagattgctgtagctttttaccctgagctactgggatttaattttaaaaccttccatgctaggcatgataggaatgtctattcacccaggggtgttggttaccagacaatccaacaaatttaacacggaggctaagagccaaatataatttcctttccagagaactatagattaaaggtatcagtctaacctttggacgggtaggagctcaaggttagccatgtggcacacatgttatcagctctagtaaaaattccaaggcttgggtaatgttcatagtgcatggggcaaacactgtctcaactaactagagatgccatgtttcacacttctctgaactcctaggtacctacttctccagaactttgttctttactctgtatcctctccctatactaaatcatagtaaggaggataagcgtttcaaaggtgtccaaggagtcgtcccagcaaattcctgcagcagtgggaagattttggaatccctcaagcttggcaactggttttagagagaaggcagtttttttgttgttattgttttgttttgcttttttgagaactgtagtccctctctctgactggacacttggttaaaagctcacaggctgttcagagtctacacaatatcacaagataaaatgccagctggttaggaacatgaggtttgaagaaaacagggtaggaaaatcagttgcaggaaggaacgcagtcagtatctaagctgtatccaccagtgctctgtccccgcctgaggtggatggggacaaagcggtgaccgtgagagagcgagcatgaattctacactgaaagcacaggaacgccgggagaagcgctcttccctccagtgggggccccctcggtcccccagtgagtacgacacttgtcggtaacagcattttggtcacatcttttccatagctccaatgaacggccccacttttatcatactctttcctacaagctatgggtcttatagcaaaacctctttgtaggcaaggctgcccagtcccatttgatagggcttaggtttcgtcattcttattacccagcttccccaggttactgattcacagaggggccctccttccttctcccaacaagcaggtcacggttactgtaagggcgtatagcattcttgtggggctaagtcatagaggggtgataaacgcagttttaaaggattctcagtggagttgggcagggtttaaacaaggtactccatcaccctctatagaagtctgggaacccctgccaactcctgagcagagggtgttcatagggcccttgggctgaggattgcctggggtttaactgagctgctgaaatcatattggggttcctgtaatatttccactgaaggaagcctgcgtgatttgttgttgttatttgttgttttaagatcatttaaaactctcctcccaccttgtcctattactaatgaccttgaatctgccacttttttgtgggggtagagaatcctcaagacattccctatttttgttttgttttgtttttcgagacagggtttctctgtgtagccctggctgtcctggcactcactttgtagaccagggctggcctcgaactcagaaatctgcctgcctctgcctcccgagtgctaggattaaaggtgtgcgccaccaccgccctgctcattccctacttcttaaatatttccatcgattggaagaaacaaggggaacctttgagatccaggttctctgagatcctgtctcacagtctcaccatggttagtctagactccatgtctccttagtaaaccaagatcaggctcccacacggctcttctctctctcagaagaaagatatagtcccaagcacacagggtcatggagtgtcatggaagcaaatgacaaactcgatggggaacttgacagggaggatagagcattttgtatgtggtaactgaagagctgcagtctttccacacaaaggggaaggtagagagtgcccctagaaagggagcaaatgaggttacagaccaaagtatgaagtccagaactgggtcatccaagattagacagagacattatctgtaaacaatgaataatcaaataaaggtttataccttatttaaaaaaaaaaaagaagaacaagggtcatggacatatagaagcctgagagccacagaagggcaggcacatcctggccataccagctgagttctgtctggttctctgttaggcagaccgctgtattcaagggtccagcaggaggagacactttagagatgagcatgatagactatcgctgggttgttgactagcaaacccggtctagaccaatccctgtgagactgttagacaggatctcagagaacctggatcttagacgctccccctacttcttccaatcgatggaagtattaaagcagtagggaacgccttggggactctctacccgacaaaaaagaaaaaggaagcttatttcctttcttctggcagctcctaagcaggcttctgttgataaccccccatgccgactgtgtatagggcgaaagtgtcacaatagggtaaccacagctagcatgcctgacctgaacaccaaccacagcgcatttcttgccttgtgtctctactccttaattttgcttcattttccctctcagtaccccattacttgatgatagatagttactgagtgctgctcacctttctgtgacctcggccatgatgaccgtaagaggcccacggtttccttgccagccctgtatcccacatcaggaacagagagccttgcttgcacttagcagaaggttaacaaatgtttgtaggatgagtagctgatctcatgtgagtcgatcattctgatgaaaggaagagtgatcacagattctgatcagttctgggatgttgacacagtttactgcaaagaagaagagcttgagccatactgagttaactaagaaaaatgccagcacccagcacgggcaaagctgccagccggctctcctcaggcattcctttctgtttcctagtgctcactgggtatacctccagtcacaaatataaaccagtgacaacaaatgactacaaactgattaatactgacaccaactatagtaatgacagttactaagtactttctatgtgcaagaacatctccagagttggccatactgcgctgcaaaacatttaatcaataacaccccaccaacaagattccagaagacctgaaatctcacctgaatcagaatggctatcagcaagaaaaaaaataaataacagatgctggcgaagatatgggaaacaaaggatgctttctctctgctgacaagaatgtaaactgtttctgctgctatggaaatcagtatggagattcctcataaaaccaaaagtaggactactgtacttgcattcttgggtgtatattcaaaggaactgaatcgacacatcacagaagtacttgcctacatgtgtgttgttggcacactattcacaatggccaaccaggaagtgggactagcctagaagttcatcaagagatggacccagaaagagagtgtggtacgtatacgcgatggaattttgtacaactgaaatcatgccatctgcagaaaaatggacaaaagttggaaattattaagcaaaataagccagattcgggaaggtaaaaattctgttttcttttatatggacaatataaatttaaaagtctctctctctcactctctctctgtctctcctccccaccccaccccctgtgtgtgctacaaaactagaaaaggtgacatgagagaggaggaagagattttaagtgaggtgggaacagagtaatgatctatgtaggtggaaagcaaagtggcggcgttagttgggaaacggggggtggggggggagggtcatgtgggaagggaatgccacaaagcaagatagctcagatgcattaagatgccatgttggaagccattactatgtatgttcatcaaaacacatttgtcaaaaagaaaaaccaataaaacaaagcaagtaacactaaaataaaaacaaaacccaaaaaacaaacacttaacccaaaaacacccccacccctgattttggtcccaactttgcattaaattttgtggatttgaagttgttctacatcctagacctgtggattttgtgtttttaatttggaagacaagatgttggatgagctcagaagattctctttctctctcttttttaaaatgttctctgaaacaacctactttcagcaagccatgcctctgagcccttgagtctgaagagagaaaagcaagagtgtcaggaggaagctctcaggactgatacctgccaccctgctgcagtctgtgagtccggtccgtggaaagcccaggagaacaggttaaaagctggtagagcccctctcatgttccccagagctcagtccaagaagaaaacagacagtgtcatttcgtggcttcgcccaggggaaaacaaaccttttgtgactggagacaaaagatatcgcttggctagggagcttcctctccaagctcacagaactgaagagcaggctacagattcccagtataaggcagaatcacttggtgatcttgcatcatgaatgagcacggctgttccttggctccctcctccacaccaccatcctaattcagtgggtaggaagtggggccaacggcaccagcgtgttaaccatctctctgtgtgactctaaagcaggcggggcaaagcctgtgctttattaataagaacaattaacataaggaggaccagaggacatagataagttggggagaccactttgggattctgggatatgtgacacggatgagatgcggacttagttgttcagaggtgtactagggaacagccttaggtgtgacatccctgtatgcttaaaggtcaggctgctgtacaggctgctgctggcatgggaagcaaggagctgggctctgtatcccagcatcaaagctcttcaggctgatgggtgcttttggcttatcttcctcatattagagatttttgccatcttcttttttaacagtcatagacagttgctgacaaatgagcggccccttgtcttcatgccatgccttcagtaaccagcccagctcacattaattgagacttcgtcatgggccactctacgctaagtgctttggttttcactcatagagcgcaggcgtgagaatcctgttgtggaagagccaagcagtctagtttcaggtgtatggctttcccggttgtctatcccagagcaatctgttgcccattgatgtcgaggataatgccttcctttcctgacacacgcaaacctttccacacatctgcctgttctttctgattttaagggaggacagtcttgtcatctaagacacgtccccgttcactgtgctctgcctacaaccttgtgggcggggaagaaaccttactccatgtctcatctccccactgccccggtttctgttgtctccctttactgcatcctttcctccgaatgtatccacagttacttttctcttgtcagcactaataaagctttcctgatagactctgcgtcctcttttctcatctcttatttcttttcctcgccaaaggtaaactcacaaactctcagccatatctgagcaaggtctctaggagaagcccataccctcgcgtggataagctttctgtctctctgcattagaaagcacatggccatattcttacttgtcctttgtctttttttttttttttttttgagcacatctctttctcttaacctttgcaattaaggcattaaggctataccactatatcatttaatggcatttccaactctggtttaccgtgctgctttctcctgaattcttttcagtgtcagagtggctgtgatagctcttcccagctgtcaacttgactatatctagaatgaactaccatccagaaacaactgtgatccagatcttgaggctagatgacacaggcttttgatctggatcttggagcatagtggccatgaaaagcataggcccaggcaaggtggtacatgcctttaattccaggagatagaggtaagcagatctctgagttcaaggccagtcagggacagatcgagttccaagtaaagaacagtttaggttcaggtgtggtggcacacaccttttatctgagccacaccttctgctggaggcctacataaggacaatgggagaatgacagttttcttcttctttgcctgcttgcacttgcttgccagcagaactgttggaatcctacttcttcaggattccatcttatacagaaaaccagctgcaacaactagcctcatgggactgggcaactatttgattcttggacttcctattcacagctgcctgttgttgggttagttagactgcaggctgtaagtcattttaataattttaatatatagagacattccataagttttgtgaatctagagaacccttttacagtggctaatgtggtgtctaaggattaagagcatccctcaggtcccgtgcagagctgtttctctacgcttagcctcatcttaacctcttttccatctgcttttcttggttctcctgttctagacgctctctgtgcttcagtgtgctttgacccctcccccactttgatgatgtcacattctggtccctctgaaggaatgctcctttctcccctttcacaatccttcagtgctccttcgggagcacttcaaccatttgaacatctttttgtttcgctccagccaccttcatggttcatttggataatcatccctttaacacggacatttaagagggaatgagaaaaaagggaaagcatttatgaaatgtacgggcccgccccacaatgggagggtgcatgcaggtccaacccacaatgagagggtgcacgcaggtccaacccacaatgggagggtgcacgcaggtccaacccacaatgggagggtgcacgcaggtccaacccacagtgagaggatgcgtgcaagccaacaaattttccgccttcagaggaagatttacttagaatttactcgctaatagtttgttcaggactgcctctgccatgtggctcctcatctttccagatcctaagagaactttctagatccaaagaacaacttttcattgctccctcctccctaggccatacacaacaattagaatgaagacatttctttctcattgtcttattttcttttaaagacccagatggaagggagagtgttgatgtggacagccagtgttccctcacgtttaacaatcgtagggaatgtgcctccgaattatctcatggaaggccagtgaggctgaggcatttacccacccacccacccatgctccatcactccattgactggcgtacacccaagccctctcctaagctgcacccgtgcttgggttgagttagcttctctttgctgcagtgatatcagagcaatagaaaaacaaaacgtgtccgggatgaaagacttcagcagtaaggtagtgaggacgacttaatcataaaaactgtctaggacagaaacccagtgtcaaagggacacaccgcagaaagccttaagtacgtgctataaacaaaatgttggaatggatcccttcctgcttggctaaccagagctgaccatgtgacaggtgccagaaggtcaaagacagcatgagggagatcagatcgccccttgcaaaggaaattaagacgaacctgcaccattgctcttagaaccccttatccatggacagaaggctgagagagggcaattgagaaaaaattggatttaaccattactttggaagtttgtcctgcagaagaccgtctgagggggacagcaacctaagactggctcaggcaagttaaaattgataatagactaagatctgattctcatctagggagccaagagcattgaagctgcactgtagatcctggaatctgtcagggaagtgatatttacagtagccaaccaatgagacatggcttgcttggttacccagagaccacagtcaaaggggcatgtgaaggggtttgtgtgtatgtgtgtgttctctgtgcagagaggtctgttccagacgcctgggaatggaggaaggaattgttaaggactatccaaaatagagactccttaaccagcaaaagtcctcaacagaaaatagttccttt

SEQ ID NO: 646 - DNA, 1305 bp, Mus musculus
atgagctaccccatgcactggggggaatggatcctgaactttcgggtgccgcccgccggggtgttcggcgtggccttcctggcccgggtcgccctggttttctacggtgtcttccaggaccggactctgctggtgaggtacaccgacatagactaccacgtgttcacggacgccgcgcgcttcgtcacggaagggcgctccccgtacctgcgggcgacctaccgctacaccccgctcctgagctggctcctcacccccaacgtctacctcagcgaactcttcggcaagtttctcttcatcagctgcgatctcctcaccgccttcctcctgtaccgcctgctgctgctcaaggggctggggcgccgccaagcctgtggctactgcgtcttctggcttctcaaccctttgcccatggcggtgtccagccggggcaacgcggactccatcgtcgcctccctggttctctcgaccctgtacttcatagagaaacggctcatcgcgtgcgccgcggtgttctatggcttcgcggtgcacatgaagatgtacccggtgacctacatcctccccatagcgctccatctgcggcccgagcgcgacgatgacgagcgtctccggcaagcccggttctctttccaggctcgtttgtacgacttcctgaggaggctgtgtagctgggcagtgctgcttttcgtagcagttgcagggctcacgtttgttgccctgagcttcggtttttactataagtacggttgggagtttttggagcacacctacttttatcacctaactaggagggatatccgccataatttctctccgtacttctatatgctgtatttgactgccgagagcaagtggagttttactctggggattgcggcgttcctgccacagttcatcttgctgtcagccgcatctttcgcctattacagagaccttgtcttctgctgtttccttcatacgtccatttttgtgacttttaacaaagtctgcacctctcagtactttctttggtatctctgccttctgcctctggtgatgccactgaagcagcagctctcagggaagacgaacctggctggcattccggaaatggaagaaaaccctgggatagaaggaaggcttggcttcaccctgttggctgtgggccaagtgaatcagtcaaaaacaagaaactatgacagactcgtgagttctcagacttccgagctgctccaggctcctgtgctgagccccatcccatctccagaatctcaaaagggcaaccacctgactctgcggtatcagatgaagctgaacccctag

SEQ ID NO: 647 - protein, 428 aa, Mus musculus
MSYPMHWGEWILNFRVPPAGVFGVAFLARVVFYGVFQDRTLLVRYTDIDYHVFTDAARFVTEGRSPYLRAYYTPLLSWLLTPNVYLSELFGKFLFISCDLLTAFLLYRLLLLKGLGRRQACGYCVFWLLNPLPMAVSSRGNADSIVASLVLSTLYFIEKRLIACAAVFYGFAVHMKMYPVTYILPIALHLRPERDDDERLRQARFSFQARLYDFLRRLCSWAVLLFVAVAGLTFVSFGFYYKYGWEFLEHTYFYHLTRRDIRHNFSPYFYMLYLTAESKWSFTLGIAAFLPQFILLSAASFAYYRDLVFCCFLHTSIFVTFNKVCTSQYFLWYLCLLPLVMPLKQQLSGKTNLAGIPEMEENPGIEGRLGFTLLAVGQVNQSKTRNYDRLVSSQTSELLQAPVLSPIPSPESQKGNHLTLRYQMKLNP

SEQ ID NO: 648 - DNA, 25630 bp, Homo sapiens
acatccggctcaaccaggtcaatgtgactttccaagtagacacagcctctgacagccccttccttattctaccccttaccttctatcatgtggtagatgagaccagtcccttgaaagatctccctcttcgcagtggtgagggtgactttgagctggtgctgatcctaagtgggacagtggagtccaccagtgccacctgtcaggtgcgcacttcctacctgccagaggagatcctttggggctacgagttcacacctgccatctcactgtcagccagtggtaaatacatagctgactttagcctttttgaccaagttgtgaaagtggcctctcctagtggcctccgtgacagcactgtacgctacggagaccctgaaaagctcaagttggaggagtcattaagggagcaagctgagaaggagggcagtgcccttagtgtgcgcatcagcaatgtctgatgacctgttcccactcccccattcctctggtctcttttcctctcttccaatgccctggtaaggaatactacccgggtttactggagatcccccgaagcacccatcctccactccctcttctttaacccagtggcctgttggtagcttaggccaactggagtccaggttcgcctcccactgtcccctttccacttccccagcttctgccccaatacacatacctcccttaagccaggatgggggaaagagtgggattaggctgaagtggcttagaaggcctcagccatgcttggatactcacattaggaggaccatgtggttggaaggatagactgccccctacctcccaccaccaccatgaagtttggtgacttgaggctggagctccctctgttacctttccatctagcaagttcccaaaggcaagactctctctgatggtcactttgtggtctgtgctttcagaaatacaggaatctgatatcaacatatcctagggtttctaccaatctctgttgaaagaagccagggtttgccactgtgaagcttgatttctgctggtgacttctgaccataagctagaaccatggtcgccactgttttccctctgtagtttctcaagtgaacactctcaggatacccagttccctcatagcctctgttctcagagaattggagttggcccaagaaacataaacatataaccacccatatctatcctggattctgaactcttcaatttggagtgactaacacaagttgttatctaaacctttaaacctatcttccaggcagcccagagaagatctgtttccctgtgtcctgtgaatggaaggacccaagccaatatgttcctttgaaaagagtccagtacccaggccccatggaaaggtctgaaaataatattccagattacactgtacctggcttctcttcttcctttcctgctcagcctagatccttcttccttaaccccaactctttgggagaagggagggaaaatgcaagggccttcctctcttaacacggatgctcaagtaaaactagattcacagggcacagattccccagaaagttaacacaatcccaccatgagggatgggtaaattctcagatttccaaactgctgtacagagcctctgagaattggtgatgctttgttaaggtttgggcaggagcagaactctgtggctggcagccactattctcagttacacctcccagtgcccttctgaaaagtgccagctatttcattaggcaatgctggaaggaaatgaaattataccttctgatcaaataaccatggcttccctcagccattcctgagacttggtataaaatgaagaaatcagtgtcatctctactctcctctgccatgaggccattttcagacaagttaaaaagtagactttaagagatcaaactcagcctattccttgttccctggtggggtctgtggtaagggtcagggaagggcatataggcaccagagctttatccaaagccccaaatccctagagtgctttctggtctcactttggtaccaaggaagcctcacatagtggtactgcatagtcccactataagtcaagttgcagtttaaggtggtctcagccaattgttacaagctacagaatatatacatgcatctatgtacagagccttgcagagaaacacaaaattttgaggctagacccatgatcaccaccaactataattgcacaaggtcttgttatattgatctctcctcgaactcaactaacgatatcttgaaaacaaagacccttcggtgtccatctacagtaaaccccaccattaccttctagttggcataaaaacaagaaccacaaaaacttgaaaaatctgaaacagagaacagaaggccaagagccagcttctgcgttctcaactttattcaacattagacttaccttatttctttcagtgtgtagggacaagatgtactgctgtgtgtgtgtgtgtgtgtgtgtgtgtgtgtgtgtgtgtgtgtgtgtgtctataccttcctatccattggcaagttaacctccatctggtttatttggccatgctatgctttcttcccattcccctgctgtctattctaagcccccagactcaagcctctagactcttggatgaaacagtgagaagaaaacattttctgacttacccttttggaatctcctccattattacccaggctttgctttaagttgcactttaaatcacactgtcctattaatgcgatctggcatcttctcccacaagccccctacagggaacaactaccccctaccttaactctaaatggttctttagactatagtctgtctcctctgacctgaaatcctcttttaggcaataggccgagctttagaagcagccaggtctggtgagaaatgggcccccataccaactgtggacttggaatatcagcagagtagtaggcacagttgtaaaaaggggagatttcggtaggcacaggtgtaaaaaggggagatttcagaagacgggcgaaacaactgatgggggaagatacctggggtgagaagatgagaaagaaatgatgctgagggacctagtgaaatcaatgaaactcttgagtcttgcttaggctcgcaaacaagaagtggggaggcttgggaaattaggatatgacatatatgaaaggtttatctaagaagaaagaaacagagataatatatatatagaaagatgtatatagatgtatatatgcccaaatatattgaatgtacagaaaggaaatattcagagactttagcattgggggcagatatcttggcctggttatggggtaggacacccagattttcagacttacaatcagtggtcctggtttcaacatggaagtgagatagctgatgaaggatttcaagtctggaaatgggaaagggaggggtagaagttccttttcagaaataaagaggcattcatgaaggcttttgttgaatcctatgctactgataggaccaggaagagaggaactcggaggacaatagggaggggaagtcttggaaaatctaccacttacactgtgtgtccccatccccagcagcgtcctgccactgtagcgcctttttaaaataaataaaataaaataaagcaccattttgtttccctttcatgaagtacactgtatttccgtcttccacaggggtgggagctgctattgctctagcccctgaaatcaaactcaggagctgaacactttggtgtatgggaggcactaatgggaagcctcaaccctggaatccaaatgccaggactaatagctgttaggctgaagatctcccaaggtcaaggcccagccttttgtgtggctgcaagcagcccaaagagaaagccatggattccagaagagttccaatcctggcatttgggcatggagggtgatgctttggttttgatgcttctgaatgaaaatgaggagtggggttaccagctgctctaggggatggtgaagttccatgagaggcttccgaaatctctgcaatgtgcttcaccccattattcccccaacccctgtcagcctaataaaatcatccagtagtttccctataaggtctgagcagagaaagaaagccagttatactattgctacaagtccaggacactgtgccctctccatggctgctgccctggtcctttattcttgctagctaacctagttcacttgtacagtaacacactacctttgctggaaagttagcatgggtctccaggctcagtaatggccaactctactgatgcagaagtatttagggatgttttttccattcattgcactaaagactaaaccaggtcaaatttatctaggaaaaaaaaggtgtgtaagatttgttttgtttttgtctgttaaaaataagctactaaataaaatggatgactctttggttgtcactctagcttcttttaaaaagctaaaccaagactgtcaaggtctgaactcatagacctacctacccatgagtgtggagggttgaattcggctgtgctggaagaacttctgactgcatggccaagccccttctgtttttctctcatgctttagcgagttcctttcacattcggttttcatgggacaatactgaaaaaaactttaagacccagaagtatgaaaattggctcagcttaatccataaaagtcaagttgctttggatcctgggcattgtcccttttggccagtgatcacaagcccaatttcccttccatgctaccatgtagtcttgttgccagttttccttatatatcctcaaggttctttgtaagcttattcctttaatcaccaggcatttcttccctcaaatctcaaataaatggatttctcttctacccttgtctgtcagtagcctgagaaaggtctggttgttaatatccaggcctgaattttctctgatgagaggcaaaagaccctatgatcactgactcttgttccccagaagtggaaggagagagagaggaggagggagaaaattgggtctcttaccatgatcaataaatacttaagtacaacatttaggaaatactaggaatgaatcctaagacatatgagacatataagatataggacatgtattgttcctaaaaggcctaaaaggttgaagaaacctataaacttgttagaaaacagaaataaaacaagtagcatataacaaatataatgaaaagcaatagcaggtaccatgtactaatgccagatataacattagcagaatgttccaaaaagagtgagatctctgtgggaaacatttcacagggacaggaactaggcaagggatggtatcaatctaacatgtttggttagaatacattaaggttcaagaaaaatcagcaaacgctgagtccctattatgtggaaggtatcattcagctgacaaagaaatataagacatgatgcatgaatcaagggatgtacaatcatggcactttccacctgctattccttctgtggaactctccccactgcttgccaacttccaattttcttgttttttttttttttgagacggagtcttgctctgtagcccagactggagtgcagtggcacgatctcagcttactgcaacctccacctctcgggttcaagcgactctcctgcctcagcctcctgagtagctgggactccaggcacacgccaacacgcatggctaacttttgtaattttagtagagacagggtttcaccatattggtaaggctggtctcgaacccctgacctcaggtgattcacccatctcagcctcccaaagtgctgggattacaggcgtgagccactgtgcctggccaaccttcttaactcttacactatgcccatgtgagatcaaataaatccccttaaaagctagagcacttaccacagctgcatttgtatattatttgtcaatttatttgactaatgtctgtgtagcttactagacttcaagtgtcacatgaatgggattcatgtcaagtgtttggtcacgagtacagcccagcacctcatatagtgcccgacatgtatgatgtttgataaattagcaggagggaaagaaagcaaagagagaaagaaatggcctaaagtatgcagtggagcttgtatatcttgttaaataactataaaagagttagataacgagcatgacataattactattaaaaaagagaacagacaataaacatcactgttttgaggagggagagactatttcacttgttaaggtctaggaagaggagttgagagttgggttcaacattgaaaaaccaaatagcatttaagtaagtaaagagaaacaggtctctttgtaggaagtacagcatgaagaaagtgtcatgagaagaaagcacaaggcatattttgggaacagtaaacctaaaacagaggcattataggtgaataggatggaaagctaaggtaaagccagaaaatagggggactgaatatcaggctaaagtgttcattatttttttctttaggcagtcaggaaccactgaagatgtttgatggaggaaagaatctaagtaaagtactattaattaatatcaatctggtagtagaattgagacataagacattaaatcagttaagagatttttaaagcttgagggaaaggcaattgtcacagatcctggtatagtatagtataggtgttcgctacgtattatttgagttgttgaaggtctgaactaaggtgcaggatgctgggcatggaaagaattagaaatagattccaaagaaatgacaaagcaagacatatgaacaaaatctagtgaaaaagaaagtgattaaagtagtcaaggttctagcaggaaacagatggtatactcaaagggccagtggacatgttttaatgaagaaattatttgcaaaggtatgggcaagtttaataaatcaacaagatatggtgatgtacccaggcactcgcaaagtaggacgcctttaccagccttaaacctgaagggacagttactggaaccatgagacttgtacccaaaggagagagctatagcttcaacaggagccatggctttaggtgaggaattccagacactgccaaagatctgctagtgcctcccactggtctattctaatgggaagccagagaacaagggagattgagtgatgctacccatacagcctaacctcttggaacacagaacagggcaaaaaagatgaatagtggatatggaagggtaatgagagtatatgcagcatagtgaacaaggacaaggttcctgctagggaaactaaagttgagcgatccatgtttgtgctttccttagtcattggctctaaaaggatagaaatctaggagcagatagtgaaagggggaattaagaaggattgtaagtaacagtccgagaggtaatgaacagttgagcatttgaaaaaaatgtaactctttcagaaagaggtgagaaaatacaatccctaaacccaatgcaaaaagttcaatatggggtcctcggaccctgtgatgtatctcttccacccagaaatagtaactaaagttggacctctctgtccaatttgttttacagattccagtctcttcttcgttcccacaactgctatctacatctcactcctttgacttcagtgacatgcttagttttttttttattttatttttttattagttgtttccttatctgcctaaatttggtgcctcccatctctctactaggacagccatgtagggacagattgactgaaacctttctgctatactactgaaaccaatccagccacaaggacccttacttagttaatcctcagacacctacctcccatattttctatcttagggaactaagcctcacttatctattatttgcagaagaaaagaataaatcagaggtagaaagagtcacagtgagagagaatatccagaatatccagatgagagatcaataagagaaaacataggaaaattagaatttgtgatcaacattttattggcaagtcagccacataatgattaagatattctaggtcagacagactgggttttgagttctagcactgccactagttagctatgtgacttgggaaaattacttaatctccataagccttggttttcttcatttgtaaaggtgggaatatctaccttacatgaaaagtacttagcataatgcctggtacattgcaaatgagtcctcaacaaatccagctattataaataatagtaatcatcatcatcataatcatcattatatgagtggtgatgtgctgccactatatatatggctaatatactgcaaaaaaatggttagaattatcaatctaaggcatgtaatgataccaaggcatataaaaggacatagagctatcacaatatgaatatggaatatataagattaacacagttcatctccaagggataaatgtgaagtgtaggatggatgagcagcaggtagttctgggagctgcatgttcagactgcatgaagtcacctccttttccttattctagtctagaagacttcccctaggaagcaggcttattctataaaatccaattagtcagtatttactaagcatttaccatgtgcctaagactacaataaattacacataattgaaaaaaattaaggataagatataatttctacccccaagaaccctataatctcttgtgagggctatgaatacaatctaaaataaagtatcaaattctacaatgcggactatgtaagtgcactaagtaaccacggaaagggaagagctaatgggttacagtccttggcaagaaattcatggaagtagggttggagtggggtggggggagcaggggaccttgacatacataaaggatatttaaaagggaaaataactgggagttgggagcaatccaaagatgccactctagaaatattctggtaggaggaacctctaaaatcaattcaactttactgaatggctactagtactgtgttagatgttgaggtagagaaaagaacaagataatctctgataccgaagaattgaaagtgtcctgatggaaaactaggagagcaaaacaaacaaaaacagttattacaaagcagtgtgacaaatgctgtaacaaaggaatgaccagggagttctggagcactgggagaacttttagtagcatggcagggtcttctgtgtgagtgattttctggaacttagatcccgtccgccccagtctacctatcctcggacaggggaggggactggcatctaagtcattcattctgcgtgatgaggaagtgagtgggagctgggagctaacacttgcactgatgcctgaagggttgagtaggtatttgccagagtgattggagagcggatggcaactttgacagaagaaatagcaaatacagagatactgaggcataaggggctgacaagttaaggaattttgtgacgctttcctgtcttctttcccatcaccttcacctagggttgccggataaaatacaagctgcccacttaaatctgaatctctgattaccaactagtaatttaaaaatataagtatgcctccaatattgcatggaacatacacactcagcccccttcaactcatcctgtcctgtccggggcccacaaatccccggtgaataccggcgagctagtggagtaaagcatgagaaggcttatcttcctttcactcctacatttttcactctcggatctccagcccaggactgaaggatgtagcgcgcagcccgcagctcgctgctcgtcggagggttttcctctgaggactggaaatggggcgcgggaagagggcggggggcggcgggctgtcacttacaaagaaatctcactccactccataaaatcctcaagccagtgccggatttcccggcaagcggacgtctcccctcccacggaccggaaatcccgcctccgctggaagaagaagcggaagcgagaccgtccatccagaggaaggcaagtttttggctcgggcggctgagaagaccgcgcggggctggagacaggtagcagtacgggggcggggcttcatgccggatgtgatagtctgcagtcgtttcggttggcagcctggcgggtgggagatgcggcggccacctgctgcaaagaaccgaagggaaggttagaagtacgaaggcagtttggagctggggctaagcagctgtcgcacggtcagatcatgggctccaccaagcactggggcgaatggctcctgaacttgaaggtggctccagccggcgtctttggtgtggcctttctagccagagtcgccctggttttctatggcgtcttccaggaccggaccctgcacgtgaggtatacggacatcgactaccaggtcttcaccgacgccgcgcgcttcgtcacggaggggcgctcgccttacctgagagccacgtaccgttacaccccgctgctgggttggctcctcactcccaacatctacctcagcgagctctttggaaagtttctcttcatcagctgcgacctcctcaccgctttcctcttataccgcctgctgctgctgaaggggctggggcgccgccaggcttgtggctactgtgtcttttggcttcttaaccccctgcctatggcagtatccagccgcggtaatgcggactctattgtcgcctccctggtcctgatggtcctctacttgataaagaaaagactcgtcgcgtgtgcagctgtattctatggtttcgcggtgcatatgaagatatatccagtgacttacatccttcccataaccctccacctgcttccagatcgcgacaatgacaaaagcctccgtcaattccggtacactttccaggcttgtttgtacgagctcctgaaaaggctgtgtaatcgggctgtgctgctgtttgtagcagttgctggactcacgttttttgccctgagctttggtttttactatgagtacggctgggaatttttggaacacacctacttttatcacctgactaggcgggatatccgtcacaacttttctccgtacttctacatgctgtatttgactgcagagagcaagtggagtttttccctgggaattgctgcattcctgccacagctcatcttgctttcagctgtgtctttcgcctattacagagacctcgttttttgttgttttcttcatacgtccatttttgtgacttttaacaaagtctgcacctcccagtactttctttggtacctctgcttactgcctcttgtgatgccactagtcagaatgccttggaaaagagctgtagttctcctaatgttatggtttatagggcaggccatgtggctggctcctgcctatgttctagagtttcaaggaaagaacacctttctgtttatttggttagctggtttgttctttcttcttatcaattgttccatcctgattcaaattatttcccattacaaagaagaacccctgacagagagaatcaaatatgactagtgtatgttccacaccctctgctactgtgttacattctgattgtcttgtatggaccagaagagagctttgggacattttttctgaacattctaagcattctagtgaaagttcccatgttccaacagaacttaaaagcaatgtttgccttatatataaaagggacacaataattgaggtccaccttctaggaaatcctaggactcgtttatttgggacatggtgggaataaaggtcacatattggaaaatggaaaggctgatgaaactatcagatactaaaacattcttaaaatagaggaatatagttagagacatcaggtttaagccagtatttgttcctgttttacaatgcttctgtcttaagctgtgtcttaacttttaacacccatcttttctttctaaagctttcctgacagctgtgaaaatccaaaaaatattcttaaactgtgtatggtggcccttgcctgtagtctcagcactttgggaggctgaggtgggagggtcgcttgagttcaggagttctagacccacctggggcaagatggtgagacctagtctcaaaaaaaaaaaaaaaaaattagccaggtgttgtggtgcacccctgtagtcatagctgcatgggaggctgaggtgggagaattgcttgagcccagagcaagaccctgtctcaaaaaaaaaaaaaaaaaaaaaaaaggaaaggacaactttttagatagaaaagtattaaataatactaagatgcttagtagtattattttagagagttttaaacttctatattaaatgtggggtcttacaagataatccaaagactttgggaggccaaggcgggcagatcacgaggtcaggagattgagaccatcctggctaacacggtgaaacccctctctactaaaaatacaaaaaattagccgggcgtggtgggtgcctgtagtcccagctactcctcgggaggctgaggcaggagaatggcgtgaactccggaggtggagcctgtagtgagccgagatggcaccactgcgctccagcctgggcgacagagcaagactccatatcaaaaaaaaaaaaaaaaaaaagataatccaaagaatttaaattgtaatcatgtttcatgtatttgttttattacttacttttatagcacttagtcccagtggtattagactgctatttggtttcatacaaaaaggattaaatttaaattcattcatgtttagacttgagttattacatttttaaaactatcatcttgcctttaatgtttgtggtcctacacaaactattagtacatttcagtatcctcttacccctttgtttttaagtttttgattgctaaagcaagacttttttcttctagaatttaagtcaaccaagtgttatctatgttgtaaaaatggataatagtagattttaggtgataaaacaacttgttagtaagacatttcctagcttaaaaaaaaaaatcaaaaattccatgatagaaatgcagacctgtgagggaaactcctgaaaagcataagaagcatcccagagagccatgggttttctagaccagagaatttagagggagattgtggaactgaggcttaggtggtcagatcgtttcccttatcactgtaatatttctgggggaaaaatgctttctgagttgtttaaacaagcatccttacattttttttttaattaaacagcctgtctaggcttgggattccctaatactacagtagcagtatatgaatatgattttgtgattgtgttttttaaaagataagtaatttgatgaactgttcttttgcagtcagaaaacactcacaaaaagacaaaaaaagttccacagtattatatttcatgtcagttcaggcctaaaatcctttgcaaataagatgtttataggctggtcacaattaacaatgttattattggcagcacttcttggatggataccttttgggacctttcattagaaagagggaaagaatggggtggttttgtatgggctcctgtttggggtaaaaatagcagagtcagttgctgaggacaatgaccttccttataacatttagtttcatacccatattaggtcttgtcttgaggaccctttatatgtgcttgtttactagtggccttccagccatagcattcttacctttttttcctattctaagaattaaaaaaaaaaattatagagccagcaagggaggaggcaggaaacagaaatcgaatttcatcattccagtatagttgtccctttttttgtatttctgacttggttttataattatatttacttactaattattgttttttaacattctttattgtggcttactcttcatacttagaattgaaattgttggacatcacatgtatattcacattataaatacatcattcttccactgttagacctttagattgcttccagtttttaatattctaaataagactttcaacattttctgtgttttagctcattctcttaggacattcttagaagttagaaacatttctgctgggatcgttggagggaacttcaaactttggaatctttcctgcaagaaattctttaccaaagaaaggcaggtgtttcttaaagggatgcaaaagatattttgcactttgtatgttccaaaacatttagtaagttaactaaaaaaatgagttaatttggtttcttgggggattttaattttttaatttgttttctggttatgtaaaaaaaatgttttttttttgcttcttatcacaatccttttgtttcctttttaatcctttaataacaccttcaaattttataagactttggcttatttcctatataattctttttttcttataccacctcttaagattgatatgttcatttgcaggtaagcattaattattagataaagagggatgattctcaagattgtgtgtgttctgaacagagggaactacatgacattttcttctgtaattgcctttgtaacgtctttagaatgtggttcctaaatattcctggataaattctcttgataggcccattggaaaggctaatactcccacccagtgctttgttccttcctggcaaaagaattcctaaaaccactgattttagttactgacttctcaccatctggactcttacaagatgtttcagaagttgtgtagaacttgtctttcagttgacttgtggctgaatttactgttacttctctaatatcagttgttttctgcattaccaccctctcccctaaccatctgtactatgaatggaaaaggaaaaagatggaaaaattatacctaggattgtccctaaatgcaacctcttggttccccccacccctcatgttttattataaacgattttaagagctgggcatggtggttcatgcctataatcccaatgctttgggaagctgaggcaggaggatcacttgaggacaggagtttgagaccagcctggacaacatagtgagacccccatctgtacaaaaaaaaaagtgctacttgggaagctgaagtgggaggaccacttgagcccaggaattcgaggaggttatagtgaactatgattgtgccactgcactccagcctgggtgacagagcaacaccttgcctctaaaacaaacagctccaactattttatttttttatttttctgagacaagatgttgctttgtcacccaggctggagtgcagtagtataaacatggctcactgcagccgaactcccaggctcaagtgatccttcctcctcagcctcccaagtagctgggaccacaggtatttgccaccatgcctggctaatctttattttttgtagagacgaggtcttgctatgttgcaagagggagatcacttaagtgatcttccctcattggcttcccaaagtgttgggattccaggcgtgagccactgcaccccgcctgacctaactattttaaacactactcatattgccatcatctaaattcaacaacaatttgccatatttgctttatgtatatgtataattatatatttataaaattttttgaaccatgtgaagttgcaaacatcattgaacttcaccactaaatatatcagcatgcatctcctaaaaatcaggtattttcttacaaaaccataattctgctatctattatgatttaacattctgtcattttcaaatttcttcaggtgttttttgttacatcttaaagaacagacgttcttggatctcaaagattccgaggaaggaaagaacatggtggataatccataattaagaagtttgaatcttttcctagtcttaaaaacaaagtgagaactaaaggggtttaccttccatcaaagttgaacaaattaattcttttgtgtgtcatactttctgtctctctccctaaaaacatgggggtggtaatctctttgttttatctggtaggttttccagataaaagattatacaggtttggaatcttaatatccaacccccaactccaagccctgccccaacaacaacagctaattattttacatcttgatgatggtaaatttttcatgattaaccaattttgggcacctattccgccatatatggttttatttaattttcacagcaacacttcaaagttgatattcatattctaaatttatagatgaacgaagaggctcaaagattaaacaacttgctaataagtgatttttacccatgctttttccattatattatgttttggatttttccagagtacccaaacccagcagatgcatactgctccaaaataaatggaactcaatactggctctgtcaagtgtctcttgccaatcaattgtccttctaatcttttgaggggcagttctctcagttgtaccaagtcactgtcatccccaaacttttcaatgattccaggcctttaacaactcccctccacctccaaaccctctctcaccaaattgtgtaatttctttgtttactgctggcttcatcatgcacttttccttcatagcctattttaagaagttgatttgctgaactgctttttagccaagctatttgtaaatcaagctacacaaagtatgtggccataatttccaaaaggcaaatgatcattgttcaattgctgttgctctgcagtgtgcattcatgcagttaaaaattgtactgcattgatagtacggcatcagagaatagatcacttaggttcaaatcccagtgcatgatcctgagcaagattatcatatctagatacattagtttttatctgtgaaatgggaatgatagcacaatcttcatagaattgttggtaaggattaagtgagttgatatgctcaaagtgtgcatgctggcatagaacaagtcactgtttacaagcctttaaagaaggagctgttctggcactgtaaacttgaaccttttttccccaaatctaatggatataggcaaggaaattatatttatataaaataaatgtttgactacctttgatcataaactttattctcatcttgacctgttcctttgaaaagataataaatactgatatgtgaaaaatgtatggacagattattcagatgtctggttgaggctttacagttttgtatatttctgtcagacattaagctgactctaagcagtggaggtttggtttatgcccctaaattacacagcacttcttttctccattgtatcgaggggtcattcaggggttgctgttctggagatggaagcacatgtctcctgcctgggtcagaagcgtcacaatagcacaagcatttattcagcactggcctaggagaaccattcatttagtcaaaacaagcatttatattcattatcctgaacaaaaaccagactaaatgagaacatttatagctgctcaggcactctgctaattgctatgtctgctagacaaagtgaaatgacacttacagtgactatttaaaaataatttggagcatgaatatttgaagctcagttctttttacaaaggaaatgtataacctttgctcttcattttttttggcagttatttatagatccaggccctgtgtcaagttctgtaatagatgaatagacagtttatgctcttggagagttaacagtaaaaacagaaacagaaacacaccccactgataaagtgttatataacaccccattaagttccacaatgatgtgatttgtgaaatggaggggcagtagggcaaggtagaggatatttttatttgtatgttacagataagaaaactgaactcagaaacaagtgactttccaaggccaaatagctggttaatggcaggattggggtgggaccccagatcttctgattctaatcttttttttttgcaagtcctttttagtgctatacaatgacaggtgattacagtggaaaacctcacttatttagcaaatgtcattcacttagcaaactacttagcaaaatgccatgagtatcttctgtgtgccagtcattgttctaggcatcgtagatgcagtgagtgagagagggaggcaaagaccctatctttatggatcttacattttcatggggaggcaaagaataagcaagtacaggattgtgatgatgatatatcataaagaaaaataagacaagctaaggaagtagagagtgatggcagtgcggagagtggagtaggtgcttctttagatgaactggttaggaagatactgtgatgagagggcacttgaacaaagacctgggaagtgaatgcatgaccttcatgcaaccatggtgcagggaggtaagggaagagcatttcactcagcatccctccctgctgagtgaaagcagtgcggagatcctgagttaggaatgagcttggcaggtttaaagaacagtaaggcaagtattactagttggagtgagcaaggagcaaccagaatctaattcacattatccagcagaacgacatgaatgctagttgaaaaatacagttaacattagcatttttactggcttataatgcaataactttgagcccaacctatttttttcctctggcttctgagcacatgttaatatgtaaggaagatgaaacatatatgtaaacaacttatattttagtaatgatacaaaatactttcacaaattttgtgatgtgggaattttttaaaattccattttcacagatgagacccctaaagctcagagtatatgcactttgcccaaggtcagagttagtatgtgaggcaggaatagaccctagatcttctggagctaaatgtactactcatttctctgtactacccttatcatttagctatggtgaacagaagatgaaccactggattctagaaagcagggagttcaggaacaacgttgtccaaccaatgattcattcatctagtaaatacttaggagcctactttgtgccaagcactcagctagcctgggggtataaggatggttaagactagagtcctgcctttaaggaactcaccagtgccataggagactggtggaaagaggattataactcagttataaatcagtagctagagtaaaatacacctaaagtagttcactaatacattaattggacaaaactagtgcagaacctgatatatactaggtactgagatgtttgttatcttacctgtttttctttaacattggtaagtactgggggctttctttgaaactttcctgcttaaaatcagtcagtgattgacaggctcctttgcacagtgtgaatggcaggggctgtgaaaaagaagagaaaacagtttctcagtgcctgtcatttctaaatgccatcagtatccacctaattttctaagctagaatcttataatcacctcctattccttcttctccttcacttgttacccgccccacatctaatcagtcactaaattctgtcagttctaccttttaatgaccctggagcctgctggcatcttgccattgtcatttccagtactacatttcaggccctcattatctcccatctggaatcgatagctcctgactggtcttgttgcttttcatctctctcgcccttcattccacctctcatttatcctccccagtgctgcgagagtgtgctttccaaagcagatctgatcctgccaccattctgaaaaaaagcatcctgggggactatgtgacctgcagaaagacgtccaaattccttagcatcctccatcttgcaccaatttcccctactcagcctcactctagcctactggataatgcagtttcctgaagttaccacactattaagcctttgcccatgctgggtttgtgtgtgtgtgtgtgtgtgtgtgtgtgttttgagacagagtctcactctgtcgcccaggatggagtgcagtggcatacactcggctcactacaacctctgcctcccaggctcaagttgattctcatgcctcagcctcctaagtagctgagattacaggcacgcggcaccatgcccagctaatttttttgtatttttagtagagatgggggtttcgcgatgttggccaggctggtcttgaactcctgacctcaagtgatctgcctgccttggcatcccaaaatgctgggattacaggcatgagccactgcgcccagcctgcctatgctgttttttctgcctagtgtgcatatttctctcctggccttcagatgacctgtcactcgtttttcaggacccaactcataggacacttcctctttcaagaggaatgccagatgagcttttggagagagaaggttagccattaagggggaaaaaaagaaagatagggccagagttgtaacatttggtaaactctgttaatggacttgatatgttatggttatttgtgcatttgtctctttctctcagatttactgttttgtgtttatatccttagtatacagcataagtgctcaataaatgtttgttaaataagtgaagtaggtatggggagggaacaactgtttattgagcacctattgtaagcctatatgcttttcacacatcatctcatttaaacctcaaaacaatttttttgatttaagtattatttgctaataagaaacagtcgcagaggacataaatacttacctctctccccacccacaaaggttatgggtttgtgaggaatggaactaaagttggaacctaggtctgtctgactccaaaactttcctctcttgtgtgattctcagacagggacaattttgtcccccctttctggggacatttggcaatgtctggagatattcttggttattataatggggatgttactggcgtctagtgggtacaggtcaggtgtgctgctaggcatcttccaatgcacagaaaagccccacaacaaagaattatctggccctgaatgccagtagtgccaaggttcagtgtcttcatctgtttgagctgctgtaataaaatagcatagactggatagtttataaataacagaaattcatttctcacagttctggaggccaggaagtccgagatcaaggtgccagcagatttgatgtctggtgagggatacttcctggttcatagatagccatcttctgtttttgtcttcacatgatggaacgggtaagaaaactcaccagtctcttttgtaagggcgctaatccccttcaggaagactctaccctcatgacctagtcacttcccaaagtctccaccttctaataccactaccttgggggttagttttatttcctttccttccctttccctttccttttctctttaaagcagttgttaacatttaatgaacctcctgttatgtgacttcaagccaccaggagaaagctccccccactgaatcttctcctgagctcttctgctgaagaatttggccttcacgatgacaggctggtttgggaacttttcccttcccagaactctatagtagcccgatggcaccacatcagtgatgggagctgttccaggcttgtttttagcagcattcacctgtgtctgcttcctgaccaaagcccacaatttgtcaaggttgacagctgggtagaagctcaggttcctctttaggtggtaatgcctcataccaactttcctaaagtaacctgggtgacatttgctgaagtcgatcctgtggtgatgcatgccgccagcattgccacggccacctgggtgctttcagtgcttgctgatgcggcagaggctgtggctcacctggctccaaaatttctgggtcctgtggtgactacatttcctcagtctggatggctgtgtggaaaaagaagcttagtggtaaggcctaaggaagaaggagcaggggcgatgcttgccagcctgagatgggcctgtaggcctgtgggccaaggacctgccatctggagcatttggcaaagttgaggggcccatgtgtcttcgagacccgaatctcaggctgaacagggctccgccctggacccacctgagctgcactgccctgctgacggtcaggtgcggcctggaggtcccgatcaaggttgagggtgggtggctgagggcaatgggagtagagcttagggtccctgctaacaaggaagtggaggcaagaaagggatcctagttttcaacatttgaaattttggaggacacagactttcattctattacattgagaaatcctgctctattccatgttgactctaatgaaaagcaattcatcagacaaaataaatgcatccatgaccccatggggagtcagattgggcttaagagaagtcctaggggcttggggccattcatgagccactggcattggtaggatagaaagactattctgtctagtccctgacctgcctttgatcgtatggttcttactctactgcatccacccggtccttctgtctcttctccacctttccttttcttcagtagactctaatttagcttggggaaggcaacccagaaagctccagcattttctaacctcttttctaattagaagatagagttagcatataagaagctgcaagtttcaacttgacaatatctctagaactgagaacagggccaaaaatgtcaccctctgaaattgacagtaaaatagatgagattattcactgtgataatcttcccagaaaataacccacctaagaaattcttggtaagtgtgctgctaagccttggctgtttcctaatctcagccagggtccaagaatgcctccctgtaaagaaaagcatttaaaacgtaacttgtgcattaaactagtaatctaggaaattataaagtgtttgccttggggaagtgttctaatgggggacacttttaatgggtcttaagtgtaactgcctataattgttggggatgctttgtgtttttgtttttctatctctcaacataacaaatattaggagagaggaaccaggtttattttactggtgtctggcagcaaaggcatggatgagtcactgctagtgaagggtaggaattagtggtgtgtgtgtatgggggtggcggatggtcacagaagtcttttccttggtaaagtggttttaatcagaagcccataaaccttggttgtgtgcaaaatgtgtgtgtatttgtgtgcattttttctgtaaaatgtgtctgtagcattcaaagggttctctgacctccaaaaagtaaaacccctgccttggtgattagaacatagctaccagggacaatgaaatagaagataacccaggaaaggcaagggaagtgagtgcctcgtaggagagaaagggttcattttgagctcacatttattgattgtgcatgcagaaggcctctttacatacataaataaggttcctaattttataacaaatattgggagcccagcatgcagtggaaggatgaactgtgagaaaacatcaaggcagaacaaatccagcctggtggatgctggagaaaagtacaaagggtgatgagaggacttggaaagaatgcagtgtggggagagaaagggggagagagagagagagagaatatgtgtgtgtgcacacgcatgcatgtgcacgcatgaatatgaggtggggaagatgaatattaagttgttctacatatgtcaatatccatgctgagtttagattccacagatgccctggggtagccaatactaagagaatggttctgtaaagctgagttctaggaagctaaccagacaattaagaagggattcttctaacgttcttttcaattttaagttacagaaaccaactttagctaaaggacttaaaggatactggacaatccataaatccctaggaaagaactgaacaaggaagtctggggaggcaagagattggacagtttggggacttccacagcaggtgaccaactccagtgacctcgtttccagatctctatatttgggttttaaattaacaagagaggagttagctgttgggacttgtaccagagaaggggaaatcatgagccaaggaatcaccttggttgttgaccaaagtcattatcatattggtttagagcaggtgtcctatcttgaaaagtgtgcgagactaatacccaagtcttctgattgccacttacacgcagcatgctctcaaggcacattcacaatttcttaatattttaaaaactaattaatagggtttgggtaggaatagagtgggggactttcaggcaaagggaacaaaaagtgcagtggccttcaggtaggatgaacttggcatcccagaaatagaaaaggctcttgtggctagagaattatctgcaaggagtaaagagtagaagaagggcattcagaggcttgattgcatcatggtgagaagttcagaggtttttttttttgtttgcttgtttattttcctatgtgcagccgaaagccactgaagagatttaagcagatatgaattacattttttgaaaaacactccagctgctcaatggagaatggattctgtgaaggcttgaataagagtgacagtactagagatggtaagaagtgggttgattcagcatgcatttttgtatcttggggagagaactggcagaacttgttgacggatttggtgtcagggaaaagaaaagggaaatccaaagtgggtgctaggcttttggcttgggcaactagatggatggtaatgttcttcactgaattatgaagactgatggaaggagtagttttagggaggaagacggtttggaatcgatcgtgtcaagtgtgagatgtcagcagtcttagtgaggaagtcagagggacagtcagatatatatttgggaatcaccagattataaatgttgcttaaagacaagggcctgggtgagattgcttggggggcctaagaccgagctctgggcactgtaatattagataatctagctgggcagcaatgggcaaaggaaactggggagaagtcagttaagtcagagaaatgctgtattatttttaaagtgtgggatttttttttttattttttttgagacagagtctcactctgttgcccaggctggagtggagtgcagtgataccattatggctaacttcagccttgacctcctgggctcaagcgatcctcctgcctcagcctcccaagtggttaagaccacaggtgcatgctgccatgcctgtctaatttttgttttttgattttttgtagagatgaggtctcactttgttgcccaggctggtttcaaactcctaggctcaagctatcctcctgcttcagcctcccagagtgttaggattacaggtgtaagccactgcacccggccaaagtttgggctcttaatttatagttctttatagatgtttgtaatttctctatatgatagtttattttggacacttgtgttgtttatgaatctattctcatattagtctagtaaatgttacacactttgcagctctagatttttccttgcttaaattgttggcaaaatctctctagttttatctttctgtgtgtttgaggggctgggagccatcccctgttaactgggcatggaaggaaggccaagtctgccattaagtctctttttgagcctgtatatatttgcataaggtccattaactatattaagtggtcatagataaaccagatacttataggcaactctaataaactacatgcagctttgtagattatttgcaataaaattttaattttaacaatcctttaattgttaaattaaagcctgcctaagctctcttgtagtattttgcatatgtctggggtggatctctttattggcttttggcatatgcgtttggtttaaagcagtccaagcaaaacataagtagaaaggtaggcttactgattatatatggtatatatatttacacacacacacacacagagtaaacagccataagaactatgtc

SEQ ID NO: 649 - DNA, 1049 bp, Homo sapiens
cctggcgggtgggagatgcggcggccacctgctgcaaagaaccgaagggaaggttagaagtacgaaggcagtttggagctggggctaagcagctgtcgcacggtcagatcatgggctccaccaagcactggggcgaatggctcctgaacttgaaggtggctccagccggcgtctttggtgtggcctttctagccagagtcgccctggttttctatggcgtcttccaggaccggaccctgcacgtgaggtatacggacatcgactaccaggtcttcaccgacgccgcgcgcttcgtcacggaggggcgctcgccttacctgagagccacgtaccgttacaccccgctgctgggttggctcctcactcccaacatctacctcagcgagctctttggaaagtttctcttcatcagctgcgacctcctcaccgctttcctcttataccgcctgctgctgctgaaggggctggggcgccgccaggcttgtggctactgtgtcttttggcttcttaaccccctgcctatggcagtatccagccgcggtaatgcggactctattgtcgcctccctggtcctgatggtcctctacttgataaagaaaagactcgtcgcgtgtgcagctgtattctatggtttcgcggtgcatatgaagatatatccagtgacttacatccttcccataaccctccacctgcttccagatcgcgacaatgacaaaagcctccgtcaattccggtacactttccaggcttgtttgtacgagctcctgaaaaggctgtgtaatcgggctgtgctgctgtttgtagcagttgctggactcacgttttttgccctgagctttggtttttactatgagtacggctgggaatttttggaacacacctacttttatcacctgactaggcgggatatccgtcacaacttttctccgtacttctacatgctgtatttgactgcagagagcaagtgttttttgttacatcttaaagaacagacgttcttggatctcaaagattccgaggaaggaaagaacatggtggataatccataa

SEQ ID NO: 650 - protein, 308 aa, Homo sapiens
MGSTKHWGEWLLNLKVAPAGVFGVAFLARVVFYGVFQDRTLHVRYTDIDYQVFTDAARFVTEGRSPYLRAYYTPLLGWLLTPNIYLSELFGKFLFISCDLLTAFLLYRLLLLKGLGRRQACGYCVFWLLNPLPMAVSSRGNADSIVASLVLMVLYLIKKRLVACAAVFYGFAVHMKIYPVTYILPITLHLLPDRDNDKSLRQFRYTFQACLYELLKRLCNRAVLLFVAVAGLTFFALSFGFYYEYGWEFLEHTYFYHLTRRDIRHNFSPYFYMLYLTAESKCFLLHLKEQTFLDLKDSEEGKNMVDNP

SEQ ID NO: 651 - DNA, 47286 bp, Mus musculus
  misc_feature (1)...(47286): n = A,T,C or G
gaaggggtccctggggtgtcaaccaatgacactttgacagaacttctaacatcggacattgagccttttaaaatggcttaagtcttagctacaggcagtgcaatgcgtcataagacacctcctgagcttgaagcctggagcctgataaagcacatttatttcaacatgggcgagggtggtgatgtgacccataggtgttgtaagtctcatggctacaccatgctcgtctctcacccctcgagatctgagtctgctgtccacagtcatccatatcatagcctcggattttggtcggaggatagtgacctatctatggatagtggctaattgcacaggtacaacttctatgacctacctcgcgtacctaaaagcaggggtggggagccatggtggccatggttgggacaaagagctcgctaaagtgattaaaaaaccttcctgtcagctgtgtccctttacagccgtacacagctcaagcactacagacacttttaggagagtaattttagattctaagatgttccaaacaccaaataggaaagatatttttctaacttgggcatgttaaacagctcatagcagtccatccaaaggagctgggaccattaccagggcagagtcattacaccagacagaagtatttgccagggacctggaacacagcctcctgtccctgagaggctgaggaaccccagccagctggcgccaacatttccagtcgtctgcttgtactgcagccatgtggatccttactgaaaagcctgagatttctcaaaaagaaaggggaaaaaaaaaaaaaacccaaccaaaaaaaaaccttaacagtctaaaatttcctgaaaagcagtgcacttgtgtaggcctgggggatgctcagtctccaaactgcttgcttcatagatgcgaggaccccaagttctgatccctagtgccatgtgaaaaagccaggtcttgggccaggcgtggtggcacatgcctttaatcccagcacttgggaggcagaggcaggcagatttctgagttccaggccagcctgcctggtctacagagtgagtcccaggacagccagggctacacagagaaaccctgtctcggaaaaaaacaaaaccaaccaaccaaccaaccaaccaaacaaaaaagccaggtcccgtggtgcaaacctgtaaccccagaactggggaggcagagacaggagggtctctgggcttcctgactaatcagcatggtggaaaggatgaaggccatgagagaccctgcctcaaagaaacaaagagcaaagacacctgacaacaacctctcgctttcccatgcgtacgccttcaagtgtgtgtttaatcatgcgtgcacacaagcacacgcttatttccccctcactagcctacacccgatttaaaaacgcacaaccaccatagcccggcctgatgtttgttttaacttttttttttttgaaatgtgttttcgaagtttttttcactattccatttgtgtttacaaaatgagtgcattaaagatcttttagtgagaactattaattgataaggaaatactctgaaatacatttgaagtatcttgcttgaggtgcccaatggaagcagagggttcaagtgtccctgcctcctgagtgcaccttcttttcatcctgcagcttcatcaatcatggtccctccggctctgcagtcatagcgtccaggaatggagaggaaattacttccagtcattgctactctttgctctggtttggcaatggagtctttccccaggggaatcccatgtgttacagctttggctcccagttggtagtgctattaggagggaataagatcagcactgctactgacccattcctctatatgtgaggagaacgcagccttaatgagcctagaactttctgggctattaacaggcagagcctggttggaggaagtagctcgctgggggtatccttttgaagaatctatcattatctgtttacttttagaaaattattgggctggtgagatggctcagcaggtaaaagcactgactgctcttccagagctcctgaattcaaatcccagttcaaatcacaaccacctgtaatgaggtctgacgccctcttctggtgtgtctgaagacagcaaggttgtagttatttataataataaatcaatcttgggactaagcgagcaaggctgaatggagtgatcagaggtcttaaattcaatacccaacaaccacacgaaggctcacaaccatctctacagctacagtgtactcatatacataaattaaataaataaatctttaaaaaattacactattcaactttaatcccagcatttgggaagcagaggccggtggatctctgtgagttcaaggccagcctagtctacatagagaattccaagaaagccaggatgtgtattagtgtgaaggagtcagatgcactggaatttgacttacagttgttgtgagctactctgtaggtggtgcgaattgaacatggaagagcagccagtgctctcaatcactaagccatctctctagtcccctggctaacacaatttaaaatatagttgaaggctggagagatggttacaagctcctggtcttctagaagacccaaattttccgggcggtggtggcgcacgcctttaatcccagcacttgggaggcagaggcaggcggatttctgagttcgaggccagcctggtctacaaagtgagttccaggacatagagaaaccctgtttcaaaaacaacaacaacaacaacaaaaaggaagacccaaattcagttccctgaactgacatgatggcttgaaacccactgttccagggatctgagcccttctgatgcacatagaggcattcaggcagcacactcatctatagataaaataaatctctccagggaggatcacacttagatgtctcggtcgtttctacattttagtgtctcttcaggtacatcgccaagggttgataagatttttgttttgattatagggtggctctggaggttctgtgaatggaatttcaatctgataagataaaaccaggagccacagaggctgcccagaggagttaggatgtgttgttcactcatataaagggagtttctgataagattcctagaaaattgcagggttttagctgggaaaggagaaaggatttaagcaaaagtcacttgtgggtgattcttgattctcagcaagtgaggggctctcccttcccatggattcaacattttctctgtccttccgagagtgcgtgtgtgtgtgtgtgtgtgtgtgtgtgtgtgtgtgtgtgtgtgtgttctaccagaagcaaaatgtttttctatccagtgcctcgatcccaacactcaggaggctaaggacagagggtgatgagtgcagaagtaacctgggttagagagaaagtgagtccccacctcaccaaacaaacgaacgaacggatgctacacacaaaagagagactgggggagtaggaaggggtaaataggggtttggaaatatggggtaagtgaaaattatcaaaatctaggagaggagtgggctggccttcttatgagggcagggagctagggggctctgtgttctagtgtttctggaacaaacagcaagttttcccatgagcctcgagttttctcagcttgacgctttaaaggaggacaagctgattctattgatgtggtctgggaccgcttgcccaagcctgtaagtcaaggctaaggcctagtaaagaagaaagctcaatcaagacccccagagcaaaccaaacaacagcaaagatcaaaaacaaaaaagagaggagaaagaagaaagggaaaggaagagaagtgctaggaagaaaaaagagaaagagttggaggaagaggacagaagttggagagtgcctggctagagtgtagtcaaggagagaatttttgtgaggagcgctttgggtagttagggttggtattagtgagttatgagtgtcaaagaggtaagcaggaatgtaaggaatgtatgttgctaatccagcctgctctgtgtgttggcatcaagacctcccaaacctatgacatcacataggccctgcagacctgttgccaagacaacaggcaccatattcccagaattcatttggctcacctcccacctttacctgcattatgtcattttccatataaataaggggaatgcctcccctctctctgcccaccccccatctcccatctttcccaataaaccctctcacatgtggaactgtttgggcccagggtgctgtgttcagataccagccacttctttaacacatcagtgtggaaagcaaacagactgagaacttagctcaggccttgctactcaggaggcaggaggttctcatgtccaaggccagaactcattcctggctacagagtgagttccaagccaatttgggaaacttaaatacaagcctgaggatgtagcttagtggtaaattaattgtctagcaaacccaaggtcctaaatgcaatctgtccctattattaccaaatgaaaagtcaaaacagaccgaaagaagatacacaaccatgcatttttttttcctgctgaaatatttagtgctgttaattcagcaatttaactttcaaatgaatctatattgtatttcagatatattttaaatacaattttttttttcccgagatattcacaaaatctagtcactttatgtgtgttgtcttagtcagcttttagttactgtaacaaacacctgagctcagtcatcctgccaagaaagatttgctttggcttatggttttagttcagggccagttgcccttgggcctgtggcaaggcagtgaaccggggatgctaagtgtgtgtggggcaaagttactcacctatgtcctatggtgaggaagtaaaaaaaattaaaaaagaggtgttcgtggtggtgctcacctttagaaacctggctccaaaaccaaaccaaatcaaaccaaaccaaaccaaaccaaccaaccaaccaaccaaacaaacaaacaaacaaaaaacccaaaaggaaaaaaaattaaagaagaggagaaagaaagtgtggttccacagtctccttaaagtgaacacttctatcgcatagaactcctagacttgccaggtgttgtgtgaatgtctttaatcctggcacttgggagacagaggacagcctggtctacagagcgagtctcaggacagtcctggtacacagagaaaccctgtctgagaaacaaacaaacaaacaaaaaaaaaccaagcaaacaaacaataaccaaccaaccaaaacaaaaacaaaaacaagaaaaccgaataaaaactcacagactccatctcttaaaggctctcccccacccccagtagcatctcaaggttctaacacatggaactttggggatacttcccaaaccacagcatgtgtgttatggataaaatagttcggggccctcagatgacccttcccacataagtctagtgacccgagttgaactcctggagtttacatgcatgtggaaggagaaaacggattccacaaaagttgtcctttttttttcacatggatgtgctgacacatcattataataacaaagttcagtgcattattatgccctaatagggtggttttgttgttgtttttccttcttcctaagaccgggtttctctgtgtagccctggctgtcctggaactcactctgtagaccaggctggcctcgaactcagaaatccgcctgcctctgcctcccaagtgctgggattaaaggcatgtgccaccactgcccagcttcccaatagggttttttaaagacagttattcattcagtttcattttgctctttttttccttccttccttccttccttccttccttccttccttccttcttccctccctccctccctccctccctccctccctcccttccatccttccttcccttcttctttccaagacagggtttctctgtgtagccctggctatcttgaaattctctcaatagaccagaatggcctcaaactcacacacctgcctgcgccttccaagtgctaggactaaaggcattttcaccaccctccctggcaagaatttttttcttgtttcttttttaggaattcactcttgatacagtttaactatcagttaatggatgatcttgctcaagttaatgaagagaaatgaatgaagactcattatgcaactatgacttttaatattcatcttaaaatattttatcatcaccctcaaacattttaaaatagatttaatcacactgagtattgtattaaaaatagtaggaagattacagtgatcttgtgcataaggtaggtattctgtgacagtgcctggaagggaaggcacatgtgtggttctccaggatccacaatggggaactgaaaggaactgtggtcagagtcggggaggaagggacccaagggtgagaggccgggtgaagtcaatgcagtttccctgaggagagcagcgatgagtctgctgctcccaaatgtggataggtgttcacagctattttctcatgacctgggatcacccacccagcacaacagaggcaccttgtactagatgtgatgcttggcaatggttaggaggcagctgagcccaggttggataaaggggaagttttgggtccttggctttctcggatcccgggtcagtttctatcccagtatttatgtgctcaatgtgatcctgggtcagttttattattgtccctgagtctcactttctctacactaggaaaggagatggtatctactcactgtgataaaaaaatgcaaatgacacccagaagggcttcaccagacaccagccccaccccgactcctgctgcgatgctctcagcggctcccagtgggtgtagtttagtggtggggtttgtaaaaatcttgggagctagatagatctcaatggtcttcattctaagtgaaggcataaccccgtagccattggttgaactattcagtcacgctgtgggtggagccagagcttcactaatggcggccctgtgtggatgtgcttgaccctcccacccacaccttagctcttctccctccacacatggtggatgggtgggtggagactgtctttgggaggaggagcagggtcatacactgctgacacagtattccgaatcaggacctgaccgcctcttgagatatacagtaggtttatttttctcacttttttatttttggtttttcgagacagggtttctctgtatagccctggctgtcctggaactcactttgtagaccaggctggcctcgaactaaaaaatccctctgcctctgcctccggagtgctgggattaaaggcgtgcgccaccacgcccgactggtgcatggttttaatgccagcaggcaagcagatcattgtgagttcaaggcctactgagaggctctacataaagagggtacaaaacaaaaaaagcaaaggccatttagcacagttgaagaaaacgccagcaggaccagcggcagcagcaagagacacccgaggtataggttttacacatccactaggctgggggagaatttccctgaaggagagctccgatgctttttgtcttttgtcttctttcccttcagacaggatttctctgtgtaggttttatccacactggaggaagctcaaggagatagaacccggctttctggaggacacccaggacagttggaggacacccagaacacagtttcacagtcagcaagctcactggtgaacttaatgggcacagatacaaagtgtataaaacgtatttcctatgctctatgagtatggatgcctgtggcacagagccctgtgtgtggcaagtactttgtgaagttttcctgggatgctgcactctggaaaagagaggaacattctagagtgtcaaaggaagggccggccagtctgtggagacttctggagagctggtgaggtggggtagataaagagcaagcctggggaggtccagagaccaccacatctgttcagattccagcaggccagggtttctgcatggctgtcccgtgtcctgctgaagttgggatatttttctgcagagaagtatttctggactctgagagcatccaaacatatttttaggcttacttcttagctaacagtcagagaaagggatctttaggattgatttaccaggggctggggtgtggctggccaagggtaaagggtttatgctccacctctagcttttaaagaaaaagatgaacttggtagtttaaacaggctgcagtgaggctacaactcacatctaattgcaaattatgcaaccatgagatttagatagagaaagacccaaaatccattaagaacttactgatatacatgtggttaaaaaaacaaacaaacatttcatctacctgaatgtactgattacaaatggcaatttcgtgaatctgaaataagagaatgttataaggaattattgccagctgcgtttcccaatgaacagctgcatctaattttcacaattaattagtaggtccggatccatgtccttacctcttctaacttattaataaaattaaaaaatttaaagttaaatgttaaggaaaagcaggaatgagttctgtatgtacccatgccttgcacacacaaacatctttagtgaatataaggtatgatgttgaattcgtatacaggcttatttgtgtgtgtgtgtgtgtgtgcaagtgtatacatgaaggccaaaggttagtgtaagttgtctttctccaactgcgcaacatcttgctctttgagacagggtgtctcacaaaatcctagctgttaccaactgagtccagggagatctgtttgtccccagctacctctgtccccttcattatagttacagccttttgagagcaccttcctcttgttttaattttagtgctgagggtctcaagtgctcacaaagttcttattctttcaaggcagggttctttatcatctgagctggctctccagcctcactggcctggtccttttgaagaaactataaaccaaagtttacaaggtttccccgcctctggtcttttattttgtaagtgaaaatgcttatatgtcctgtggagggaacccaacggaaccttggctctgggtttgaggagtgaaggatgtctttggtattagtagaatttatctcaaacgacatccttcccatggtgttttcctgtgttatttgccgcaggactcggagtaggattcgtctttaagagctgaagcttaagggatttgccaaactttacgtttagaggtttcttgatgcacacatctgtggtttagatttccacccagggcaaccccaacggcaatgacaaatcaaatcgtggtgagcactctttcttaggaagggctccgaggcacgcacttactcactcgtttgtagctgagaaggtgacagcgctgtgcacctgaagccacgctgcggatgaaaagacttatttcagccttgcatctgaacccacagtgcttccgaggcaggaagacactcagatgtatttaataagggatgttggaaatacctttaaaaacagcacggcgaagtagggagctttaacgaactgctttgaactctcaacccgagaggaaggaaacaaccagtggtggcaagtgtaagggggggggggagtttgggggctccggcctgggcctgctggggtcgggtccaggcgggacgcgaagcccgcgggcttcggccgtggccggactaagcgcgcggcccgctggctcccgaggttacacacggaccgagagccgggtgacagcagcggacgcttttgcctggcgtcgcgcgagcttcaccctcctcccagaccgccggcctagatcgctccgcaggagggcgcgagccaaagcgcggcttggtgcctgggctgcggagataaaccgggtggggacgccggacgctcacgagcgggcgggctggacgcgccactggccctcgaccaatcgccagcgccggcgatgattcaaaaggtcgagggaccaatggggagctcagggcagcctcgctaggggcgggacctcgggggcgcgagagcgcggccggctgtgtcgcgcgcggagtcgccgctggctgctggtgactgtcctggagtggctggagttcccgccggagcgcggccaggtgagcgtcggcgcgggactccgccgcgtgtggagagcgggttccccggggcggccggcgaggctggggccgcgcgggccggaagtcgagcgcgggtttcggatggcggacaacccccgatccccgtctcggacgcgcgcgttgggtgccccggccgggccgggctgggctgtgctcgccgcggcttcccggccctcggaaagcgggcggccttcggaggaggggttaaccgcctctggctcctgccagggcgccgtcccgcctatccgggcctcctgagtgcttctgcgcggtgacagcggacctcgcgcctccagcagcttcgagggccactcagtgcgcgctggggtgcggagggcctgctccggggcacttcggcgatggcgggctggcctggcgttgcgcccgcccgccctgtgtagcgcacttggtgtgctagggccgtggctcaggtgcaggagcaggactagatctggggctacaaagtagcagctgctctgagggttagaagatggggctacagagaagcgcgggatggaggacctaatacggacagagagggtgatgatgagcgttgactggggagttggggcgggagtgagtaaggactgttaagattagcgtgcttttgggtattaagggaaaaggccactctgccaggacagccagctttctcctgcacggctctgaaggggcacagaccctgcgaacgccttcctgtttgcgttttgcctagcaggcctgtgccggctcaggtgttaaagggtagctgtgagccaccatttgagctttttctttctgccacattaagtgaatttgggagagggggggaaacgattaaagatcttagtaacgcaccggagcatcgtagaaagaaatcggccacactgatacatagtgttatattgtaccataatatgtgaggcgttcagtgccaaatgaccctcgggttagcaagaatctgggttgacaggaaaaaagcctgaggattcttgaatttctgcggtatgtggttgagggtacagtttagcgagtgacttttctttgcaaacaacctgtttgtttagggaagcctgtgtgcgtctcttatgcgttacttgggtgcataagaatacacgggagtctggagcctccttgtcctatccagtataattatctcctgttgggcaatattttgggatgtgttatgtagtttccactgactgtgtggatcttgtgcaaagtggcattcatatcttgttggcagcccattttttttttttttttttttgtctcctaagacaaggtcgttctccacatgctatataaaatatcaccatcagtgtcagttcatggtttgtgttgttgttgttgtttgtttttttgagacaagatctctgcacagcctttattgtcctggaacacagtgcaggctaggcagaccttcaacatacagaggtctgttttcctctgcctcccaaagaatgggattaaagccaccatgccctgctagtctcagttcttttcctccctttttttctggggatcaaattttatattacacattataggcatatttttgaaaaattgaggctcaaatatctactgggtgccttgattatgtattacctactatttaataagtaatagaatttttttttttttaaactttgacttgtgttctttgttggactcatagttaatgtggtgtcttcaagatgcagtagagaaacagcagtgagtctagggccataccattctaatcctctggatttcatcagatctctgaagccaaacaggatcagacgtggttagtacctggatgggatgaatggcaaggattggatgcttctgatagttcagaataaatctgttccagggccttttaaagatgcaggcggtccccaagccacaaagtgctcctattgcaagtttttgaagtgttgtttgagatcctactggcaccttcatatagaaagacattgtgggctttctcaaactttggaaagagtaggagaacctaattgatctggggaggaagagaggtggggattcagagaaggaagcccagcacatttccttcctctttgtcccgggcaacttggaactgagtgttgaaatggacagagttttctgttgtcaccttccttttttgtgcccctcctccttgtgcagatgtgagccagtgctctcctgcttcccgagggccctcatggtcgcttctgccagtctgacttcattcctacagctcccaagcatactccttatcccagagatgctatctcacaagttagggggactgaggcaggctcagtaatgaacctcttatcaccagataagcactttcgttttctttcatctgttgtctgtctaaacagatggagcttgggaagtctttttttgttttttgtttttttttccttcaggggattaacagtgaagaaatgttatttagaaagactttcttgggaggggtaggtaatgcaactttctccttaattccacagtctgcaagagtctttagcgttcctgtagagttgcataaccagctcttggcctccggagtgtgtctttgtgtgcttgggtgatgtatggagacttgctcagcaggtgaaggagtctttctgtctgctgcttgcttatcttatcattggtatcagagcactggcttttatcctgtggatctgttggtcaccggagtgagaaataacacctcagagagctcctagcacagccatcatttgatattacctcatgtaaatgataattcttgaaagttgtggtttcttgaagtattgaaggtttcatgggccatgttttgaaacagcggtaaaagatgttacagttggagtaggtgtcagctgtgggctggagaggtgcacacgttagcttaggtgggcggctggcagagttaattgatgtgcatttgggatttgactcagagaatgcaaaccttatgaagtaaacctcaaatatgttattcattatagatttgaagtccttcttgttggtaggttagagtaatgctaatgtacattttttaaaaagatttatttattctatgtaagttcaccgtagctgtcttcagacacaccagaagagggcatcagatatcattatgagtagttgtgaagccaccatgtggttgctgggatttgaactcaggacctttggaagagcagtcagtgctcttaacctctgagccatttctccagcccactaatgtacatttttaattttcccagtttgtctcatggttttattactttccagtaaggtaacttgttaaaaatataacttcatgaattttaaagcttttataaaaatgacatgtagatctataaataaaaataagtgtcctttttgaggtgtgccctgattttactgcagggggtagcattctaagttgtccagtctgatgcctgttacgttgtcagggtttaatcctcagtgccactgtctgcacggcagtgactaagtcgtctcctacagagtgattccagatgaaatagagtgaagctcacacaatgttttgtgttgctctgctgttccctcccctgtgtttgtgaactttgacaaagcgttaactttaagctcaagttctgtcatctatagaataaggagttgcacactccttccttggctttctggccctaaagctaaaaccagctagaaagttgtttacgtgaacaacctagtccagaaaaagaagtaataattattgactaactttttttccttaaaatttttcagactaattttagaaaatgccaagtaggaagtttgttgagggtgaagtggtcagaggccgatggcctgggagctccctttattatgaagtagagattctgagccacgacaacaaatcccagctctacactgtaaaatacaaagatggcaccgaactggaactgaaggagagtgatatcaaggtgagtatgtctgccttcgtctgcagtggtgggaggagctgggggctcatgccagactcctgccttggggctccagggcacatgctgttcttgcctctgggagtatgggagtgaggtataggcccagatcccaaaagctcatgccattgggtctgtgaccatcctgtgaggtgctcttacacaagaaaggaccctggcttttagggattttgttagcactgcttttttccgggctgagtgctaggacagatgggaaactgtagggagggcagcatcccaaagcttgtggatgatgtggtgtggtcaagtactagccggagacaggctaggggcgtttaataggcttgggttttctcttcatctttctcctcttcctcctcttcctcttcctctcctctctttttccttccatcctctcttcctcttctctgtctctctctcctcctcctcccttcctcccctcttcctttcctcccctcttctcctttcctcttctcttccctccttccttcctcccctcccctcctcttattcctcccctcctcttcctcctcttcatcctctcttcctcttcccctcttcccttcctcccccctcttctttccctcctcctctcttcctcctcccctcctctccccctcctttctcccgtcctttctttcctctcctctcccctcccnnnnnnnnnnnnnnnnnnnnagtgtgtgtatatgtgtgtgtgtgtgtgtgtgtgtctgacttcaagtaattttcctcagatgcgctccaccttatttcccgaggcaggatctctcagtaggtgaggatggcaggccattgaactctagggattgtcttgtctctgccttcccactgcagaggttacaaggatatatcaccctttacacatgctgttctgaacccagatggtcgtgcgtcgcggcaaatactttatggactgagccaccgtgtcagccctggatttttgtttcttttttttcatttttcttgttcttcttggtttttcgagacagggttcctctgtgtagcctctgctgtctgtcctggaactcactctgtagaccaggctggtctcaaactcagagattggcctgtctctacctcatgagtgctgggattaaaggtgtgtactaccatgtggcaggacttgggcttcttcctcaacactggtgatgtaatcagagagtgacatttactaggtttgaggtcagctcacagcttccccttccaaacctatctgttaatggtatgggttttaaaatattgagctatggtatacaaatacttatatgaaatgcataaaaattaatttctatgaaaaaaggataaataaagctgcagagttttgttagattttctaggcataaaattgcttagtcgggatgctctaaaaccgtccacttagaacatagcagttttggaccttgtggcccattgataaccaatagtttggacccatgcatggtctgtggatgaacactgtgttttagtaaatattttagggtcatggctcatggggtgtctgtagtttaggggcagctccagccatatgaaatacgacttctcttgatgctttagtgatcatttaagacatgtaaatgccttaaatgattagctgagggacacatacacaaaacagtgcctggacagagccccaggggtttgcctgccttaggcctgccttaccctggagtggattagggcagagtggcagctgaccaaggagtttaacttgtctgcttttaagaactcgagtttgagccgggcttggtgacaaacgcctttaatccaagcagaggcaggcggatttctgagttggaggccagcctggtctacagagtgagttccaggacagccagggctacacagagaaaccctgtctcgaaaccccccccccccaaaaaaaaaaaagtttgtttcagagtgactctgtagggctgctgtttgaaaaattggttgcatgctaattatcttttctcaccatgtcagttttagacagtatcagttccaagctttcctggtgttgctgggagtatataatatgtatgtgatgtagtcactgattccagggaaaataccctccaagctcgcagagcaggcgaagtgctgtgtctttccaggagctgggctgttgtagcatcacactgtgtgctccgttctcagagccatgagtgtagaatgcacggcaacagagagtggccacaccggacccgagtgcgctgatgacatctctgtgccctttccctttctagcctttaaaatcctttaagcaaagaaaaagtggctcgatttccagctctccctctcgacgccgtggcagccgcagccgcagccgctcaagatcacgttcccgatccccgggcagagcaccgaaaggctccagaagatccgtctctgcttcccatgagggtgacgtgaaggagaagaaggagaaggagatgaggagggaaattctgcaagttaagctgactccgcttgtgttggtacttacttcatctgtccactgcgccggcttccctatacaaatgcgtgttcagattatttgtgcttttgttagcaagtattgaaatagaaagaatagtttctttgaatatccaagaaaaatggtttttgttttttttttaattagatattttctttatttacatttcaaatgttacccctttcctggtttcccctctaaaaatcccatatccccttcgcccttcccctgctccccaacccacccactcccattcccagtcctggcattccctatactggggcctagaaccttcacaggacctagggcctctcctcccattgatgactgactaggccaggccatcctctgctacatatgcagctagagccacaagttccaccatgtgttttctttgattggtggtatagttacaaggagctctgggggtactggttaattcatattgttgttcctcttatggggctccagaccccttcagctcccttggtactttctctagctccttcattggggaccttgtgctccgtccaatggatgattgtgaccatccactcctgtatttgccaggcactggcagaggccctcaggagacagcaggctcttgttggcatctgccatagtgtcagggtttggtggttgtttataggatggatcccctgttttttatttttaactttttcattttcagtatatgtgtccgtccatgtgtttggtgtgtgtgtggccacgccggtggaggtcagaggacagctttatggggcctttcctcccgttccactcgtgggctcccatcattgggcttgggggaaagcggttctgcccgaagctactgtatcagcttcaaaataacattactaggagtcctgatagtgtgtggtcttcaaagatgtttccattgagaccggcacagtttgtaggccataaagtgaggagacagctactctgttagccattcttgctctcccagttggcatccttctgcttgatcactttcactgtttaaaaatggcggtttcgggctggagagatggctcagtggttaagagcaccgactgctcttcgaaggtcctgagttcaaatcccagcaaccacatggtggctcacaaccatccataatgagatctgacgccctcttctgatgcatttgaaaacagctacagtgaacttggatataataataaataaatctttaagaaaaaaaatagtttaccaaggaggctcccttggagaaaactatgaaaaaaaaatggcgttttcagtgaacatgtgtggagcctggggacctagccaataactttctttttttttttttttttaagatttattgatttatttatttatttatttattgtaagtacactgtagctgtcctcagacactccagaagagggagtcagatctcgttacggatggttatgagccaccatgtggttgctggaatttgaactgaccttcggaagagcagtcgggtgctcttacccactgagccatctcaccagcccaataactttcattttatgtagtagtatacattttttttactttttgctttttttctttttctaagacaaggtagcctaggctggccaagaccttgataaaattctcctgcctctgtttgctccgttctgagatcctagggtaagctaccacaatggataatgaatattttaactcctttgttttcaactttcttcatgctgtgaccctttagaacagcagttcctcaggctgggctgaccccaaccataaaattattttgttgctacttcattaactctaatttgctactgctatgaatttttttttaattaaaaaaatttattttatgtttgtgagtacattgtagctgtatagatggttgtgagccttcgtgtggttgttgggaattgaattgaattgaacccccgctcactgcagttaaccccactcgctactgtcaactctgctcactcagtccctgctcgctctggcccagagatttattcattaattatttacttacttatttattatttacttaatacataagtacatgtagctgtcttctgacacaccagaagaaggcatccgatctcattacggatggttgtgagccagcatgtggtgctgggatctgaacttaggatctctggaagagcagtcagtgctcttacacactgagccacctcgccagtcctctaataatgcacttagattttaaaatgtcaaatattgagaataacctgcaatttgatagtttcctgtttttgtatgttacatagtaaacatcagaagaagtgcgcgtgcgcgcgcacacacacacacacacacacacacacacagttagtgttaacgttagttctgcggtgcaaccttgtgtttttctctcagtgttcactgttctaaacacctacttttctgcagtatctagttatcttcttaggcttagctttgaggaaattgaagctgcttggtcagatggacagggcagaacagaggcttgtaatacctgttgctagactgggtgagcatgcttatgtcagtgtcaagaccgtggggaatgcttggttttcatctgaggattgtaacaggcctcccccacccccacccccacctccacccccaagttgatgtcaaagattttcacctccctttttcagactttatgttttcttactacaatgagcttgttgttgctttgagtgcctctctcccacatggggggaggggcagatgcttcgtactgttgtctgtgatagctttcatattcacacgtgctcttgttgacagaagagctccgggttgtctttgcccctcatcatctactgtgtggtgtgtgtgcaagttcacagttaggctgcctcagctttggacatcatgctatgatcgctcctttccacacccggttgtgatctcagtaatttccctcccagtgttgagtgcttaaccttcatcgtaagtctgtttactgcatggaaagcattggcatgtagtcagcatggtttcgagttagctgactggctggtttatctgtggttagtagaggttattcaaaacctgagatgctgcacatagctttttaggtgtgtcttcgtgtggtgacagatggctcattcactgacacttgggtaaactcaggtgtatagcgagcgggtgctctattgctagctgacctagaatccctaatgtgcaaagctgccatctgccggcatctgctgtcttctgaaggatgtgcttggactctgttttcttcttgactcaggagtgttttagtttgttgacagtctttacagaggaggagagaggctgttgcaagcattgccttaacaagcacttgcaagctaaattgcttctctttcttctgtaagaaactcagaggctgagtcaagagggacatgtaggaaggaaaaagtaagggcaaataacatgttgcaggaaacgcaaacacccagccttcccactatagactgtttagggccacggaaagtcttttcctcatttttatgtctagctaatgaataaatttgccaggttttgctcacccgcctttcatagaaacgttaccgtatgacagtgaaatcattgaagcgtttcgtgtacaagtgcagatgggaaagttaatgcagaagtctgttccaaaatgtagtgttgcccagctggaatcccagcgctcaggcaggtgaggctggaggattgccacaagtttgaggctctgtaagagctgactgttgaggacctgggggctgtggttgcctttactccagacggtttagcgaggctctgctccctgcccagtagaacctgctacccctctggtgctgattctgtcgctgcttcttccatttagaagccgttcggaaacagcgtcagcgtgtacaacggggagcccgaacacatggagaagaacgctacgccgtataaagacaagcaggtgagagacagacactccttcatctgcggcacacactctgttccttttccttcagactcacactggaatttgttgtgttgtgtttgtttgtgttctgtcctgaagagtgcatgtgatttaacacatttattctttttttttttttggcttttttttttttgagacagggtttctctgtgtagccctggctgtcctggaactcactttgtagaccaggctggcctcgaattcagaaatttgcctgtctctgcctctcgagtgctgggattgaaggcgtttgtcaccaccacccggcaacacatttattcttgtacattcacagctctatagagatgctgagttagtagtgtttgcactgaatatagactagatatttaatactttggttttttttgttttttgtttttaaactaggaaagaatcattttgtcaacagaagacagatatatagttacacagtacagccttcgtcccaggagagaagaggtcaaagccaaagaaatagagtctgaggaacaaaaccttgtcaccaaaggacccgcacctttgggaacctttcaagtgaccactccacagaggaaggacttggagtttggaggagtacctggtaggtattagaagcccattagggaggagaaagggtggccagagatgcccttatgtgcacaggaaaggtctttgtgcagcaggaagagactaaggaggtggaggactagggaagaactttacagagaaggaacagtggtatgaaggcctgagctgggagctacggcagtgtgtgtacagggcacaactggggtggtacatgggacacacggaggcatagatggataggatgatgggacaagccataaagtacaaaggatgctaactttaaagtcataataaagggagcttgccatggggaagggtacaggaggggtagtggtgatcctgtagggactgggagctctgctactgatgagtagagaaggcagggagggcccggctggtgttccctgcagaagcaagctgcagcgtaaggcatcctgctgccttcccaatgggctgatcagagagtgcatgcgtggagcctcccagaagacagttacgttaggctcttgtctgcaagcataacagagccattgataatggcagggattggttcttgcccatgggatgggtctcaggttgggccagcctttggttggccattccctcagtctctgctccatttctgtccccctttttttttaaagattcatttatttattatatgtaagtacactgtagttgttttcagacacaccagaagagggagtcagatcttgttacggatggttgtgagccaccatgtggttgctgggatttgaactcaggacctttggaagagcagtcaggtgctcttacctgctgagccatctcaccagctccctgtgcttcttgaaggcagacaaattttgggttggaggttaagtgggtgggtgattgttgcctgtctgtggctctttttttttttttgagacagggtttctctgtgtagccctggctgtcctggaactcactctgtagaccaggctggccttgaactcagaaatctgcctgcctctgccttctgagtgctgggattaaaggcgtgcgccaccactgccaggctttgtggatcttgttcctctaactgggctgtcttatctggcctcagtgggtgtcttagtcagggtttctattcctgcacaaacatcatgaccaagaagcaagttggggaggaaagggtttattcagcttacattttcatcactgaaagaagtgaggcctggaactcaagccaggcagggagcaggagctgatgtagaggccatggagggatgttaattactgtcttgctcagcctgctctcttatagaacccaagactaccagcccagagatggtcccacccacaaggggacctccccacttgatcactaattgagaaaatgccttacagttggatctcatggaggcatttcctcaactgaagctcctttctctgtgataactccagctgtgtcaagctgacacaaaatcagccagtacagtgggagaggatgctcctagccctgccgtgacttgatgttccagggtgggttggtacccagggaggatggagggagggctgtgagaggggggctgcgactgcgatgtaaagtcaataaataatgggaaaagttcccaaacaaaacacagagtgtatgtcaaagcctgcggtgagtgagcatgtgagctggtggcagcccatagtctggcttgggttacctgctctgcttgctgtcctcgcccataatctccacgtgtgtgacagtaagctgcatgttagaaacctatggatagaaagtctactgtgaggaccaggggactcattgagctaagaggctcttgcctacaaggcagagctggaggccaaggctaccagaggctgtgcaaccacattagcctagccgttgtttggtgtctgcgtctccacactgctctttttgtggctggagttgacagtttcagagcttggtctctgaggtggaccctacttttgtcactcaccccaaggctgtgtgctcactggaagtgatggggagagagtttaaaagttactaaattttatgactttggtaggggagggatggagagagcaagcaagctaatgctctggggctcacatgaatgctggctgtgagctccaggtgtcagatgcccttccctgctgagcattttcccagccaagacagggagaggtttttcttttttttttttttttttttttgaggcagggtttctctgtgtagccctggctgtcctggaactcactttgtagaccaggctggcctcaaactcagaaatcctcctgcctctgcctcccgagtgctgggattaaaggtgtgctccaccacgcctggcttatttccttcattttatatgtatgaatgtttacctgtgaatttgttatgtgtaccgcatgtatgcctgttgttcagggcagtcagaagaggacattggcttccctggaactggagttacatacagatggttgtgagccaccatgtgggtgctgggtcctctgtgagagagcaagtgcttttaaccaccaggctgatgcttctgccccctagatgaggagtttttgatggtaccttacaaattggtttcagacagctaaccagatctagttttgccctgaaagtaaaataaatataaatacaaagcccacatgaggtctgatgcctgtccttgcaggtgcggtcctcatcatgctgggcctgcccgcctgcgtcctcttgctgctgctgcagtgcaggcagaaggacccggggctgctccacttccctccacctctgccggctctccacgagctgtgggaacccagggtgtgcggcgtttacctcctctggtttttcgttcaagctctcttccaccttctaccagttgggaaggtaaggttttggggtttgttgtatgtatattttttgtgttttgagacatggtcctggctgtgtgttcctgacctggaactcactctgtagaccaggttggtcctgaactcgcagagctctgcctgcctctgcctctgcagtgcttggattataaacgtgtgccccctggtggaagtagggttttgctgaaggggcatggttttgtgaaacttgactgactgacttgtcatttttaagatttccagcagtttcaaagttaagcggtcagtcatgcgctgagccttattcctgagctctgtagctttcctcttactaagtataactttaaaaatatgatttgggtttatctaatttcctatatcacttttctttctttttcaacaaaatacctgacaaaagccaaggggggcaggggggggggaaacaaacaacaacaggatttattttgcctcaagctttgagggtaacgtccatgatagcagaggaatggtgttggggagagaggtggctggtcactttgcatcagtgccaggttggaagcagagagacagggatactgattctcagcttgatttcccctgtgtgtgtgtgggtgttttcgcccacatctatgtctgtgctctgtgtgcgcagaactccgaggacattagcccccctaggactggaggcatggttgtgaaccatcagtgtgtactgaggacagcccccggtgctcgggaagagcagcctgtgtccttggtgagccggtgctccagctcttcttccttttctgcagtgtgggaacccagcccaagaaacggagccactcacattagggtggtctttacacctcagcacagtctagagactgcgagataggtgtgcctagaggtttgctcctaggtgattcttagggcattgaatccaattatgtgtgtgtacgctgttgctgttttcagactcaccagaagagggcatcagatccgtgagctggttgctggaatttgaactcagaacctgtgaaagagcagccagtgttcttaaccacagagccatctctccaggccccccctacatacatatacatatacacatacacatacacatacacatacacatacacatacacatacacatacacatacacatacatatacatatacacacatacatacacatatatataatcatacctatttccagttctaacaggaaagaataagttatttgctattagcctaactcttagtagaggcagctgaagagcatccccctcagtgtgtttacttgtgggtgcaacattttaaatcattgtcttctgagctcagtggatttaacagaaaacaaacaaaaaaccccaaaacacagattcaggtatttccagttttgatccttaggaactgttgtcaagaacacagtgtccttttcagactccattgctaagtgtggtctttcagttgttatacctttccttagagatgtgttcaaagaacatgagctgccctaagcagtacataatttatttcagatcttattcttaggagactgcatctttgccagctggaaattctgttaggagggtggggctgtggacatggtgctgtggactctcactgtaagtggctgtccgcttttactacagggctctgttcagagtcaggtgaaaataaccatgcatacgtacaggcagatgtcgagtgtcagtcgagagatcctctctctattgtcagactaaggccaagaagacacctgcaattgagaaggatcgcttagggtttcgccagtgctgtgatctcaggttttatgtttctgtcctgggtttccctgccagcagaggaacaggtgcaggaagatgatgccatcttaatattggacagcttaaagtgaatggctacattttgatacttggggatccatgtggctgcccattcactcaggtggttgttgaaaagaacctctgttcttgtgttaaacttctttacgtacatacatattttatagctagactccccatatagaaacagcacgcacattttctttttgagtttgcatgatctcacttcatatttttttttgtttttgttttgttttttcgagacagggtttctctgtatagccctggctgtcctggaactcactctgtagaccaggctggcctcgaactcagaaatccacctgcctctgcctcccgagtgctgggattaaaggcgtgtgccaccatgcccggctacttcgtacattttaagcccattggttttcctgtggccggccggccggcctgcctgcctgcctgcctgcctgcctgcctgcctgcccgcccgcccgcccgcccgccctccctcctcacataaataaagactaaatataaggagacaaggaaggactcaatgcaggtgataaatagttatgaaaggattttaaacaaattgtttttctggttctaatcctgtcatggtttttctggatatgtgtgtgtaaaatttttaaggcaaacctcacaaatgagagatagtgggattagactcttctattgttgatgggcagtggagagttttgagcacactaatattgttctctgtgtgggatggtttgatgagggtggttattgcaatagtcttggtgcactgaaaacaaattaactacatatgtttaaggtaaatccctacagtggggttgtgtcatcaactactagaatactattgtgtttcctacttcctttcttgggtataataatgaatttcaagagtttgagaagattatatatatacatatatatatatatattctcaacaatatatatatatgtatatatatgtgtgtgtatacatatattacatatgtatattaaaggtgtgtgagtgtcgtgccacacacctttaatcccagcattctggatgcacaggctggtgggtctctgagtttgaggccagcctggtctacaaaatgagttccaggacagccagggctgttgcacagaaaacctgtctcaaaaaacacaaagatgataatatcctttaatttttaaataaaaatgcaatttgtttttttcttttaaggttgcagaaggaacacctcttgttgatggaagaagactccagtatagactgaatggtgattttcttaaatactcaatgacataacttttacagtttttacatcgtgggagctgattcactgggtggtgaacggaaggttatcttttagaagtttgaagaacttgtagctaaattagcttattccagcttaggaaaaacgtgtgtaaaacagaatagtacacttagtatcttctgttttccttttactttgagataaggcatcaccatgtcacccaggctagcctggagttcactttgtagtacaggctagcccttctgcctcagcttcctgagttctggcattacaagtgtgtgctactggcctggttagttttgtttcctttttccttttaaagtttaatttttattttatgtgtgtgagtgcctgtctgtctgtgtgcgtgtatgatataaattatatatcatataatttaatatattttaattatatatatcacgcgtgcctggtgcccatggaagtcagaagagggtattgggtactttgcaactggagttactgatcattgtgacatcctgggaacccagcctgttttcctaggctgagaagacgttgccccaccatttttttttttttttttggtggttaaatattgttttaaaatattttgtgtgtgtgcctgagtgtatgttgtgtgtgcatcatgtgtgtgtagtggaagctgttagacacctggaactggagttacaggtggttgtcaggtactgtgtggtgctgggaactaaacctgggtcctctgaaagagcagtgtgtgctcttaaattctgagccatctctccagtgcctagcaaatacttttaactagagcgatctctccagcatgcttcattttctcaatagcacataccatctgtcttagtcagggtttctattcctgcacaaacatcatgactaagaagcaagttggggaggaaagggtttattcagcttacacttccatactgctgttcatcaccaaaggaagtcaagactggaactcaagcaggtcaggaagcaggagctgattcagaggccatggagggatgctgcctactggcttgcttcccctggcttgctcagcttgctctcttatagaacccaaaactaccagcccagggatggcactacccacattgggccctcctacccttgatcactaattgagaaaatgccttacagctggatctcatggagacatttcctcaagagaggctccttctctgtgacaactccatcctgtgtcaagttgacacacaaccagccagtacaccatcattcagcatatgctttaaggttttcccatagcaggcattctcgtggctctcagaaggctcccctgttgtatacatcccagtcactcccacctaggagcccgctgctcctgtccttgtgtgcctggctccagctgactggcctctgagagctgtctcttgaatgtgtgtccactcttgtcaaccctttgcttgaaaacatctttccctatgctttttgcaccacggagctgtagtcagtattgcttcttcatgaaggggaagacgcaaggaaaggtgtggaacttggctggaactgcacaagcaaggagaaagcattggcttcttccttgcctcttttgttttattttctgacagttatggcttgccacatcagtgtcttttctgtttagtggactttttcctggtgggcactagttttgtgggctagcttgtgtttagtacatacttggcactagggagctatgcgtgttgagcagggaaggcagcgtggagcttgtgtaacagagcttgtgaaaggctcttttgtctgagtatcttgatagtcagcacatgtacagctttaccttccgaaggctgataaagcgccattcatgtgactttaggagtctctgtggtggtcatccttaacagattgtccgttttactaaattgggtagagtgatgccatttatttctagaattttatgaaagatgctcttcaacttatgattgtgcttatgttcacataagtccatcttatgttggccataccttaggttgaaaatgtattttctgcagctgacctgccagtgtccgggcttagcagcactgtagagttgtaggtcaactgtgatttgttgagatcattgcactgcccagcactgggagaggacattgtatgttgctagtctgaatccacatttgagtatggtgctggatgtgtctagcttctgcatgtgtatgatgcactgccaaactccctaagttgaaccactggaagccaggaatggtctgagtaaattttaatgtttggcttccatcttattccatcttattttctagtttgggtggttgttcatgggcttagccagcatttttaactgaaatcactctgcagggtgcaagccgggaagcagaaatgttttcggggctacctgccttcaggtgccgagctgcatgccatcctagccggctgtgcacctgcctggaaccatgcttgctcgtgctggacatctttctgttcttgcccagctcctcgctaacggaagctgcctgtctcataatcttaggcgtgccatggctcttgctggctctgctggcctgctacaggctgtctgctcacagttctgctcttgctgtggagggcattgaggccaagccctgcgcctgggcccttggtacttgggtaaagacttctttgttggtctgtgtttctagtgttactccattccctgttacgggattttacctctaaggaagttcctaagacattctgagtgattagtctgcagtctgtggagtgaaaaacagttgtaccacttcatagattttataagggttaaattattctttggagtaaacttggtatgtagcaaacatggctttagaaagcaaacttgtggcgatcctcttttatcagggcttagaaatcctctcactaatgaccatgacttgtttgactgttaattgaaatataatttgatgacttcatgtggaacctaagcacttcagcttttgtaagaaaaatgatttctttagccaaaaggtgaaattgtgcactccctgcccccagattgggcaggcagcacccttagactggcttgtgacttgtctcctgggcttttagcctgctggctgcctgtgcatcagagtggagcctagtgtgcccttgtgtgggattacaagtgtgagtgaccacacttggtttccccgggttttattatagcctctactgtgaaggtacagcatccttttcttccccccaaagctttatttattattatacgtaagtacactgtagctgtcttcagacgcaccagaagagggtgacatactcattacggatggttgtgagccaccatgtggttgctgggatttgaactcaggaccttcagaagagcagtcggtgctcttaaccactgagccatctctccagcccgagggtacagcatcttgatattcgttttctatgtggcagaatgtgactagaacctttttataccattaccaactcgtgagttccaacataaatatttataactgtataccttaagattattctgctgtgaggtaatggcattagacttgaaaatgtgttcttgtacatctcttttgggagctacttatttgactttggactctgaacgttggagtagtgagtgcattttgagattcttttcagtttaacagtgagtttgagcttggctttaattaacagtgggtaaggatggttcatattgccaaataatgttagcattcttaaaagacagtacaagagctgtggtatttacactgaagattgtaccttaaggacattgcttatttgcatatatatgaaaataatctggataatgaaatttaagacttaaacagaaaaacactgcattgactggtagctcctgtgtgttgggggggggggtgtctttttgagcccggggacttaaggccagcttgggcaacctagtgtgacttgtctcaaaacccccaaatgtagccccaggatgagtgacgttaattaaccctgttctccctctttaaaggattgtatgccttcattctgacatctgcagccctgggagcagctgtcttctggggtgttgagctgtgctacctgtacactcacttcctgcagttggcactggcagccaccgggttctccgtgctcctgagtgcttacctctatgttcgctctctgcgagccccgagggaggagctgtcgccagccagttccggtgagcagttccatcatgggtcacatggctgtgtccagagccctggcagccatgactactcatagagattggtttttgtctagtttaattttgggaaataaagacatagaaaacaagtgaagaaaaaaattgaaggcaaaatttaagtttttttcctcatgcttttctatttagttctcattaactctaagtatgtgactaaaatccttcagcagctctgactctctgcctgtttacttttgtcaagtagtaaattccttcaaaacaaaacaaaaaaacaggctgcaagttatttggttctgacctaagatatttttttttaagtttcctatggactgggtgtggaggcccatacctttaatctgagcacttgtcaggcagatgcaggaggatttctgtgagtttgaggccctcctgatccaaataaagttccaggccagccaggactacatagtgagacctcatctcaaaaataaaacaaaaggtcgtatgtttaaaaataaacctgtagtttccctagaggtgaagtgagctctcaagatcagtagcggccctggcttcccagtcctgtccttcgcttccccctctgcagtcgtctcctcagggagcagaggcccaaggtcagcacttggtgaggtaaatgctttctccttcccaggaaatgctgtctacgacttcttcattggccgagagttaaacccgcgacttggtgctttcgatctcaagttcttttgtgagttgcgccctggattgattggatgggtatgtctttttttttttttttttttccaataatttcaatggtatgacttcatcttgtatttagaaggaaatgtaggcaatttttaaagattatagttttccctaattgtgtcttaacacatatatatttatttatttttttactggtttaagagaacttgttacggattgttaaacatcacagatatttttcaatttttattacatatatctaggaagtgatagtgaagatggaaagtaaagccttatttgacccagtttcaggcttggaggacaattacagacatggaaccgagactcccattttctttcgccggattccttactaacagcaggctcagtcacagtcccgtcaagggcagtgctactgaggggatctgtaacccttattggggttcattggtgcttaactgttgctccattctttcatcttggtctcctctcactatgctggttccttaggctcttgtgacggtgtcgcccttttgaagagcactgttcgtaagaccatcattccgttgttctcctgatcagagaccccatgtgttgtcaggaagcgcagacaagtgacacgtcagggctgaggtgtcttgttctctggtggccatggcggtgtgcactgggggtctcggctctgcttggcctcgccagtgcctttgaggcgttgtcgtcttctcttcccaggtggttattaacttagtgatgcttctgatggaaatgaaaattcaggagcgagctgctccgtccttggcaatgatcttggttaacagtttccagctcttatatgtggtggacgccctctggaatgaggtaatttgttggattttccaggttatatatatatatatatatttatatatttacttatttttgaggtcctagtagtccatgctggtctgaacttgtgatcttcccaccttggcctcccacacgggattagaggaatgtgttctgtacctgcacaagatagttaattttagaaagagatgaattcttggaggccatgaagtcaagcagctttttgagagttggtgggtgaggttttcctctggggagctctcgagttgcttatatacagaattagggcagttatagcttgcttcttctatagcttgtgttgataaagatgaggtagttcaaagggcctgcacatgaacactggtgggtgtgtcgacaactctattcggaaatgactttctaagcagttaacatcattctgaggtctagggtgtgagccttagggcccggatccgtgagctctgactcttaccttgcccagtgtgatctgggcaagaactctgagagctacttcttcccacagatacattttgaaccattactttttgctaggcactgtggcatgtacatttgaaaaatgagaggcttatttttcaaatatcaggggagattgtaggatgagaagggctgttgagggaagggactgaagctggggttggaggaaggtgaggtcagggagtactgggcaaaggcctgtgagggttttagacatctgttacagcaacttctgtgggaggagacaggacttaagccagagcaactggacctgcctttcaatattttggtgtgccttcacttaatatacttgaccgtaaactagtactttaaacataagatggttttctttcttcccacctgtcattttaggaagcactgctgacctccatggacatcatgcacgacggctttggcttcatgctggcctttggggatttagtgtgggttccatttacctacagcctccaggccttttacctggtcagccatccccatgacttgtcctggccattggcttctgtcatcattgctctgaaatgtgagtgctagtcttagcctctgttcagtccaaggcactgtgtttactgttttctggttggtgtctgtcgcatgccatcttacttgatcacagacttgaaataatttatgatggataagtgctgaaaaaattctcaagtttgcaaagagagggaatacatgctagctctccactagttcttacaacagacatcttttttttttttttttttttttggtttttcgagacagggtttctctgtgtagccctggctgtcctggaactcactttgtagaccagaaatctgcttgcctctgcctcccaagtgctgggagggtggctcaaaggcgtgagccaccactgcttggctgaacatcttacttttattgttaagcaatttaacttaaaatgaattcctttaggaataatttctgtcaaatgcctgtgtttttaaaagagatcttaaaaataaaattggtctttatacagtttttggtctcactgtcgaaacaatagcagggaatatggcctgagtagctcaggcaatgcattgaaggcctctgtgcaggagagggagccagtcctctggggagtggttcagacaggagactggctgaatgagacagcagcagtgtaaagggtgctcaggggcagagagacaggttcagcttggctgctctgagttctgccacacccagtggttttcagttcagatagttttcctttatttctttgttgtttaaataatcttccaaaacctcctggataggaaaaggaccatggaacttcaagtagagctagtgttatgacattgatgagtgcctgtaatggaagaggaactctaagcaccttgttaaaaggaaggtttagtttttccattggtttgattattcatgtcggtggcccctgagttatccagcagtttgcatctatccgaaagagtcgttgaagtgaaggagatttggtatttcttgctattcagaccttgtcatagtagttccatctttgaatacatctcccaagtggcgggggaggggtatggaccctgaagtgccaacactgttttctgactgttttctgctggtattttactgaggaaatatgcctctggctgaaggtctcagactagcagataaggtagcctgtagtcactgtcgcttgttgctgtctcagacactgttctttgtgggcatgactggaagtgtttgccttcaagatggatgatgacaagtgagattttagatgctaggtgacatctaaattactaacaggaaaatattttaaaattgcagtgtgtggatatgtaatcttccgttgtgcaaactctcagaaaaatgcattccggaagaatcccactgatccaaagcttgcacgtaaggactgacttttaatttgttgatttatatttattatgtgtagatttttatgcctttcttagaattctgtcattaaaataggttttgtttttaaatagatttgaagaccattcatacttccacggggaaaagtctgcttgtttccggatggtggggctttgttcgccatcccaattacttgggtgacctcatcatggctctggcgtggtccctcccatgtggtaagcaactcagtgttaatgtgactttccctggacagacaatatcattggttggacttgtaggcagctccgggctctactctcttggtgtctaacaggtgttgcctaccttatgagcgggttgggggtgttgtgagataggttttctaaggagactgtaatgaacgtttggtttgcgtttggcatagcttggctttcagtgggtgagggaaatgggactcactgagccactgttgttccctgcaggtttcaaccacctcctgccatacttctacattatctacttcaccgccttgcttatccatcgagaggcccgggatgaacaccagtgcaggaggaagtacggcctggcctgggagaagtactgccagcgagtgccctaccgcatattcccctacatttactgacctgtgctgcttgcctggcagctcagacctctcccagaaacaagggaaagtccaaatgaactaatgtgatgcactgacaggatctctaggtttgtttttgagtcaggactatagagccaaatagtacatcttttaatgtagttaaatttattcttatggcagttaaagatggtaaaatttgcttattaggaaaattttaatccctaaaaatcttaacttttatttttgttggttttttttttttcaattttttttttctttttgccatttgatttttcttaattgaaaactcttattaaagtacatctacgtttcattgtgcttagaacagaattctctttaagtcagtttattagtctataaatcaagcaaaacccagcccaatattggtgttatagctgaagaataagggcagattacttgcaggacctgtttaaaggaccattcatagcagtgactccacttcagcctttaaaagtgcatttggaaatataaacacatagacgacttttatgtaatatatggtaacttttgatttttctgtacagtttttgaatgtgagataattgtcagaaactaagtagttttttaacagaatattttcagtgttttaaattaagttttgtaaagtaattacaattcatttaaagttaaaacataggaaagttatttttctttatccaaagtttgtgaatttggctttgctacctcaatttgcaggtgtgtgtttgcctttataaaatgttgcaaatagaaaaaaaaatatatattttttgagtaacagcactatttaaacatttttacacacattggtgttggaaaaattgccattttaggctactatttttatatattttttgacttaaaattcaacagtgtttttgctactgtttagctaatacagtttatattaatttgtatcctttatgtttttagaactctctagaaaggagttctacctgatacaactttaagttttctctctgtttaatggatgtgtataagctgtttgtagccttcagtactagtgaggttggatagtttcccagtcactgtccctgagcaggacaagtggcaagttcactagacttttttattcaaagctacattgtcctcagagtaaacataaggatgcaatacatatagtgtgtacatttgggtttctattacacataccacatgtgagctagatgcaaaatattcaggtcttcctgctctgtagcttagagtgtcaagtggctgtgcccgtctgatcatgccgtgctacgctctgcattctgtcattctttactgttttactagtcctaaggtgttcagcaggtggttttctatcatgctttctgctggaatcaacatggtatgtgttaataagcttacaaggaaacaactttgggttctttgcctggttctgaaagggcggacagtgccacagtatctggacattaggtgcaagttgtttttaatttgatgtttggcaagctttgtaataaaattttggttggaaacaaaaagttgaaaataaagagttgctgttagagcctcatttctttgccacagctttgggattaccagcagcaagatggccaactctctgttttgtcataccactccccctcccccttttttccttttttgagtctttctgaactctaggaacccagggacttacttacttagcaaagcaaaaactgtagggcctgactcagtggtggctcgcccctgtaatggcagcaggccaagagggtgggtcaggaggatctccatgtgtttgaggccatcctgggctggagaggagaccttgtcttaaaaacaaatcccaacagtggaatctgagggcttaggggtagatagaattcctaaaactggtcgtgtttactgtttgctgtttaagaacaccaagtgcttaaaaactgctataggttctgtgacactttgaagcaaatgtatatgcatagtcgaagctttcgtgttctatgacagagtgcacagccactgcttgcctgttgaagtctcccacacctcccgccaggtttggctaggcacatgctgttccagggatgctccctgcatgtgaccgtcctcatgcatggacgtggaggaagagcccaggcttagatgggttcgctctgggtgtttattcactcattcttctcacacagcagtgcaacctgcatggtgatccagtgactgggaggtttcttcgtgggtaagtgcactgaggttagcacggttgttggtaagccaatcatgtttcttgacctctcgggcgtgtagtagactgggcactcaaaggtttgcaggtctgaggctgtctggtcagaatcctgggaggccgacggttcagtaatctaaaaacaaagattcctagtcagttaacagttaaaaccagtagatcacattttctgtgagtagacggtatttacgtttgtgcatggaacgtatctaacgctagggtagttgcgtgttgaaattgtgtctagagaagttaaagtagtgataatttgatgtacctgagaggcaacactggacatcagttttaacctgtttttaggtcttggacagtattgtactgttttgtcttacgcacattattacatttccctcgtgaaatcacaggtaatgagaattcacaagtttggcttttcctggccaagtctggtgattacctttgttggcaaaaagagtatgtcgggaaattcacagcatagctgactgggcagtgagtcttccagcacttcctgctcaggatcccatcgtgctccctccatgaataaaccaaaaatgtaaactcctttgggagagtggtcctggtgttgctgatgagagaggggaagggtcaggggacttctttcacaagtcatgagcctcagctgagattgcctcctgacccctgctgtctatgtctagtatgctgcagcccagcgtatgctgccctgaatgcttagggtaaaccagactctagatttctaaggtttcttagagggagaatgcaactgtgaaaggagtcagcaagttgtgctcaaacttgcctgcttctcctacagggctccctcacttgggaaagatttgggaattgaaagcaggcagggaacaattctgtagcgcatcattgatacaggaaagttaagtctttaacttggaataagagtttgggtttgtgctcgcttcggcagcacatatactaaaagagaagattagcatggcccctgcacaaggatgacacgcaaattcgtgaagcgttccatattttttcagagacaaagtttggagctgagacgaaaggatgggccatccagagactgtctcacccggggatccatcccaaaagcagccaccaaactcgacactatagcatatgccagcaagattttgctgaaaggaccctgatatagctgtctcttgtgaggctgtgccggggcctggcaaacacagaagtggatgctcacagttacctgttggatggaacacagggcccccaatggaggagctagagaaagtacccaaggagctgaagaggtctgcaacctgataggtggaacaacaatatgaattaaccagtacccccagagctcgagtctctagctgcatatgtagcagaagatggcctagtcagccatcattgggaaaagaggccccttggtcttgcaaactttatatgccctagtacaagggaacaccagggccaagaagtgggagtgggtgggtaggggagcggggtgggggggcggcggagggggtataggggactttcgggatagcatttgaaatgtaaatgaagaaaatatctaataaaaagtttggttttatggctgggcgtggtggtgtaagcctttaatcccagcacttgggcggcagaagcaggaggatatctgagctttgaggccggcctggtctacaaagtgagtttcaggacagccagggctacacagagaaaccctgtctctgtctctctgtctctgtctctgtctctgtctctctctctctctctctctcacacacacacacacacacacgtttctgatgaactctgaggtagaaaataccagcagctccaatatcacatgtgtccagggtagcagatgggctatacagctgctgatctggggtttgggggcaggatagatgaggcctacactgccctggagcctttgttcctctggtgaatctggtaagcccttgaggcaaagtgggcactgatgtccagggtcacatcactgacatggagtcacagtatggagaggccacagtgtgctcagggacattctatagcctgtgtattctggatgcctaagaacaagttttattttcactttattctataaaagttttcctgggaattactttgtacgatgcctcgtcttttccccttaccatttatgtaaatgacagatctcaccccatgcacacggtctcaagttgccttttcttataaatcatgttcatttcttataatttgcacacttgataatatgatttccacttatactcccatgatttgccatggtattcttttgagacagggttccatgtagcccaggcttgccttgaactcttagtgattgacacaaccttgaactactactcctcttgcctcgcctttctgagttctgggatcacagtgtgggttgccacaccaaatgtggccgagagagatatgtaagccttttctctgaggaacacagtttgtaagtcattctccagagagccatttaaaagtaaacggaagctatcgtaatttatcctaaattgaagtcgttttagtgtaaagcagaaggaagcgagaacctgcttacatacacttcatgctgacgtctgtccttccggcctcaaagtttatatgcatggtttctcgaccgctcttcagacttgtaacccacaggctgactttacattcctagtctcatctctaaatctcaccttgttcagtcttcattcccccagctgagactctaggactcctgttttcaaaccttatagggacacaagttaggctcagtatttcttctgcagagaacttctgttaaccatcaattgtttctgtagttggctccccctgcaacccccaaacataaacctaagggaaggcagtccattgtggaggttgaacaacaggaataggaaaaagaggagcattgtgagccagacggcatgtgctctccaacagatggcacgacactcatgagagacagcatgagtgacactccgtgccgtcttcccacacagcgactggtattccacctagcactccacaagcttctcaatactggaaaatacgaggcacgggaatgcgggcgtccccaaagaaacaaaaggaattcaaaacatgtacaagaatattacaaacccacctcaagatagagccaggagagtcaccaaactggatcaaggaagaaattaaaattcctagaatcaaatgaaactgagaacattgtgggtacagtgctggcagctgtcctgagaagactgtgcttacagtaaagataaaacagactctaatgaaatgacctgatgcatctctccaagctctggaaaatccaggagcagctaaacccacgtccacagacggcaacaaagaatccggagcagagcaggtgagtgaggaaaagaacagcgtgtgacagtaagcagacaaccaggttaacaagactgaccaagggaaccaaaagaaacacaaggtgcagactagtaaagtcaatgacggggagttgctacgcctgaataattagggatgctttgaaaagattccaacaaaccggaaaatctagacaagatgggtaaatttctaagtgcatatgacaacagaaattaaagccagaatatatttattagtctaaacatacccatagcaaactaagataaagcattgcttacaagtcttagtacaaagaaacggttggagaagtagtacactgctaagtctgcccagctttcaagtaaggcctgataccagtacttgtcagattgcatcaggttgaaaggaaggaacagcaccaagctttctgtgctcatgaaagacaagagaactacaaggcagtctcctccattaacatagatgcagaaagcatcgcaaagtaattgtaagctgacttcatggtcatgttaagatcatagctgacttcatgatcatgttaagatcatatatcagccaagctagtgtcatcccagggatgcaaggttggtttgacatatgaatcaataaaagtgtaattcataaagacaagtcacatgatcatctcaaaggaagtcatgagaaaagtcctgagcaaactaggaaaagacagctttcttcctcattgtaataaagaacaacacaagcttataggcaacattttgctaaagatggaaaatagcactttttcttggcacaggcaagggtgtccgttgtcttcactcattgaataaagggttctataagaagagaaaggtgaaatgcaataaatcaggaagaaaagcggtctcccccgccctcctgtgttaaagatcatgaccaaaagcaacttagagggaaaagggtttatttagctcagctcagtcccctgagggacgccaaggcagcagcagttcaagcagggcaggaacctgtaggcaggagctggagtagagactatggaggaatgctgcttgctggcctggtccccatgacctgctcagtccactttcttaaacagccaggatcatctgcccaggaagagcacttccccccagtgagctgggccctcccatcactcataagtcaaggaaaagccctatagacttcctacaagcaatctgactcaggcgttttactctactgaggtttcttttcccagtcccagataactgtgtgaagttgacaaaatgaagcaagcatacaaggcgactaaccaggatactatccctttggacagttaacattttatctttacaagaccttatggactccaccaaaaagcagcattaaaaagctttcagaagaatagcaggatacaaagcattaaaaaataagtagattttcatgggtgaggtggtccacacctttaatcccagcacttggcatcctgagttccaggccagcctggtttacatagtaagttctaggctagagtgtatctacatattgacttccaggatagccagcattacatagtgggtgggaccatcttagaacagaaacccaagtgagcaatggtaacagcaaaaaattagtagctcttatattcatcaaaactgaacttgctgatagagatatcaggaaaaaacatcctttttacagtaacctaaaaagtaaaaatgtctgggaataaacctaaccatggagataaaatcctgaaaagttttaagatactgaaaaaagaaattgaagacatcggatgatggaaagaccttctatgctcctgaattggtagactttgtcaaaatcgctgtgcctctaaaagcaatctgcagatccaatacacatctaccaaaattccaatggtagtcttcacagaactaggagaaaacccctagaatctgtacgaaaacactaaagatcacagatagctaaagcaactctaagcagaaaacacagctggaggtgtgatattacctgccctcaaactgtgctgctgcctagctgcaacattatggatgtcacttaggcacaaaagcacacagagacatgaagacacagagaagctcacagaactgtgggcacttacattctgtctgtacagctaagtgagccaggcttttagtcataagatggaggctggaccctttctggtctccttagcacccagtacctggaaagctctcctgactatgttgagcctcttctggagaagtttggagatatcatcctcttgagtgacactgatgttataaattactttgtgagtgaaagtgagggtgtccatcgagattccttgcgcccttccatagtcttgaagcacagcagtaagaaaggctttgaagaaaaacaatgtcagagttctggtaagccttaggtttcctgtggggtaggcactatggctgccccgtggagatgaagggaagagccagggaggaaggatagtgtggtttcggtatcagattactcctagataaaacatttcattttacagtggagcttgggaagaagcagaatgttctaaagagaggagaaatattccatcctgcagtgaaccttaaaactcgctaagtaggggctggtgagatggctcagtgggtaagagcacccgactgctctcccgaaggtcaggagttcaaatcccagcaaccacatggtggctcacaaccatccgtaacgagatctgacgccctcttctggaatgtctgaagacagctacagtgtacttacatataataaataaataaatctttaaaaaaaaaaaaaaactcgctaagtaagcaattcagaagcttcaggaagtttctgaaactgactagtttcaccataacaccccccccccgcccccaagtgtcaacaaagagtaaggattgctgagagatcctctcaggcatgctggacatcctgggcaaggcactccagcttgttgagctacctgcaagctgtgcagtgagctccaggaccatagcctttatgagccatcacccatgctggggtagctttggtgttgcagttttgaatcatttctgcttctgtaagtaacactaatgtattggttcactgagtttggactttggtggtgtccttatcttggttggttccctatctgctgtcaatagatgcttgttgacacttacccaggaatagtgtcacacaccatggggtgagcctggagggcagcagtggagccagccacatacactttcaggtctgtgacacaagttattctgtaggtccagtttcccactccctttgtgcagggagaggggtcacagtgctggtccctgagccttggctggtcttacgttggctcatcactgtgccttacagtaatcttggtcacagagctaggtaattggtgaatgagcatgtgatcctggcaatgtcatagagacattgaggaaaggtctttcttttctgggctccctaacctgccagtattttaccctgggttgcatggagggaaagtacagatgttaaggacaaggtcaagcctacgtgaagatgattccttcatccctctgagctagaggtggccttgaattcttctgagctctgtctgccctgtcacatcatctcaaacagggagactagctggttctgcttcccaacttctcctatctacctccttctctcctggcccaggatccctgactgaagccacagccagcttttgactggagacagagtagacttctctatggccaaggctaagaccaaagttgaacttctccagcctaccaaagccctccttctttgtcatatcatcagtgtctatggccaacctcgcctgcctccctccatccctctctttctctctccttcccactctctccttccctctcgccttccctctctcctcctctctctctccctccctccttgtagctctccctctctccctccctccttccctctcttcctccctccctccctccctccctccctttctttccccctcccttcctgattctttctttctcttctttgcatcaactccctgatgtctctcctacagccatctatatagcttcaggccgcacttgctgtctgtggatcttgtgtctgtacttggttaaacagttatttttaagtcaggctaaattaaaaacatagtcccttgggtgagtccttcaaagtcctctaagttactaggtagttgtaggactttgggctggtttctttcccccacaacccttttaaaaatatttttttcctactagacttctcactttatatatgagtgttttgctttcattatgcctgtgtaccacatgtgtgcttggtgcttctgtgtgcttcttggcactggatgttcgggcgctggagttatgggtggttgtgaaacgctacatcagtgctggtaaccaagcttgggtcctctgcaggatgactgctgagccatctcttcagggcctcaggcgagtttttctttcctagctggatatacagattacaacaaccttcaaagaccacggagggaacagaacagggctggcagcctgtgctgctgcttgtgtggatgctgcttattgtcctcgtcttcctgcttgggcaatacttgctggcaagtggcaagtctcatcttcaagtcccttccttagtggccttcagtggccatcagttagtatctccctgttttatgtactaaggagcgatttgttcacatatgggctcatgggaagttacccattcattcaagtattgactgtaagcttcgctggtgttggacaagttaggtactaggggtgccacagagataaaggaaacccagcttacccctgtggagcttagtccactgtggcttcctcccaggtccctatgggtcttggctccctgcttcacattccacttagtgtctgtgctgagcaggtaggctacagcagacatttggccatcaattcttgttaataagtgtctgaggtatggcatttcctcttgttgtaggcattagagagggtcttggttctgggtctttgatagaaagaaccttgccaaggcctagtggggccttgggtatctcaagttatcctggagatagggagaggaggtggggtagggcaggcttagggcccatgggcctgcaggcgctgtcttttgtgctagtggaatggagtggctgcatgcaaacatgccagagccagatgtgggtgtgccctgggcgagagcactcactcaccttgtggggagaagaaagcagagagccagtatcgtgcagggaacccatcagtgatttcagttttgaagtcagtaggatgtctggatttctggccaagctgtctccaggttgtgataaacaacatgtacctggtgagaagccagggggagggcagggtatctgagagcatggccgctgctccctctcaagtggccttggcagcctccactagtctaccagggagcagctctgaccactcaccccggtctacctcagcctcagttttatactttcatggacacggggcataacttgaggcgtcttaggggaaagggagggtggactgtggaagccatggattttgaaacacctgctgggctgggagcaatctgatcatttgtttctgagttgcaggctttgcccacggttgggactcaatgtgtgtctgtctgggcacaggctgggacacagaacctctgggtttgcattgcaatacttctgtattctagttgtgacaccttgggtagatcatttcctgtgctgaagcttattccttcctgaaacaggatgatgacagggtcggtacccattccctaccacagggtgactgtgaaactgagtcagggagacacaactagggtttttgacccagtactccacattcccccggggtcacttttccaggcagagtgccagatggcggggagaaacatatgaggttatttccagctctcagcatgggaaccttgcacaggagcccaacttccaggtctctgttctctcatcccaaaaggaaggggtgagaagaaagaaaacccatgaga

SEQ ID NO: 652 - DNA, 3371 bp, Mus musculus
gggacctcgggggcgcgagagcgcggccggctgtgtcgcgcgcggagtcgccgctggctgctggtgactgtcctggagtggctggagttcccgccggagcgcggccagactaattttagaaaatgccaagtaggaagtttgttgagggtgaagtggtcagaggccgatggcctgggagctccctttattatgaagtagagattctgagccacgacaacaaatcccagctctacactgtaaaatacaaagatggcaccgaactggaactgaaggagagtgatatcaagcctttaaaatcctttaagcaaagaaaaagtggctcgatttccagctctccctctcgacgccgtggcagccgcagccgcagccgctcaagatcacgttcccgatccccgggcagagcaccgaaaggctccagaagatccgtctctgcttcccatgagggtgacgtgaaggagaagaaggagaaggagatgaggagggaaattctgcaagttaagctgactccgcttgtgttgaagccgttcggaaacagcgtcagcgtgtacaacggggagcccgaacacatggagaagaacgctacgccgtataaagacaagcaggaaagaatcattttgtcaacagaagacagatatatagttacacagtacagccttcgtcccaggagagaagaggtcaaagccaaagaaatagagtctgaggaacaaaaccttgtcaccaaaggacccgcacctttgggaacctttcaagtgaccactccacagaggaaggacttggagtttggaggagtacctggtgcggtcctcatcatgctgggcctgcccgcctgcgtcctcttgctgctgctgcagtgcaggcagaaggacccggggctgctccacttccctccacctctgccggctctccacgagctgtgggaacccagggtgtgcggcgtttacctcctctggtttttcgttcaagctctcttccaccttctaccagttgggaaggttgcagaaggaacacctcttgttgatggaagaagactccagtatagactgaatggattgtatgccttcattctgacatctgcagccctgggagcagctgtcttctggggtgttgagctgtgctacctgtacactcacttcctgcagttggcactggcagccaccgggttctccgtgctcctgagtgcttacctctatgttcgctctctgcgagccccgagggaggagctgtcgccagccagttccggaaatgctgtctacgacttcttcattggccgagagttaaacccgcgacttggtgctttcgatctcaagttcttttgtgagttgcgccctggattgattggatgggtggttattaacttagtgatgcttctgatggaaatgaaaattcaggagcgagctgctccgtccttggcaatgatcttggttaacagtttccagctcttatatgtggtggacgccctctggaatgaggaagcactgctgacctccatggacatcatgcacgacggctttggcttcatgctggcctttggggatttagtgtgggttccatttacctacagcctccaggccttttacctggtcagccatccccatgacttgtcctggccattggcttctgtcatcattgctctgaaatgtttcaaccacctcctgccatacttctacattatctacttcaccgccttgcttatccatcgagaggcccgggatgaacaccagtgcaggaggaagtacggcctggcctgggagaagtactgccagcgagtgccctaccgcatattcccctacatttactgacctgtgctgcttgcctggcagctcagacctctcccagaaacaagggaaagtccaaatgaactaatgtgatgcactgacaggatctctaggtttgtttttgagtcaggactatagagccaaatagtacatcttttaatgtagttaaatttattcttatggcagttaaagatggtaaaatttgcttattaggaaaattttaatccctaaaaatcttaacttttatttttgttggttttttttttttcaattttttttttctttttgccatttgatttttcttaattgaaaactcttattaaagtacatctacgtttcattgtgcttagaacagaattctctttaagtcagtttattagtctataaatcaagcaaaacccagcccaatattggtgttatagctgaagaataagggcagattacttgcaggacctgtttaaaggaccattcatagcagtgactccacttcagcctttaaaagtgcatttggaaatataaacacatagacgacttttatgtaatatatggtaacttttgatttttctgtacagtttttgaatgtgagataattgtcagaaactaagtagttttttaacagaatattttcagtgttttaaattaagttttgtaaagtaattacaattcatttaaagttaaaacataggaaagttatttttctttatccaaagtttgtgaatttggctttgctacctcaatttgcaggtgtgtgtttgcctttataaaatgttgcaaatagaaaaaaaaatatatattttttgagtaacagcactatttaaacatttttacacacattggtgttggaaaaattgccattttaggctactatttttatatattttttgacttaaaattcaacagtgtttttgctactgtttagctaatacagtttatattaatttgtatcctttatgtttttagaactctctagaaaggagttctacctgatacaactttaagttttctctctgtttaatggatgtgtataagctgtttgtagccttcagtactagtgaggttggatagtttcccagtcactgtccctgagcaggacaagtggcaagttcactagacttttttattcaaagctacattgtcctcagagtaaacataaggatgcaatacatatagtgtgtacatttgggtttctattacacataccacatgtgagctagatgcaaaatattcaggtcttcctgctctgtagcttagagtgtcaagtggctgtgcccgtctgatcatgccgtgctacgctctgcattctgtcattctttactgttttactagtcctaaggtgttcagcaggtggttttctatcatgctttctgctggaatcaacatggtatgtgttaataagcttacaaggaaacaactttgggttctttgcctggttctgaaagggcggacagtgccacagtatctggacattaggtgcaagttgtttttaatttgatgtttggcaagctttgtaataaaattttggttggaaacaaaaagttgaaaataaagagttgctgttagagcctcatttctttgccacagctttgggattaccag

SEQ ID NO: 653 - protein, 555 aa, Mus musculus
KMPSRKFVEGEVVRGRWPGSSLYYEVEILSHDNKSQLYTVKYKDGTELELKESDIKPLKSFKQRKSGSISSSPSRRRGSRSRSRSRSRSRSPGRAPKGSRRSVSASHEGDVKEKKEKEMRREILQVKLTPLVLKPFGNSVSVYNGEPEHMEKNATPYKDKQERIILSTEDRYIVTQYSLRPRREEVKAKEIESEEQNLVTKGPAPLGTFQVTTPQRKDLEFGGVPGAVLIMLGLPACVLLLLLQCRQKDPGLLHFPPPLPALHELWEPRVCGVYLLWFFVQALFHLLPVGKVAEGTPLVDGRRLQYRLNGAFILTSAALGAAVFWGVELCYLYTHFLQLAATGFSVLLSAYLYVRSLRAPREELSPASSGNAVYDFFIGRELNPRLGAFDLKFFCELRPGLIGWVVINLVMLLMEMKIQERAAPSLAMILVNSFQLLYVVDALWNEEALLTSMDIMHDGFGFMLAFGDLVWVPFTYSLQAFYLVSHPHDLSWPLASVIIALKCFNHLLPYFYIIYFTALLIHREARDEHQCRRKYGLAWEKYCQRVPYRIFPYIY

SEQ ID NO: 654 - DNA, 47419 bp, Homo sapiens
  misc_feature (1)...(47419): n = A,T,C or G
gagacagagtctcgctctggcagttgcccaggctggagtgcagtggcatgatctcagctcactacaacctccgcctcccaggttcaagcaattctcatgccttagcctccaagtagttgggaatacaggcatgctccaccacgcctggctaatttctgtatttttagtagagacggggtttcaccatgttggccaggccactctcaaactcctgacctcaggtgatccacctaccttggcctcccaaagtgctgggattagggcgtgagccaccacacccggcctgatcaagtctttatagaccaaggatagcacttagttgagaagagggctgagaggagcctgggtggagttttgttaaggagagaatttttgtaagtagtatttatcgttggtttgagtaggtattaatgagcaaagtattttcaaagtaactgacaggaatttatgttgtccttttgagtgtaataaagaggactaattattaatgggaatccctaatctgactttatgatttgaaaaccttaagaagggagcgatatcctgttaaattcatgttcagtgctgaagaattttttccagaagctcatacattatccagcaggcacaaggacagctgaagtatgtttaaggatatggcacttctttttaaaaatgaacacaaagggatctgactagcctgccttggccaggaggaggagcccccttctggcaggcctagcaaaggagatgtgggaactgggcatctttccttctggtcaggatgggagttctggccttgacttacggagcaataggagttctctataggaccaggaagatgaatacacaaaacatcagtaaaagtaaaatagaaaaaagaagtagaacttttttttaaaaagggaggaactatatatttgcagaaatgacatttttgaataacagaataacacagaccaggtaatttataatgaacagcactaaatgcctgcctctggtgagggccttcttgctgtgtcactccatggccagaaggtggaagggccaagagatgaaagggggctgaccctgcccttttataatggcagtaatgccgcccatgagggtgcagccctcatggcctgatcacctcttaaaggtcccacctctcaacattgttacgatgccaactaaatttcaaatgaattttggcgaagacaaacattcaaaccataggactaagtaaataaaaaccatatctgtatagtcaaataggattaaagtagacctaaaaatggcattgtgtttggcaatatgacttaccgtggagaatgactgggaactgtcaattcagagtaacatgacttgctttgctacagcagtgaaatttctgggatcctagcctcttgtatctaaagtaagcaagcaaaatatcatcagcaacttagtatgaatatatagtttttttctgctgaaatactcatgccaattaatacttacagttgttgaataactatcaagccaactctgtacaactttcaaataaatctacgttgcaattatatgtcatctgtttaaaaggataaaatattgatatttttagtcatttatgtaggtgtgtgttatgactaaaatgattcaatacactactgtgctccaaataggttttatgttgtacctcttgctcaagtaaaatgaaaaaatttaaaacaattatgcaaatttggttttaaatattcatctcaaatattttatattttattccccttaaatgtgttttaaacagatttaatcacattgggtactgtactaagtgtactacaaagattacagtgatcctgcccttgatatcatacctacaagtgaatattctaagatagtccctggaaaggaagacataaagacagtcctacagaatccagaataggtatcagaattaaaatagaccagccatggaagaaagaatcaaagggtgagagacaaggacaagttcacatgcatggtgctctttgagagagcagggatgagtgttctttgctccagaaatgtagacaaaacgcccacaagctatattctcattagcctgggatgtctccagctgacattgacagtgggatcatgtaatatgaattgtgtgtggcgaccggaagtcaagggctaagggagctaagaggctgcttggggaccctaacgggtttggagggtagaaagaacatatgctttggaatccagagaactgggttagaatttcttttccagccccaatttggtgggtgcgctgtattgcaactttgctgacctgagtctcagtttcctcgtcctgaaagagggggtgatgcctattttgttgagttgatttgagccataaataaggtaaggactggtaagtgacacagaacagggcctcattagaaatgagtccccttccctctccttctctttctccattgttctgatgccaactgtagttgctacacacttttcctaaagggtatggtgtagttttgttgatagagtgggagcaattgctgaacagacatgaagtgctaaacattaacactgatgggctgagccttatcttgtccagaagggaagcaacatggtaattacatgttacctagatggtactttctgttccacaattgagcccctgtctgcctctgaatgtagactttgggtgggaggtggggaagaaggctgccctctgggactcgcagttttagcaaccatgccaaaacaagccatgcacctgtgttccctgtaggttttaaaaagaaacatttagttacatattctgaattaagagagatggtggcaacccaggtggagaaaagggtatttaagcacagcagagtccccaccatggggctgtgagcctgtggcagacagcaagagagacaccgaagataggcttccgcacctctccagccggtgggaacagtcagtgccagcggaggctttatctcttcttgcctcagtccagcctgtggcagctcagtaactggaacaagagcgtttactaccttctgacctttaggagaacatatatgacacagtttcatgatgaacacattcatttacttaatggggagagatacaaggagaaattaaatatacttcctgcctgggaggagtgcagatgcccataacatgggaaggcagtgacagatgtatgtggggactgccctaggaagttttgctggggatgagcaagaacaggccactctcaaaagaagggggaggcattccaagcaacaagagaggaaaaggcttatctgaggactcatcagaaatttggtagaactgagggtggagggggtgggaaagagaaggcaggtgctggaaagagaagaggatgttgagcctaccagaaatccattagggtgagtttttgaaggccttgtctgtgtcatgttactaagtttgatttttttttcctgcagataaatatttcaggactctctacctatccaaacgcattttaggcgaattttaaaaaacagttattaattagcaaacattaaaataaatgtgaataataatcacttcctgaacagtccaaggacctttaagttttaagattaatccagcaggttagatttttcagttagagtagcatggaagaaaagacgaagttacgtcttttatgttgaagtgtgcactacaggatgattcaaaggatttaggcggttagagaaaaaacaacaaacgcattaaaacattattgacacatctgctactgaaaacactctttcatctatttatagttgactaaaaatggtgacttaacgaacttgaaataaaatgattacactaagggttatgattgcctgatatgttctaacaggtatatagcatttaatcctcacaattacctagtgtaccttgtgcagaatgggtacacttttttgtttttttttttttgagacagagtttcactcttgtcgtccagactggagtgcagtggagggatcttggctcactgcaacctctgcttcccgggttcaagcaattctcctgcttcagtctcccaagtagctgggattacaggcatgtaccaccacgcctggctaatttttgtatttttagtagagacggggtttcgccatgttagccaggctggccaaactcctgacctcaagtgatctgcctgctttggcctcccaaagtgctgggattacaggtgtgagccaccgcacctggccagaatgggtactttttatccccattttacagatgaggaaatcaggacctggataacttgctggataagggctgagtggcagccctggagcttcagacactgcattcctggcccagtgtcacttccatggtcactctatgccctttagttgaggtaggaggatcttttgatagatcgaatgatattgacatcattctcatagttttttcctattatgagctgttactccaccccagccaggctggtcttcactaatttctccttgtactgagtgttggatcaatcttagaattgtctccctccttctctccacctaatcaatcgatcaccaaatcaatcaattaattcaacaaatagtcacctattatgtgccaagaactatcaacaaaagcaacatagacctggtttcactagaattataatctagtaaattctggtactgaattctgttcctctttctggctggcaataagtaacgtaaatcaaggttgcatgtgcttatgcatctgaccgtcttgctaacgcaggtgcctgctctagaacctatgatgagaacatatgctttggagtccggaaaaacttggtttgaagcacagcttgccacacactgtgtgatctttctgattctcagtgtcctcattcagtttaaatgtcctttacccttagttttaattctttattattattttttaaaaagtaaatttccttagaagttttcagaatacattaattctacagccagtaaagaaatagttttccaaaacaagagagcacactttgccagagcagttaatctcatgatgctctggccagagaggaggagaaggctgtatggtggcagccactcccatccctgacagccccctctccctacccccctacctcttggccagtctcttcagcctggccagcaggtatggactcttattaatctaaggctcaacatatcatcagtcctttgggaagacactcgggtgctgcacaagcttcagaacagctttctagtattcctttctataaatcaagtaagtggtttaaagcctcagataggaaaccgtgaaggaaaataaatcattacggtcaccatgacctatcttttcgccagaggttctccaactggagcctgcttctatcagaatcctctggagagctggatggctgagcccaccccaagcttcaagcttcaggagcggacctgagaagctgcatttctttctttctttttcttcctttctttcagatggagttttgctctatcgcctaggctggagtgcagcagcacaatctcggctcactgcaacctccgcctcctgggtttaggtgattcttctgcctcagcctcctgagtagctgggattacaggcatgcaccaccatgcccagctaatttttgtatttttattagagatggggttttgtcatgttggccaggctggtcttgaacttctgaccttaagtgatccgcccacttcggcctcccaaagtgctgggattacaggcatgacgcaccgcacccagccagaagctgcatttctaacaagcccccaggagaagctctgctgctgagcagggaccataccttgagaactcctgcactttgctagttggtttgggagacaatggaatcacactgccttggataagtctggggaagtattaacctccccatacctcctcagtttcttcagctataagatcacctacctgggacagcttttatgagggtaaatcagttagaacacagggagcactttgagcaacagctgggggcgaagtaaaaactgaacaaagattatttatcattattattacctcatatcctgctgctgttttccctctatcaacaagtcattaaagcacacatatcccacatcttctaagttcctccactgaagcagtatacttgctccatctattcaaatagtttccccttctaatttatgtattaacaaataaatgtttaatattgagaatgtttaaataggcttgggcatcgtggctcatgcctgtaagcccagtgtgtccagaattggtgggttcttggtctcactgacttcaagaatgaagccgcggaccctcacggtgagtgttacagttcttaaaggtggcgtgtccagaatttgttccttcggatgttcagatgtgttcagacttttcttccttctggtgggtttgtggtctcactggctcaggagtgaagctgcagaccttcacagtgagtgtcacaactcataaacgcaatgcagacgcagagtgagcagcagcaagacttactgcaaacagcaaaagaacaaagtttccaaaaagtggaaagacacctgagcatcttgccactgctggcttgggcagcctgcttttattcccttatctggccccacccacatcctgctgattggtccattttacagagagctgattggtctgttttgacagggtgctgattggtatgtttacaatccctgagctagacacaaaagttctcaaagtccccactagattaactagacacagagcactgattggtgcattcacaaaccctgagctagacacagggtgctgattggtgcatttacaaaccttgagctggacacagagtgctgattggtgtatttacaatcccttagctagacataaaggttctccaagtccctgctagattagctagacacagagcactgattggtgcacttacaaaccttgagctagacacagggggctgattggtgtgttcacaaaccctgagcaagacacagagtgctgactggtgtatttacaatcccttagctagacataaagtttctccaagtccccaccagattagctagatacacagtgctgattggtgcatttacaaaccttgagctagacacagagtgctgattggtgtatttacaatcccttagctagacataaaggttctccaagtccccgctagacccaggagcccagctggcttcacctagtggatcctgcatcagggagcccgccagtcccacgacctgtgcccgcactactcctcagcccttgggcggtcggaatgggaccgggcgcgtggagcagggggcagcgctcatctgggaggctcaggccgctcaggagcccatggtgtgggggaggctcaggcatggcaggctgcaggtccccagcctttccctgcggggaggcagctgaggtccagcgagaattccagcacagcgctggtgggccaggccggcactgctgggagacccagcgcatcctccgcagctgctggcctgggtactaagcccctcactgcctggggcctgcggaactggccagccgctccgagtgcggggcctgccgagcccacgcccacctggaacttgcactggcctgcaagcccagtgctcagccctggttcccacccacgcctgtccctccacacctccccgcaaggtgagggagcccgctccggcctcggccagcccagagaggggctcccacagtgcagtggcaggctgaagggctcctcaagagcggccagagtgggcgccgaggccgaggaggtgcagagagtgagcgagggctgctagggctgccagcacgctgtcacctctcaccagcactttgggaggccgaggtgggtagatcacttgcagtcaggagttggagactagcctggccaacacggccaaaccccatctcttctaaaaatacaaaaattagctgggcatggtggcgtgcacctgtaatcccagctactcggggctgaggtgagaagattgcttgaacccaggaggcacaggcagtagtgacccaagatcgtgtcattgcgctcccagcctgggtgacagagggagacaccatctcaaaaaaaaaaaaaaaaaaaaaaaagaggataagtgctgcaaacatacatatagtatgtagaagaagtttcaaataattttaaattgctattgagatggacataatgcatcatgttaattgtgagctccatttctgtgtgaatagaaaccatatcaaacatcatcagtagaaatgtgtttttatcggacagcttttgaggtacctctaccttatgaataaaggctttctgcagtttgcagcatacagaagtttgttccttatgtaacagtaccaaaagaatccaactggatctcacgccacgtgaaactttacctacacgtctttcctgaaagagatgtttcaatcctgggaaccgagatcctctggagaccagagccaaataactgccacattggaatgcattccgctgggggttcctgtattttatatatgaaagcttcctggccgcatgtgtgttttggttggctttagtggtaggactgaagggttttgctttgcttttgttatgtgaatggggaaaggggctttgccactcatggcctcattaacaacaatggtgccaagatgcggacttttaagtgacttttactttatagattctgaaaacccacaacttgctagttgtgagtgacaagcatctttctgagaactttctgaaaattccccacttccaagtttacacagcctttagtagacttaaaaaagaagagaaaaataccaaacagttcctttgttgagaaagcagcctacatatagatctgattgttcatggtatgtttgagtccacgaagtagaaatgaacaaaaattattgcttagttttcctgatgtcaaatcagttttgttttaaaaatgtcattagtaatttattaggtaaaatgttagctaagctaactctagttaatttacaaagttttggcttcattttgttatgatgagactttataaacctgatctttaaaataaggttcttaaaatttttaaaaatttattttatttattttttgagacagagtttcgctcttcttgcccaggctgagtggcagtggcatgatctcagctcattgcaaccttcacctcccaggttcaagcgattcttctgcttcagcctcccgagtagctgggactacaggtgctcgccaccgtgcccagctaatttttgtatttttttagtagagatggggtttcaccatgttggccaagttggtctcgaactcctgctcaggtgatccaaccgcctcggcttcccaaagtgctgggattataggcgtgagccacggcgcctggccaggtgtttttttttttttttttgaaacgaatcttcttctatttcacaagtggaaatcatccaggaaatgtgcacctcaagggaaatccagtgaaatcttgattctgggtagaacatatgagaaaagaatagtgtagcactcactgcttggctatttgggataggatctgtcttaggtccccataagcgcttttatttctgtgtaatttactgcaaaactctatgaggtaggactaatattatcttatgtcaagggttaagacaattgagacttgggggtttgtcaaaaataaaagattttctgactttggagtgcgatgtgcatttctgttgcacagatctccaccaagggcaaattcgatggcaatgacaatttgatgtcagaacttctcaggaaaggctctgatgaactcattcacactgcatgtgaatgactgagaaaactcgatgtattttcacttttttttttttaagaagtaaacctgggtgttttgtagttctatgagaaaatgaaagctgaagctaggctatagatgaaaagttctattcattattacaatttaataatgcttccaaaatagcaattcacttaaatatacctagttagggtgttaagaaatactttgattaaaaccacactgcaaaatagggaacttcaatggactgctttaaactctcgacctcaaaggaaggaaatcaactaaccgataatgaaaactagcagaaaaaaaaaagcttaggatccgtaacagattcggagtcaacaatgacatgactcagcattttggggttcaattaaaaccaggcttgtaggttgcaggtcaagttgtgtttcggtgtgtaacgcataaaacttcttgttccacgctccgcggtgttggggattttctactgcatctcgacagcatctcgggtaacaaccgagcccctcctcgcagcgtaagtcgtaggagccctcggccattcttccccctccctcccgccgccggtcccagcatcggtccgggttcgcttctacgcaggttcagcggccgcggacacaaaagcgcccctgctcgccttcgatgccgctgcttggtccaggggcttctgtgggattttaacacgctaaggagggcactcatagtgttttaccgagaaacgctttcgagctcggatctttggtgatcacttcaagaatgtattagttttctttgtagcttaaaaaaaaatctcgttcgccaagccacctggcaccccaaacactgctgcgagcgctgggagggaaagggcgggagcgcgcgggctccgtgtgctgcgagggcgcctgggcggctgagataaggcggtggcaaacgtcgcgctccgggccgccccgccagactcggtttcccccgctcaccggcctccccgcccccaggcagggtggggcggggcggacgcgccacggcgcgcgaccaatcgacagcgccggggatgattcaaaaggtcgaggagccaatgggagccccgggcggcctcgccggtggggaggggaggcgaggggaggggagaagcgccgcgaggcggggccggggaggcgcgcgcccggcttgcgggactgcggggcgcgagagcgcggccgggtagcgtcgcgcgcgtggatctgccgccgggttgctgtgcgactattctccgggagccgtccgtgtcaccgccggaacctggcgcaggtgagtgcttccacccccgccctgctcccagctccccgcggcgcgttcttcgaggggccgctgggggaggaagcccgaggccggcgcaggggccgggccggggaccctgggcgcggggcctggcgcggcggccttcccctcctctcctcgcctcctcgtctcctcccctcctcgccttttctggcccagtcgggtggtcggggcggcggcgggcgaggctggagctcgcccgagccgggcccgctgcggaaatggagctgggggttttaaactgcggacgtttccctccatgttggcggcgcggcgcggctgtggagcggcggcggcagggagggttcgtgggcgcctttgtcctgccccaccgcagcctggctcccggcccctccgagcgcccgtctgacagatgagcaggcggccccgcggtcctgcagtaggaggctgacagggcgcggcggcctggcgggacggggaagggtctgcggccgaggtgggcttagattcgcgctgcttgtcactggctttgagggtcgtggtcgtcgcggtttggtgattctccaggcacactgcatggctgctcgctcctatgcgttgaattccttcgcccggacagtctcaaaaatcgggtatttaggcgggtgtgcgtgttcctgctaaagcacggtcctgctttttcacctttttgagggttcagaaaaatgttctaatgacagccagcctcgcactgccagtagcctcaaggggcacttagtaaagcacttgctttcggagggctttgttgaaggcgctttcccagagtgattacggggcccggtcgggtgttcacacgagggcgcggtagataccgtggtccgcgcgtggacacctgcagcgcgaggcgcggcgcctgggcagtgccagggtgaacaggcccccggggaccttgcacgtaaacacgtgtagatctgtagttacgcattgtagtaactggtgtgtgggagaagatggagctacggagaagagcagagggatcctaatttagattaggcaacaagtccagtttaagttttgtttctcaggctgcctgggaagagggagaagaacgagcaggaggggaatgatgagctgcccaaggatgtttatggggaagaaggcgcttctgcctttacagccaggaaggtggcctttctgttgcttcatgaagcaaagggcgcggagcaaggcccggggttcctgtttgcattttgcctagtggggctaccggggctcaggtgtgaaaaggaagctgtccaacgtcattcgagcgtcttgctctatgccacgtttagatgaatttggagaagtgaaggaaagatggctggagacccctgtaatgttaatgagcagagaattgttgtgttcacaaacagtaacataccggagctggaatgtgtgaggattgcagtgccagttgactctgaagttagcgggcatctggcttaatagagaaaaacctgagggtctccgtgtttttcctgtttatggcgaatgaggacattgggtgcagtgaacaaaatttttctttacaaacacacttgcctaaaacatctcttgtaagaaaatcctgtgtgtatcttgactcctgtaggtgagtgcatagtgagtgacacgaacaaatgtggggcttttgtgtgccatcctggctatttcactcctgtgggggagtatattaggatgtgattgcactgtatcctcacgtttgacaattgtgtgtggatcttgtgtaaagtgggggtgcacatcatgttgttggcttcatcttttggaacatttgtgtataagataatggtcttctaagaagaatgccggttcattttgtttgtttttcaagcaaatcttaattcttcttttaaaaagtaagctttagagacctaacaggtatccaccatatgtgttaacttgttcaacccagaataattgataagaatctttttggcactggcctgcgtttatattacacagatactgtgtatgtggtgtgtaagtgcaatggaaagatgccagtaaataagtttttaagaacacgcagaaactgttcaagggtcttttaaaacctcaagtagcccctgcgtcctgaagggcttgtgtttcaaaagtttataaagagttttttgcaacttgagcatcttcctgtaggaagacataattgccttcttttaactctggctgaccagtgtaggagagctagtactagtaagagtggtttgattttggggggcctagggaggaggagggggctcaagagaagagagaaggagggtacatttccttcctctttctttgtacttggaggctctgagctaaatgttgaaataggcaaagctggatgttgtcaccttccgtttttatgcccctgctcatgcagaggtgttcactgcccccctgctccctaagtgcccctcgggtgactcagccaggcctgacttcatcccgaaaacttgtgggctcctccccactactccaagcccaaacccattcattaccccagtgatgcccaatctcaggtaggtgtagggaagaaagctgcctctcttacctaatgtgttaattgactgacatcctctaatcaccagataagtacttgtgttttctttcatctaccaacctagctgccatctctgtaaactagtagagcttgttaagttttttcacagacgattaacagtgaaaaaatgtggtggttaagaaaggcctccctcaccccgcctccccccccactctcccactactcccttggggtaggtaattcaactttctccttaattccagagtcttcaaaggttcctaaatgttgcttttattgtatcatcagctcttaacaggagccagtgaggaatgtacattgataggcttggacaatacatcaagaagtgcttagttggtgaaatgaaggtgatttgggggacagctcatatctgtcctactggctgccccttggacgtggccccagctagttcatgtggtactggggaaggtcggcagccctggttttgttgtgtggaaatgtgattccgctggtcagccgatggagcggcattactgtctggcagctggaagtacccagctatcaattgatatttcaaaaagggtggcagacaggcctcacgtaagtggcagttcttgcagattgcttgtggattcctagagtattgtggggcttgtgggccatgttttgaatcagaggaaaagaatgttataattgggggttgatggctgctgtaggcttgagagaagtgagcttggatgaaggcaaccaccctggcttaggtgggtggttggcagagttacttggtatgcatttgtactttagctgtaagagttgaaagctaaataacccccaaatttattcattacagacttggaattatttttcttcctattgttgggttatagtcatgttaattgtacatccttgattttcccagtctggtttatagtttgctgtttttaataaaggcaatttgttaaaaatacaattaaatgcatttttaaagccattgtaaattgatacgcaaatttacaaatgagaaaatgtgttctttgtgagattgtgcctcattttttgattagcgagaactgtgatcacggtaggtgggtaacattttacatagtgtgaacttatggcgcctatatacattgttataattaatctttagtgtcacatagataacgcagtggctaaatcatcctctcaaatgattccaaatgagattgaatgtagcctttctggccctaaaatcctgaccagtcaattctggaaagttgtattttagtgatcagcctgtggaaaaagacaaatacataaatgtgtatgtattgactcaaatttttttctttaaaactattcaggttaattatagaaaatgccaagtaggaaatttgccgatggtgaagtggtaagaggtcgatggcctgggagttcactttattatgaagtagaaattctgagccacgacagcacctcccagctttacactgtaaagtataaagatggaacagagcttgaattgaaagagaatgatattaaggtaagagctcctttggtttatcagagtgtgtttacagtaagtgggaaataactctaagtatggtttctaagctcaggatagtcagttcagctcggtttgaaggcagaggattgagctcttgctttgggtcacatactgtttttggctctgggaatgtatgaatgaggcatagtccttgttcccaagaagctcacacttactgggaaagacagccatttgcatctgttggtcccctgggtttactacgttctgtgtctggagtttgctgtgggtggtgttgagtgtatcaagggtagagaagagccctgggcttcaggggaggctttcagaggcagtgacacctagccaagtgctgagaacaaacaggaaaaacagcagttgatggggctgtttctgcagagagggcagtatgccaaagtcaggggtctgggggacacagtcagccaagtgctggaagggggtggtaggggagggctaagcaggagccaggctgggggggcttttatattccatgcccaagggtttgggcttcatcctgaacaccaaggatttaatcaggagagtgacattaattagattcgagtctagcccagggcttttcaacctgtctggtgagggcctgggttttaagatatctgatccgtagtatacaaacatttatataaaatgccataaaaatgagttactagaaaaataaagacatacacaatagacgactcacagttttactatcagattcgatagatatgagattactttgtcaaaatgctataaacatttccatacacctatttctcaattttggtacttgcacagattagtaacgagcatttctaggacccatggctgaggatgacactttgagtgctctagaccaggaataaagcacagaaagtaaatattttagactttatgggagcggctccaggcagtatggaagggagcagacatggcagtgttccagtacaactttatggacagtgaaatttgaattttggataattttcacacttcaggaaatactgttcttttgattttgtttgtaatcatttaagaatgtaaaagccattcttagtaggaaggccacacaaaaattggggtgagggacttggcctggggcataatttgtctacatccctagaagcaacataaggagattcggagtaggtggggacacagtgaaacagttcccagtcatccaagctcatgttttattttcaagatctgcttatgtgttttgttcagagtgaaactgtggtactgtttttttttttttggtctgtgtgcttatttattttgtcctgtcgtctcagttttaatccatgttaattattacccttcttgcatatggtgttggaaataagtacagctaattggtttagatacattcgtttcatggaaataccttcaaagaacaggaatggaaaggctgcatttgtctcatgaaagatggatcattatgaaagcattttccattggcttcatctgatccattctcagatcctaacatttcccgtgctgattttagagttaatggtagcagttcctgcctttgttatcctcttctagtgtgggtctgtctgtatgtgttatgatttgtggtaaagctctttgccttcttccccctttctagcctttaacttcctttaggcaaaggaaaggtggctcaacttccagttccccttccagacgccgagggagtcgatcaaggtcacgctcccgatcccccggtcgaccacctaaaagtgcccgccgatctgcttctgcttcccaccaggccgacattaaggaagcaaggagggaagtggaagttaaattgactccgctgattctggtacttgtgtttatccttatacagccttttgtcttccgctttatgtatatatttactcaagttacttgcagttaataatattaaaatgtcactgaaacatcaaatctaagttgatgactttgggagttttcatataaaacaaatgtttggaatagaaagttttaaatatcaatggaaaagaatgtccttcagttaccagaaatgctatttaatattttagtttttaaaaaagcagcgttcaaatttgaaatagatgtagcttgtagattgaactgcgtaaggtttttacagtgtataaaagttcatatcatgtatgaaatggtaagacaaacctgtattacggaaacattcttactcttagcatcattatactttatcactttacctattcaaagatgattttagtggaattactttcaagatgtaagctttgaaatatcagggtgcatggagcctgtagatcttgtacaaatagtattttagatagtagaccaaagacaaagtatgttaagtaaaaagaataaaagtaatcttctattcacttaatgttaacctcttttctggatagaaggcacacagactttgagacagagtcttgctctgtcacccaggctggagcgcagtggcgcaatctcagctcactgcaagctccgcctcctgggttcacgccattctcctgcctcagcctaccgagtagctgggactacaggcgcccaccaccatgcctggctgattttttgtatttttagtagagacagggtttcaccgtgttagccaggatggtctcgatttcctgacctcgtgatccactcgcctcggcctcccaaagtgctgggattacaggcgtgagccactgcgcccggcaacagacttttaataaactttaaaaactggattatatacatactgctcagtagtcagctttaagacattttaaaatattgggataacctttcagagtgtatttttctacatcatttttgttgttgtattctatagtatggatatatggtaaattgtatacatgtaacttaatcgttaaagtcagctctgtcaatgatagacatttagtgtttttccttccatattttcactattacaaacaagtatttttatgtaacatctgattatttccttaggatggattcttacaagtggaactgctaggtcagctgtatggtgcagatttgaggcttttaatacatattgccagattgcatcaagaaagtttatagtagtatcagtgtatgaatgctcagtttctcattctgagtattataatttttttttttttttttggagaatgtggctgtcagacattttcaacttactgttctaacttacattttgaattagaacattttaactattagtggctctctttaccaccccgggactccaggaacagatgctgtgtgatactttgttatcctttcatttttaatatttagtgactgctatatttttacagtgtaatcttacagtcctggtgtcacaagaaccacagaagctttgcctcttacctggtagtgccttgggcctactgtgtgttgcataagtacccactatttcttagttttccattatgggctattttggagcagtgaatgtctttttgaatgtcttttgttttttatccagttaatgaactaatttaccaatttttactttctctgcctttcatagtaaatacccctaaaatctatcaatgaaattatgacattcagtctgattacgtgaaagatcaaagttgtttttttttttttttgaggcggagtttcattcttgttgcccaggctggagtgcaatggcgcggtcttggctcaatgcaacctccgtctccgggttcaagagattttcctgcctcagcttccgaagtagctggaattacaggtgcccgctaccgtgcgtggctaatttttttgtatttttagtagagacagggtttcaccatgttggccaggctggtcttgaactcctgacctcaggtgatccacccgccttggcctcccaaagtgctgggattacaggtgtgagccaccgtgcctggccagatgaaagattttatgtagaaatctatccaatatttcagagactgggaaattctagtcagttttattccttttcatttttaacaaaatgagggttaaattcgtcagaattaaggctgtgaaaaatctgttttattgcttgattccaaaacagtaagtttttaccatcatgtttctttttaataagttacagttcttttgattaaatgtttatattcttcaatttagaagccatttggaaatagcatcagcagatataatggggagcctgagcatattgagagaaatgacgcacctcataaaaatacacaggtgggaaagtgttccctttcatcttggttgtttttttttttcttttttttggttaaaagtgactctcccttgagaagcacattgaaaattgtaatattttataacctgttctaaaattctgtccttaaattaagactgaatataatttcacaaatttattcttactagtgtatagctgtattgagatgctgaaatagttaatgcagtagcattaatggtaattgttcactgcagatatttaatttttaaatttttcatttaggaaaaattcaatttgtcacaagaaagcagttacatagcaacacagtatagccttcgtccaagaagagaagaagtcaaattaaaagaaatagattctaaggaagaaaaatacgttgcaaaagaactggcagtgagaacctttgaagtgacccccatccgggcaaaggacttggagtttggaggagtacctggtaggcctcagagctgggcccagagagggcaggtggggtgagctaggggtggttgccacaaggtgaactggaaaggcctctctgaagacatctgaggcaggcaaggtaatgagcctggtgggaacctgtggaagagccttccagagaaggaacagtgggtgcaaaggcttgaggtgggagcattttgagggattatggagtagaaaggatgccattgtagctgtgtttaaaacttttagcagtctgttcagaggttttgagcacagaagtacaaagaagtgataaaggaaggttgatctgggagtttgtatagcatagatggttacttatcagggacagagagctctgctaatagtcagacctgaggcggcaggggccagcagtgggcctcagctgcctgcataaaatgggatcccggaggctgccctacctgctaggcgggttgattgtgagggtcaaagatctgaagtgtgcagagttttggagttactaagtgggtggaactgatgaaattttatgagctagtaaaagaaaagacttcttgtctaaatggctcaaaatcctgcatggcttaattgctttgtattttgttataacctttggctagctggcctgttacagatgctgtccagcatcacttaaaatctgcacacattacatgaacgtgacactattttaattgttagaaactgaggaatataaagttttttgttaagattaggctgataatttttagatgttctgatcttcagtttgctggagtttcaacacattcgctccttagtggttggaggtcaaatgttttagagcttggtttctgaggtgggtgtagctattcaatgttggacctctttctttttttttttatttttatttatttattttttttactactttgatgcccatggttgccaggccaccagaggtgacaggtagagatgggagtttttgatggtacattagaaattggtttcagacagttagccagataacgagttctgatcttaacaaatctaacatgattcttaaataaataaaccagattgaaatttgagcctcgaatgttcatgaattgtttgcaggtgtgtttctcatcatgtttggcctgcctgtgttcctcttcctgttgctgttgatgtgtaaacagaaagatcccagtcttctgaatttccctcctcctttgccagctttgtatgagttatgggaaaccagagtatttggggtctacctcctgtggtttttgattcaagtcctgttctacctactgccaattggaaaggtacgtttatggtaattctgttttgttttaataagatgaggtctcactatattgtccaggcgggtctccaatttctgggatcaagtgatcctcttgccgcagcctcctgagtcgctgggaccacaggcctgtgccatgctgcccagccttagagtagtttaaaggttaaaggctgttgttggtcataattcccaaaacttagttcatgaagccatttctcttgtgctgtctgtataacacttgcttattaggaggaacttaaaaaaaaatctgattgagatttcttgtgtaacttttcaaaccaaatagaaaagaataggctattttgcaaagtagccgactctcagtggaggttgctatggaaaaaaaattcactcttagtatgtgtcatttcagatgcagcattttaaatgattaattgataggctactgggctcgatggactttagtctacatcttttactttaaaaaagtatgaaaagtttctaattttcatctctttcagaagcttgttgtcaagaacattttacgttgttttcagattcctgcaatatctttaaaatttgtctctccattgctaagtgtagttttttcttctttcagtagaatcctttacttggatatatttaaagaaacatgagattccctaagtaataaataatttatttaaagatcttattcttagggctttgcaagtttgccaactgtctgtaaaccaaaggatcggttttactggtgaatgccagtgataggagggtagagctgcaggcttaatactgtggagtgagaccataactttagtggctctagcaagaatttttgtgataaagaccttcagtcatttctacagtaagcctctacagttaaattcagattcatttagggtaaggtgatttcagagtatcaaggaaagcagttttggtgtttaaagtcatatatgtatatactcatagactaaagtgactaaaagcatatatattaaaatatatattaatattatgcagtcatcccttgatatccttggggagtggttccaggacctcctgtacataccaaaatctgaggatgctgaaggccctgataagaaatagtatagtatttgcatataacctgtgtgcatcttccttgtatactttgttgcctttaggttgcttataatacctaatacaacgtaagtgccatgtaaatagttatcatactgtattagggaataaggacaagaaaaagaagtctgtacatattcagctcagatgcaattttttccgaaatattttggatctggttggttgaatccatggatgtggatcccgtcgatacggagggctgactgtatatttggatctatatattcacagattaaagcctaacacagcatttactagactcctttaatagataaggatcatctgaaattagcatgtggcattttactaatcctgtgatctcaaacagcttttacgtttctcttgggagaggaggaatgctagctaatgaaatctgtagctaatgataagataaagtagtttagcccagagcaaatgatactatatttatattttacagtttgaaatgaattgctacatttctgaatagttattttgtggggtaaaacgtggctgcattgagcaagtggactttttactgagccagttctattgggtaccatgcctgtgggtatctctgtgctgaatgctgtgagtgatgccgaatgaagagaggagatggttctgatgcatgatgcgtgctcacagtctctctctctctctctctctttttttttttttcttgagacagggtcttgctctgttgcccaggctggagtgcagtggtgcaatctgcaacctcctcctgggctgaagtcatcttcccacttcagcctcccgagtagctgggaccacaggcgcgtgccaccaggcttggctagtttttgtattttgtatttttgtagagaggggatttcaccatgttgcccaggctggtctccaactcctggactcaagtgatcctcccaccttgacctctcaaagtgctgggattacaggcatgagtcaccacacctggtttctcacagtctcttattgcagataaaagaatcacatgaaatggttaaataactggatgggcaatatatatataatatatagcagagcaagtaagcatatgagtatgcgtcatcaaatagcacttgggtcatagtagagtggataaacagggtagagcccaattgaaaaggaccccacaaatggaagacaatggaatcatactgttactttgtaagagtatggtagccattggtagatgtttgagctagggatccactagatataaaggtatttaagcacatttagtcttgaggtggtggtacacaggagtgtggcagggagcgtggctgttgcagttgcttggtcctacactaggaagtcattactgaatttgtatttaagataaattcctgaaggtggaattgcgtcattaaagggcttgccactagggtttttgaaacatattactaaatttccatgttacaagatatcttccttcttgggcgtgttgaaaattaagtgatactagaatatatatatatgtgtgtgtatatatgtatatatgatggtgatgtgcttagtaaatttgtaaattttttttcttttaaggttgtagaaggaacgcctcttattgatggaagaagactcaagtatagattaaatggtgattttctttttttaagactcaaattgatgatttgatagcttaaacttctaagtgttaaactctttgttaaagctgattagaccagagtagtaagtgataaattatttcttagtagttggaagagcaactgtttatacctgtagccaacttgtataaattatgccattaaagtaacatagcctcttagtcactcttgtccactctccagttttattttcttaatagtgctcatcactgttagaaatcattgcacttgtctaggattttatcacctgaggtgttacacggatgtgggcatccaggccactcctgctgcgtgagctgctcttgtccttgctcatgtcctctgggttgtcccttgaatattcgtcacacacacttcctgggcctttgcctggagaacttacccccaaacgtctgacacctgcatcttcacctccatctgtcttctgctgagagaagccttcaggtccctttctctcccctgctctgttttgtttttctgtctgacatttgtgcctccacacatcagtgtatttgtctcttcattagggtctctccactagaatgtggcttcatgggctaggacttggctatgttcattgtgacactcttggtgctaggaagatgggcatgtagtgggtgctcattcatatgtgagtgctggatggatgagttgtgagcttgctgggcagctcaataaatggatagaccttgttccctgtgggtccggcatctcgcactgtaagagcatgtgctgagtgcttcagtccagctttgtcatttgaagactttggcaaagtacagatctattttgtagtcatccttgaatgattttccatttgacaagacggagtagagtgttttccttttcttgagaattacattatgtattgtaatggttgaactttttatcctttcaattcttcattttttaactttggatactttgtttagagacttacgcagcatctactctgtctgcagtcactccactgggttctaaaggggaagccaaagatagtttagacaccttctgccttttagtgccagtcatgtgataaaacgtctcccccagctccagagtctgacccctggtgggtgcttaatacttatcattggtattgttagactttttgttgcttttaccaaattctttgctgatggagcaagttttagaacctttggcaccctccctccctctggtggttcacttaccacaccagggaaggtgagtctggggtgaggtgggttgttgactttgccgccaggtcctttgatttcagtgttttgtgtgtttctctgtaggtaccaattcttttctaagtaatcttgtgttatattttcacttccctctgaggggtgtggtacattcagagactgagcacagcacttggacatggagctcttggagccagtgggggagtggctggccaagttgcttgatcctttttaaaaatttcctcatctaattactctggttcaagtattgagatttcttttcgagattttacgattattaactaaggaggttcctaagacattttggatgattatttttaatccacataggctagagagcaaaagactgctttatctaaccattcttttttaaaattacattttatgaaaggtaaatgaatattttcaaaagtcagaatttagaagttattgtttggagtatttgtggaaaatgtggattcagataatttgagacaactattttactttacaaaaggtttggttttagaattctcatataaataacagctacctcttttttgcttttgaccgtttatccaaatggatttgatgactttttaggatcacagctctttgaggcactcagctcctttgaaagcaaaactatttctttagccaaaagaaaaaaattggatcttccagtgagcctttctgtgtggctgcaggactagcccggaacgagagttctgtggagcgtcacagggcgggtgctttttaacttggcattgcacgtgaatgtccccgcctgctgtccctaccccccaggtactcgcagtcccctgcctagcctcgggcatttgtgttgtggcatcttttctgcgggtggcatgttaagatctctgttctggatgatagagttttactagaatcttttgaaaccattattggcaacttggttaagtataaatatttataattttgtaactaccaacctggctcggtgcctgacccctggtaggtgcataataccctccccttaggtaatggcattagactttaaaatatgtgtttggcccagctctgttaataattagccatttgactttgtgcctgagagtttggattgtgggaattttcaggttgcacttcttgtctgttttcccttaattaaaagcaaataatgaccatttgaactgaaaaagaatcaatatgttaaactatttggaaagttctacaagagataatggtatgtatattgaaaattatacctcagacattgcttatttgcatatttgtgtgtatttagtctgaataatgaaattaagactttaaaaatgaacattgcattgtttcatagtggcgtaagtttcatgtgagccttgggttaatattaattttccacttccttttttttttttttttaaaggattctatgcttttatcctgacatctgcagtcatcggaacatctctcttccagggcgtagagtttcattacgtgtacagtcattttcttcagtttgcacttgcggccactgttttttgtgtggtcttgagtgtgtatctctacatgcgctctttgaaagcgccccggaatgacctgtcgcctgccagctctggtgagcagtgatgaattgcatgttggatgaatgcgtcccagagccctccagcagccatttccagatttgaatagattgctttttttctaacttcatttttgggaaatgaagagaagtaagaaaaaatgaaaagatgaagaaaaacgttaaagagatatgaatttaaaggaagaaaatatttttgttttaccttcatactttcttactcatttcttttttttgcagttgcttggtgacagtaagacgtttagtaaacttacaggcattttgacttatgacaaatattatttctttgtccaaaatagtaaacactctttaaaaaacaaaaaacaacagaggttactggccgggtgaggtggctcatgcctgtaatcccagcacttcgggaggccaaggcgggtggatcacctgaggtcaggagtttgagaccagcctggccaatatggtgaaaccccatctctactaaaaatacaaaaatcagctgggcgtggtggtgcacacctataatcccatctactcgggaggctgaggcaagagaatcgcttgagcgtgggaggcggaggttgcagtgagccgagactgtgccactgcactgtagcctgggccacagagcgaggctccatctcaaaacaaaacaaacaaaaaacaagagaaacgagaggttacaaattggttgatgctgacctgaagtatttcaatataaaaaaatgtcgcctatctaaaaaaaatggagtgtaaagtcctttgggggggcccccatgattttggttaacttttttaagaaacctgggcccccggctcccccaaaggctggagcaactgccttttcagtcgggcaggcatctcctggttccgctcgtctgtgccgtcctgtctgcctctcaccaccagagccctgctcagggtcttgcaggcagtggaattgtgagcctggatagtgggcggcagtgccgttgtaaagcctcctgactgggtttggaatgctgtttgggtaaacacttttcctttctcaggaaatgctgtctatgatttcttcattggccgtgaattaaaccctcgaattggtacttttgatctcaaatacttttgtgaattgcgccccggattgattggatgggtatgtctggttttttttcttctaaatttcaattcaataggtctaattaactgctagaaagaaatgtagaccattcaaaaataagcagtgggtggtatatttttagggataattatggctttccataaatctatcaaaatactttcttgtaagtattttccagaggtttaagatgccctgttacaggttatgacaaattaaataacttttctttgctttatttttattatatcagtttatatttatgtaggaaagtgatagtgtggatgaattaatgtaagaaaaaatgcattttcctcctttttaaattttacctagttttaggcttggagttgcagatagagagcaaagagttcccttccacccttcattctgtttctcacaacattaaccttggaggaaaccgtagtgtagtgatgaagaacagcagattaacatagtgacagcattggttaccaagtccacaggcctcagtcgagttcaccagtttttccgctgttgtcctttttctgttccaggaacctcgacaggactccacaatacatttagttgttattccttcttagtcttctctagtctaatagttgtttaggctttccttgtctctcatgaccttgatactttttggaaggtactggttggttattttgtaagtgtccctcagtttgggtcattccagtgttctctttgattgcggtaaagttacccactgtgacaggaacacagaaaggatagctgtgtccttctcagtgcattgggtccaggggcccatggtgctgagatgtcttattcctggtggcgggtaggagttacggtggcgtctgccaggtgtctcagctgtgaagctcactcatgcctttgtagtgctaaggtctctggggaggtgctttgaggctatatactttccccttttgtttcaggtggttattaacttggtgatgcttttggctgaaatgaaaatacaggaccgcgctgttccatccttggccatgattttagttaatagtttccagcttctctatgtggtggatgctctctggaatgaggtaattaattttaagagccgaggccttggagtcagatggctttgagtgggtgagtgacctgtcagagcctcggcttcttgcacacaaagtgaggggagcatggcctgcctccaaggctgcttgagaggaggacgaggccatccatgtgaagctgacgagggagcactgacaggtgggaagtttctaggcatttgggagtgcttcagtgtttatcagctgttcttgtgtttaaaagtaatattctaaatatttaagattggtggatcttggttttgtttttgtgggtggtggtaattatggtatcacatgaaaatggatggattattactaaattagaatggtgtttcttggactgtcaagagtcacctagtttttaaataatgggggagatgttttattgttaatgttttaaaatacaaagactagctctaattagatgaatgtaaaatcagaaatcaagatgcattgaggaaaccagttgaaataaggctaagtttccatcttgtgtcttttttcatacattgattagtctttctactagttgaagactggtaaatgttttgtttgttttctctgtctcagccagcatattccttttaaaaattttgtcttcctcaggcttattttacaagtattttatcgtatttactgttatctttgtaattatctccaaattccaactctagttttctttccatattaaaaacaaatctggcagctgtacatcataatgttccaaaacaagttttagtgacagtctgttgagacaatctgctgacattttgagagaagaccttttctctttgagcctggaacattaaaaaaaattatattatttggtcatcaatactatgtatctcccccacccctgctggctggtctttaattttggccttctatgcaaaattgcagagaacatttagtcagaacaacttcgcaagtttgatattggtgtttcgatgatctccttgttatttaggaagattagggccactttgaggtaaacctcaattacaagcggtgggattagtgctatccgctaattacgggttcctgttgcgctcctaccacttcacagaccctggctcagagcttgggaagctgtgaaggtggtgataacacttcaaatattgactttaaaaattccacgtcgacccaaaattaaacatgtttttgaaattaaaaaacaactgttttgtaaatgcacttactgttaccagtgtagctttgtttgctgttatagaatgaatcgccaaaagagcatataggttacagtttgcaaatcaaatgatatttcacagttgtgctcacctcagaggcttctttaaaccttcctttctagtagctttccactgatcagtgattatttcttctggtttcttctattactagctttctgccatgttgtggttgtcactttttaattggcttagaagttgatattttctatagatttagccaaacattgacttgtgttaaaagaaaattttttgcatcttaaggcaaaacgcttaatgcaatattaacatagccccaggggtagagaactagagttaggaaattgttttctgtctgttctcagtatctcagccagatgataataagcttcttgaggaaagattgtattttatgatttcttcagcattctggcatgccactgggcaattagcagatgcttaataacttctgtcaggtcacttgatagaaatccctctgtattcaagaatgtgctataccttaagaaaactgagactacctgtttaaatatgcatgacccttcctctgagccgtcctgtgaaagccttggggctcaggagctggtggggctaaagtcctccccctacccggcattgggtgcttaccctttgccctctcactgccactcaccacacctgcttttatctgctcccaccaatttgtcacctttatcctcttttggaccaggaatcagatcacaggccttgagagagaagaataagacactcttggggacagaaagttaaaacaccgtgtgtcctcacttatatgtgggcgctaaaaaagttgatgtcatagaagtataaagtagaacagaggatatgggaaggtgggaagggtagggggaagggaaggatagggagaggtttgttaaaggatacaaaattaccactcgataggaggagtaagttctaagttctagtattctataccactgtaggatgactatagttaacagtgatacatagtttcaaatagctagaaggatattgaatattcctaacacaaagaaagaatgtgtttgagatgatggatatgctaattaccctgattggattactatatattacatgtattgcaacatcactgtgtaccccataaatatgtacgattattacatgtcaatttttttttttaaagagaataaagtactctggttaactaaagagtataagcctaaggagctagattttgtgagattggtttttctgtttcatgtgacatctgtttttctgttccatggcctatttgctttcttttctggaaaaaaatgctatttagaggtaccactctttttctttaacctagaactttgattctccaacagagcttatactggctaatatttctacatcagtggtctgtactgaggttctgggtagtttagagattcccttaggccagaccttcagagtgttgaccttggtggtggttccgtattctagagtctggcctgcccgtatcctgggccagaggcgatctggctcatgctaaccaaatcaccagggagtaatgcacttttattaatttacatgagaagcgaagctgtcagttcaccatgttgccaggcagcttaatttcttctgtggaaaatgcacatgaaatgccagattatgaacagaaattagattggtccatgtggaattgaaacaaaaagagttggtgatcttattccttcagcaagcatattttgaacacttctctccatggcgggcactgtgctaggtactggggtggcaaaggtgaaaacacacagcctctgtcttttagaggcttttagtgtagtgaagagtgactagacaagtacagtaacccaattactgcagcctactggtgggtggtgatatctgagaagtgcccaggtctgagcagcaggtcaggagggcagcagagggtgtagggcctatgtggaggttggaggaggggttgtcagcagaggggagggcctgggcatgggggcatgggagatgctttagagatctgttatctccagagcatgagcgagaggctggcgtgacgggagaatgtgacagcagaaagacctagcaggccaggggaaccagatctctctcccctttaacaaaaaaatgttgattgtggacccgcccatagcactttttacatttgcctgtaaactagtactttatttgaatactttaaacacagaagctccttctccctttccccgtctgtatccttataggaagcgttgttgacgaccatggacatcatccacgatggatttggattcatgctggcttttggagacttggtgtgggttccctttatttacagcttccaagccttttatttagtcagtcatccaaatgaagtgtcttggccaatggcttctctaattattgttctgaaacgtgagtattaattttagtctcagtttaatttattaaatattatgtactgaggcttttatgccctgctgtctacatacttgaaacatgccattttgaatggccagcattagctcagtttgaagccatttatcatgagtaataaaaaatctgcattttgcaaagagaatggatggttcgtacttgggttctcagtagtacttgaaacagattattttaaaccatcttgcttttaaatttaataaatttaagttgttttaattcgttttggtaaccatacgtcttttctcttgagtgcctgctttttctggtaggcatcttataaagtaagaagatttgtcttgccttcatagagctcacattctaacaggagaaataagacattcctgccttgctgtgaggtgtgtgagtgagcactaagaggggcttagatgacgggtgttaaagatagagagaacttctctctggggagcgttagtgtgaacttatcggaggatatggtgttcgattggagttttagaggggaaaatgggatggggagatcgaaaagtcaggcactgggaacagctcagcaagggtgtgtggtggggaagtgtgagatgaggttgggaaagactgagaagtccagtttggctgcagctgcggtccaccagggtcagtcatggattttacttcaggatgaattttcattgttcttacactgttcactaaacacttatactagaggttgggcagggaaaattagcagtgaactgcaaatacagatagttttgctacacaagttagtatctgtggtagaagaagttcaaaccattggttaaaattaagatttagtttcaccagtggtttggatgtccatgtcatccattttattattcaagacagtgtattttatagttcagctaaaaatggggaatgtcttagtttgttttgtgctgctcgaacagaatagctgagactaggtaatttgtcatgaaatttatttggctcatggttctggaggccaggaagtcaaagagcatggtgctggaatctggcaagaccccttctgctgcagcatcccagggtggaaggtggaaggacaagagagagtgagggagggcaagagagagtgaggaagagcaagaggggctgaacatacttttataacaaacccactcgagatactgagcccactcctgtgatagccacattaatctgtccatgagggcagaaccctcatgacctaatcatctcttaaaggtgctacctctccacactgttgcattgaggattacgtttccaacacgtgaactttggagaacacattcaaaccaaagcaggaagtaaagttattctcttactagtttattgaggatcgactatataatagttaaatgtcagtgatagattgatttttgacattctgaaatttggataaaattaggaacttatagacttaaagtgggattcagcatgtatttaaagtgcaggatgttttggtgctgattctaagctagtgtttgataataaaatgtttgtgccatggccagtaggtataactaacagatgatatagcttgtaattttgattatactgaactctagtattgattttattgtaatgtaggctatcttagattttatctctttcatggatgtaactatatttgttttgccttcagagcgtttcctaggtggatgattaaagtagtgtgatagatttcggacgggttaccatctttttacatagtgggatttagaggttttgagttgttcttaagaatcaggccaggtgcggtggctcatgcctgtaatcccagcactttgggaggctgaagcaggaggatctcttgagcctaggagtctgctttggaaatttcctcagagcatagaaatcatttttaagagaaattacagatgctattaagcattagagtataactaagttattaacataggaaaatattttaaaattgcagtttgtggttatgtaatcttccgaggtgcaaattctcagaaaaatgcattccggaaaaatcccagtgatccaaagcttgcacgtaagtattgatttatgtttatattatatatattacatgaaggttttatttttctttttgtctcgacatcattaaaaatgtacttttatttttatatagatttaaaaaccattcatacttcaacgggaaaaaatcttctagtttctggatggtggggctttgttcgccaccccaattacttgggtgatctcatcatggccttggcgtggtccctcccatgtggtaagcatttcagaagagtgctagtttgacccttttagccgccagaaagatgtgtgtgtgtgtcctttgtgtgggacagtgtggccaaggtgggtgtgagtctttttgtcgcccttttctactgtgaggttggcctctgtagaagctcctctggcttctgaggggaattgggaattcacagagcctgaagttttactttaagcctaaaagcactattttaagttttcagctgtgcctgatagcttttttctaagtagaatatatagaaattaattcagcttcttaattcatgattcagtgtacatagattgggaaaaactttggtttttaagaagagaaagagattctgtttttctttttgtgtgtctggcctcgtggggagctgggaaagcaggggagcagggagagctgtgggagctggaggtgcttggggagctggggtgtcagggggagctggaggtactggtggagccaggggagctgggggaactgggggagcagggggatcttgggaagctgggggagctgggggaactgggggagcagggggatccaggggagctggtggaggtggaggagctggcccgtgcctgctgcctgtttggtggcccagcctgtggtggaagacagcagtttttcttctttgctgggggaagaagggcgagaaatggagagatgtgtattaactatgaggacagatgttttgattgtgatggattgttagaatggattcatcagtctttgagtagcttctaatttagatacgaccttctgccactttccagtgggattttacagacttgtttaattattctcatcattattagagaaaatgaagtaccttgtggttccatttttagagaatttgggggaaagcaggaaaaaatacattgtagtgataataaaaatatctaatactgtgtactattattatccacaggttttaaccacattctgccttatttctacataatttatttcaccatgttgcttgtccaccgagaagctcgtgacgagtaccactgtaagaagaaatacggcgtggcttgggaaaagtactgtcagcgtgtgccctaccgtatatttccatacatctactaatgctcttctggcttttctacaaaatactcctgcaattccagctgccatttgcaaaaacaaggaaaaaaatccgaaactttcttttgttgcactgacagggtctgtacttttttttttctttttgagtcaggactatggagccgagtagttgatcttttaatatagccgtgtttacttgtattaacttacagttaacataggaaaaatacaagtaaggatgtgagaatttgcattttaatgggaaattttcaacccttaatctgaaaacagaagacagtcttaatataaatgtactgtgaagaatgctattgatgtttatggtttctgattacttttcaaattttgatgtttttttgccagttggcttttcttaaatgaaaacactgttccatttaaagtacatttatgttttattcagtaagagaatagaattttcatttgtttttctttaaatcctttactaattatataatttgaaagcaaaaagaagggcctatattaaatgctgaaagtgaaaagtgatgacattattagcagacactgcttaaaggagaccatttgtagcagttggcttaacctcaacttctaaaactacattgaaaatgtaaatacatagcttagttttttgtaatatatggtgacttcagatttttttgtacagtattttgaatgtgagatgattgtcaggactaactgtctttttaacaaaacattttcagtattttaaataaaattttgtaaagtaatgtgaattaaaaattttggaacaattagaattcattcactattgtatagaagatgctgttaaaacataggaagggtatttttcttgatccaaagtttgtgaatttggctttgctacctcaattgcaggtgtttgtttgcctttataaactgttgcaaatagaaaaaaaatagaataagtatatatttttggagtaacatcaatatttaaacatttttacacagatcggtgtttgaaaatttgccatttcaggctaatatttttatatatttttgactttttaaaagttcatcagtgtttttgctactgttaagcttatgcagtttatactgtattttttatgtatcctttatatttaccaaacctgactccctgtaaaggagtgctgtcttaaaaacaactgaaggggttaaagtcgtttcttttagtttaatagatgtgcataaggtagctttagcaattaaattctagtgaagttgatatagtctcatttttaattgtcctgtaatggaacagtagcaaattcactaaacttttgtgttcagagttaaattgttctcagtactttcaatgtaggggaatgtaataaacatagtgtgtatgtttgggttttaattacacattttatatatgagccatttagatatgcagtgttaattctatactgcatttgaagtgtatgtaacttagcttatgttaatgcagtcatgaagttggtttgctccagcatccggtagtctttaaacattcttttagtgaaattgtcattgttttatcagtgctaatgtgtgcaagcagtttttttattttgcttttctcctggcatcagaaagtggtggcgttttctgtactggattgcaccaaggaagcttttggggaggaaggaaggacattaaattctttccctggtaatgaaaagagccctttatcaatacagtgctgcaatttctggatatcagctacactttgtttttaagtttgtttttgacatgtttatttggcaaattttataatgaagttttaagttgaaaataaaatgtagcaacattttgatcactttggagccttttttttttccctttcttgcttgaaactgagatttttgggaccaagacaggagcccttagattcccacccctgcccagcctcctgttttcctaggatcatctgtttgggacccctggccaactgctgtttaaaactctcagaatgttggaactcaaaggggttagttgggaatcctaactcccagaaaatggtcatgtgtttagtatttgctgtttgagaaaatacagaaatgctaaaactattgtagatccagtcatactttcaaatgcatttgtatgaatcacagaagcatctgtgcatttgaaagacagtacgtgtgtgagagacacacgagacacacacatgtactgtgcctgctgaccgtgctttagtgcttgtttggatttccagttgactctaagcctgaattgtgagatgagatcagacagcttcacctctcaattcttcctgctgcgacgttacattgtgacattacattgcaaaatgtgggtgtgtcagaatatgcaccaataccaagtatacgatttatattttggtgtttagttttgcactgtttggagcaaatgatgaaatataggattttaacaaaagatacaaggtggagtgtttctaggtgcaatttacttaaatatagatggtacagtttcctagacaattacatacatgttttgttcatggctgttaaaagagtctagtgctgggtacaagtcccaccttttctaccccccttactatggagagaggggactgttgggatcttcatttgtgtacacgtgggttatgctttctgcccatggaccattgccatgataaagagacagtgagatgtggcttcaaatgctagctgtgctccctcttagcaatgtgtgtgtgggcaattaatctctttgagcactggtttcctcatgtataaaatctggctgatacgtccacagagtatagaggggcctgaggatgatataggaattattagtgttcaacatagtgctcagttatgttagccattattagtagaataacattcttcctataggaacattgaatttaccaaattctcaggatttggcttttagtggtcagagaggtctagtgaagtcagaaccatattgcactttttttttttttttttttttttaaagagatggggtcttgctttgttgcccaggctggggtgcagtggcgtgatcatagctcaatgcagcctcaacctcctgggctcaagccatcctcctacctcagactctgagtagctgggactaaaggtgcctcatcatgcctggctaattttttaaacaattttttgtaaagacagggtctcattatgttgtcaaggctggtcttgaattcctggcctcaagtgatcctcttgccttggcctccccaagtgccgggattacagacatgagccactgtacccagccagaccgcaattttttttcaagacagagtcttgctctgtcacctaggctagagtgcagtggcacagtctcagctgacagcaacctctgcctcccaggctcaagtgattctcatgcctcagcctcctgagctgggattacagacctgcgccaccacgcccagccaatttgtgtatttttagtagagatgggtttcgtcgtgttgtctaggctggtttcgaagtcctgacctcaggtgatccgcccgccttggcctcccaaagtgctaggattacaggtgtgagccaccacgcccggcccagactgcacttctttaaagaggaaggcccttctcttttgtttcagaagtctgcagctaggtcagcagtgtagtattctgtgtttacttagagaagccaggggaagtattccaaagatctattctacatgtgtatatttagtttattgtatataattttataaaccacttttaccaaaaagttcataaaggcatgccctgatatcctgccaggtgctgtggtttttactgttaggagagtcaaatttgctgtattccgggttgtgctgacctgtactagagcccaaccacagggacattgcacagtcaggtctcatgtacttagaataaaaagcagctgcaagattcccctctgtgttgaagttttcatgtacaaatgaaatagactgcacctgcccagtctggctgaacacacaaatattttataaagggtgttgactacatgtgaatgtcttgaaacatgtaagtctgattagagtcaaaaattaaaatggtttgatatggacatttatttttcattcttctcacaaagcaatgcaacccgcattgtgatccagtgactaggaggtttcttcgttgataaatacactgatgttaaaaagtttgttggtaaaccggtagttgccaaaattcttgacctctcaggtgtctggtaaactgggcattcaaaagcatagagttctgaatctgtctggttggaagcatttggtgttttggtagaaatctttaaaaaaaaaaaaaatccagtagtcaaattgcatagttcaagtgaatcagtagctcacattttctgtatgctaggcttgagggatttgttatgaattagatacatttaaggttaaatggttaatgtaacagcatgtggaaattatacctggagaatttaaagagtattatggctttatagtacatattattgagaacatgggatgtaagtatagcatctactttagattttagtaatattttgggagatttaaaatctttgttgtctgagtatattatcacatctcccttgcaaaattgtagggaatgggaataagagtggtttgtatattactgaagcaacgctcagaggtttaggacttcaggataatagcagggtgattacctttgttggcaaaaagtatatgtcgggaaaatcacagcacatctccagaggcagcgagtcttccagtattttctgttcacgattccatcttgccccctcgatgaataaaccaaaaatgtaaactccagtgtgagaggaagctgagccctaagatggaagagaggtggtgtcagggatccccaggagaagcagcgaccaactggaggctccgtccggaattgagccgaccgatccagaggggctcatcctgcctaaggcatgttgccccaagttctaaggtgaatacttattttttttcctattctgagtgctttaaaaacgacataggcttaggtgtatctatataatcatcctgaactgaaatatatgtattttttccatgacacccttcctcagcatgaagacaaagaccttcaaacacaataaatatgcaaatttctacaattgtaatcgtgtagccgagctttttaggacagaacaagaacagttacaaaaggtgacagagtacactgtgctcaaacattgtcacctacctttaccatagtggccataactacagttttaggctctagaaatgtaaaaaaggcagaggaggggttttttttttttttttttttttttgacatggagtctcgctctgttgcctaggctggagtgcagtggcatgatcttggctcactgcaacctccaccgcctgggttccatcggttctcccacttcagcctcctgagtagctgggattacaggagcacaccaccatgcccgcctaattttttgtatttttagtagagatcgggtttcatcacgttggccaggctggtctcgaactcctgacctcaagtgatccgtctctcttggcctcccaaagtgctgggactacaggtgtgagccaccatgcctggccgggttccatatatttttgaatgatataggttaaatagaggattacattttaatgataaagggttaagtaaaatgagtttctgatgaggtctgtgaagtagaaaatttagttgcctgcagctccaattccaggtgactccaggtgtgcctgaggtaggcctgtgaagccacatgctctcctgcaggtgtgctggagggatgcccagcctggaggagctggtggccaagtaccaggccaccctggagggctctgccatctcctctgatggggcaggtctctgaagagaaggggtgggcaccgctgtcctgagctctcccttgatgcagcctgggccagcttgttgacacaggggaggcagtgtggaacagcctgtgctgtgcctggtgatgccttctgtgttgtccactctggaatgtgactacctggaggtgcaagctgaactcatattaagcacttgctattttggcttattctataaaagaattttggccgggcgcggtggctcatgcctgtaatcccagcactttgggaggctgagcggggggatcacgaggtcagaagatcgagaccatcctggctaacatggtgaaaccccgtctctactaaaaatacaaaaaatattagccgggtgtggtggtgggcgcctgtagtcccagctgcttgggaggctgaggcaggagaatggtgtgaacccgggaggcggagcttgcagtgagctgagatcgtgccactgcactccagcctgggtgacagagcaagactccgtctcaaaaaaaaaacacaaaaaaaaaacaaaaaaagatatatcactgcacgtccactagaatgactaaaactaaaacactaaaaataccgagtgttggcagggatgtggagcaatcttctacattactggtgggcctgtggattggtacaaccacattgaaaaaccatttggcagtatctacaccaaaactaaacatatggccatgtatgaccctcagtnnnnnnnnnnnnnnnnnnnncacaggggaggcagtgtggaacagcctgtgctgtgcctggtgatgccttctgtgttgtccactctggaatgtgactacctggaggtgcaagctgaactcatattaagcacttcctattttggcttattctataaaagaattttggccgggcgcggtggctcacgcctgtaatcccagcactttgggaggctgaggcgggcggatcacgaggtcaggagatcgagaccatcctggctaacacggtgaaaccccgtctctactaaaaatacaaaaaattagccgggctcgggaggctgaggcaggggaatggtgtgaacccaggaggcggaggttgcagtgagctgagatcacgccactgcactccagcctgggcaacagagcaagactccatctcaaaaaaaaaaaaagaattttactgggaattgctttgtataatgctttttacttctcttccccttaacttatataaatgcaaattttcctatactgcatttgttctagtgttgtcctttcctaacaatcttggaagaagttaatctaacgcatttgacaatgtcacttccatttatacttgtttaacttggtcatagcttacatgggtttttcctctgaaaaatctaaactgtaggtaatttgtaaacagccccttttggagtgatttaactcttcaaagagccactcagaataaatggaagtaatcttacttcaactcagtggaagctggttgtttgtataaagcagaaataagtgagaacatctgattagatggatagaggcaaaaagcaaacttaggcgggcagtccatacccctgtgctccctctgtgagtcataagaaaaggccctggtgcacatctgcctctcggtagccttttcatgtctaatgggttatgtaggaagaggttaggctatgggtgtagagtcagctagacttggtgggttcaaagcttatgatctgcctctttgaaccttagtttcctgacctacagaatgaggctaatttgtgaggattaaataatgcaggtaaagagcttagcacatagtacttagtcagtgttggctagcaagcatcagtgccatcattatcaggtagattgggatcttctagagggcagaggccttacgttgttcatctcgatatttccaacagccagagcagttttggacccatattttaaataaacagttggataaacctccagtcgaaaacacatctgaacctgagctttcttccacgtcaatactcttgccaagcggtcacctgatttctcctaaagctccagtgacagggaactccctgtctataaaaggacacgccaccatcatcatcaatttagatcaactgcatgtgtcttccccttggaggtccccctggttggagttctagcagaattagagtctagttcttcatgtatcacccttttcaatatttctttttctcctcagagtcttttgccttgtaggacaaactctcccagttccatccttcttctgacatgttcctaacgttcactaattctgggtagtctcggaatcatcttagtgcagtctgatgagtgctgaggagaggaagaccaggacccagaggccaaacagcatgagtgtccaccacctcctcccactccaaatcccagaatgcaactatgaaagcaccggaaaacaagaagtatccccagtggaccagaaactgtgagaaccctaaagacagaaggcagataggattagaataaggaaaccaccgtcaataatatgcacaataaaaactaaaaacatcaccctctccaagccccccgccccatcctacagaataatttttttttttttttttgagacgggagtctcactctgtcgcgcaggctggagcgcagtggcgcgatctctgctcactgcaagctccgcctcctgggttcacgccattctcctgcctcagcctctcgagtagctgggactacaggcgcccgccactacgcccggctaatttttgtattttcagtagagacggggtttcaccgtgttagccaggatggtctcgatctcctgacctcgtgatctgcccgcctcagcctcacaaagtgctgggattacaggtgtgagacaccgcgcccggcctaatcctacagaataatatcaaataaaatattgatacaaaaatcttgaataaaatattacaattaagatgattcaaccttaggatcttttaataaatcatattgataaaagtgataaattatgtgataatctccataaaccctgaaaagctctctcatcacatttagcttccattcttcattaaaaaattcctaatacaggaatcataccttataaccaactacactccagatagttctatgtactccaccatgttaatgagataaaggataaaaactatctgattatttcaatagaaacaggcccaggcatgtagaattatttgatctatgacaaagttgaagtagggaaagggccatttcaatgaaaaaatggtgctgagtcaggtgggtacccatatggaaccaaaagaactttgatctcacctcatgccatacacaactcaattctcctttttttttttttttttagacagagtctctctctgtcacccaggctggagtgcagtagcacgatctctgctcactgcaacctctgcctcccaagttcaagcaatactcctgcctcagcctcccaagtagctgggattacacatgcgcaccacccaacctggctaattttttgtatttttagtagagatggggttttgccatgttggccaggctagtctggaactcctgatctcaggtgagctgcccaccttgacctctcaaagtgctgggattacaggtgtgagccaccgtgcctggccttcaattatatatagatcatagaaaatgaaaggtaaagcaatatagtttctagaagataacaggagaatattttcatgaacttagtttagggtaggcaaagatttcttaaacagaacataaaaaagcattaaccctaaataaaagatggatacactggactttgttaaaacaaaaaaatttttgttcatcaaaagacaccattaagaaagtgatttggaaagtcacacactgggagaagatgctttcaatacatgtacctgacagcttatattcagaatacacaagaacttctataaatcaatacgacaaaaacagtccacagtcttgaacagaatcttcacaaaagaggaaatccaaatatcaataatcattttaaaaggtgcccaccttaattaatcatcaaggaaatgcaatttaaaatcataaagataacatcgctgtggccgggcgcggtggctcatgcctgtaatcccagcactttgggaggcggagcagggggatcacgaggtcagaagatcgagaccatcctggctaacatggtgaaaccccgtctctactaaaaatacaaaaaatattagccgggtgtggtggtgggcgcctgtagtcccagctgcttgggaggctgaggcaggagaatggtgtgaacccgggaggcggagcttgcagtgagctgagatcgtgccactgcactccagcctgggtgacagagcaagactccgtctcaaaaaaaaaaacaaaacaaaacaaaaaaaagatatatcactggcacgtccactagaatgactaaaactaaaacactaaaaataccgagtgttggcagggatgtggagcaatcttctacattactggtgggcctgtgggattggtacaaccacattgaaaaaccatttggcagtatctacaccaaaactaaacatatggccatgtatgaccctcagtgtatttaatcatgagctccataacaacatttgtgccaatgacagaccacatataccaagctggtcctataagattatgatggagctgaaaaattcctatcacctagcgatgatgtagaggaatgcatccatgcatttctatgtatagatgtgtttgggtacacaaattaccattgtgttacactgcctgcagtgttcaatacagtaacatgctgtacaggtctgtagcctggcagcaataggctatcccatttagcctaggtaagcagtaggctatgccatgtaggtttgtggaagtacactcttaacgatgcatttctcagaatgtatccccatcgttaagtggtacatgattgtacttatttatttattactattttttcaattcttttggttatagccaacctagtgggtgtaaaatggtatttcattatcattttgatttgcacttctctgactaaagatattgagcatcctttcacattctttttgttttttcaaatctttaaaccaatgtctcccaaccctgtctccccttcctccccagcattagtcctggagcagaaaaatagattcccagaacaaattggaatttagaaaatgacagctgtggcccttcaaatcagtggggacagtggcgtgggagtggcagggctggggtgcatggtgcacctggctggctggtgctctgtgctctgcttcagcccaagctgcctccatgggtccccctcactgcaccgctgaggtctgggtaggtgtaggtttccacttagcacctggctgagctctggaataagtcggttgctgggggcaggaatttcggccatgagcagctaggacaggtttgcccactgatttaaaatatcaccttttgatgctgacctcagcagcattctgtcttcatttataataggggatacttagaaagtctgttgattacattgacttaaatcttttattcatgatttatgatcttttatcccccccagaaagagagtggaagacatgaagtctgagggcatttggacttgaagcagggcttgttgatctgcctgtctagtgcctggcatgtggtaagtgctgagtaaaggtttgtaaagggcacaattgattgaatgaataaatgaatgaatgaatgatcaccgtttctaatccttgaagtattccagtaccttaaacgctctcctgactatgttgagtttctttggcataaatacggagaacttctcatccttgtcagtggtgttggaaatcacatggtgggtgaaggtgagggcatccacagcgattcctcgggacctcccatagtcttgaagcacagcagcaagaaaggctttggagaagaacacacaccatcaagttccttgtgagtctcagggcctcctgctggggttagcaacaatgatgtctcatggagaagaaagggaagagtggaggaaaaagagag

SEQ ID NO: 655 - DNA, 3875 bp, Homo sapiens
tagcagaaaaaaaaaagcttaggatccgtaacagattcggagtcaacaatgacatgactcagcattttggggttcaattaaaaccaggcttgtaggttgcaggtcaagttgtgtttcggtgtgtaacgcataaaacttcttgttccacgctccgcggtgttggggattttctactgcatctcgacagcatctcgggtaacaaccgagcccctcctcgcagcgttaattatagaaaatgccaagtaggaaatttgccgatggtgaagtggtaagaggtcgatggcctgggagttcactttattatgaagtagaaattctgagccacgacagcacctcccagctttacactgtaaagtataaagatggaacagagcttgaattgaaagagaatgatattaagcctttaacttcctttaggcaaaggaaaggtggctcaacttccagttccccttccagacgccgagggagtcgatcaaggtcacgctcccgatcccccggtcgaccacctaaaagtgcccgccgatctgcttctgcttcccaccaggccgacattaaggaagcaaggagggaagtggaagttaaattgactccgctgattctgaagccatttggaaatagcatcagcagatataatggggagcctgagcatattgagagaaatgacgcacctcataaaaatacacaggaaaaattcaatttgtcacaagaaagcagttacatagcaacacagtatagccttcgtccaagaagagaagaagtcaaattaaaagaaatagattctaaggaagaaaaatacgttgcaaaagaactggcagtgagaacctttgaagtgacccccatccgggcaaaggacttggagtttggaggagtacctggtgtgtttctcatcatgtttggcctgcctgtgttcctcttcctgttgctgttgatgtgtaaacagaaagatcccagtcttctgaatttccctcctcctttgccagctttgtatgagttatgggaaaccagagtatttggggtctacctcctgtggtttttgattcaagtcctgttctacctactgccaattggaaaggttgtagaaggaacgcctcttattgatggaagaagactcaagtatagattaaatggattctatgcttttatcctgacatctgcagtcatcggaacatctctcttccagggcgtagagtttcattacgtgtacagtcattttcttcagtttgcacttgcggccactgttttttgtgtggtcttgagtgtgtatctctacatgcgctctttgaaagcgccccggaatgacctgtcgcctgccagctctggaaatgctgtctatgatttcttcattggccgtgaattaaaccctcgaattggtacttttgatctcaaatacttttgtgaattgcgccccggattgattggatgggtggttattaacttggtgatgcttttggctgaaatgaaaatacaggaccgcgctgttccatccttggccatgattttagttaatagtttccagcttctctatgtggtggatgctctctggaatgaggaagcgttgttgacgaccatggacatcatccacgatggatttggattcatgctggcttttggagacttggtgtgggttccctttatttacagcttccaagccttttatttagtcagtcatccaaatgaagtgtcttggccaatggcttctctaattattgttctgaaactttgtggttatgtaatcttccgaggtgcaaattctcagaaaaatgcattccggaaaaatcccagtgatccaaagcttgcacatttaaaaaccattcatacttcaacgggaaaaaatcttctagtttctggatggtggggctttgttcgccaccccaattacttgggtgatctcatcatggccttggcgtggtccctcccatgtggttttaaccacattctgccttatttctacataatttatttcaccatgttgcttgtccaccgagaagctcgtgacgagtaccactgtaagaagaaatacggcgtggcttgggaaaagtactgtcagcgtgtgccctaccgtatatttccatacatctactaatgctcttctggcttttctacaaaatactcctgcaattccagctgccatttgcaaaaacaaggaaaaaaatccgaaactttcttttgttgcactgacagggtctgtacttttttttttctttttgagtcaggactatggagccgagtagttgatcttttaatatagccgtgtttacttgtattaacttacagttaacataggaaaaatacaagtaaggatgtgagaatttgcattttaatgggaaattttcaacccttaatctgaaaacagaagacagtcttaatataaatgtactgtgaagaatgctattgatgtttatggtttctgattacttttcaaattttgatgtttttttgccagttggcttttcttaaatgaaaacactgttccatttaaagtacatttatgttttattcagtaagagaatagaattttcatttgtttttctttaaatcctttactaattatataatttgaaagcaaaaagaagggcctatattaaatgctgaaagtgaaaagtgatgacattattagcagacactgcttaaaggagaccatttgtagcagttggcttaacctcaacttctaaaactacattgaaaatgtaaatacatagcttagttttttgtaatatatggtgacttcagatttttttgtacagtattttgaatgtgagatgattgtcaggactaactgtctttttaacaaaacattttcagtattttaaataaaattttgtaaagtaatgtgaattaaaaattttggaacaattagaattcattcactattgtatagaagatgctgttaaaacataggaagggtatttttcttgatccaaagtttgtgaatttggctttgctacctcaattgcaggtgtttgtttgcctttataaactgttgcaaatagaaaaaaaatagaataagtatatatttttggagtaacatcaatatttaaacatttttacacagatcggtgtttgaaaatttgccatttcaggctaatatttttatatatttttgactttttaaaagttcatcagtgtttttgctactgttaagcttatgcagtttatactgtattttttatgtatcctttatatttaccaaacctgactccctgtaaaggagtgctgtcttaaaaacaactgaaggggttaaagtcgtttcttttagtttaatagatgtgcataaggtagctttagcaattaaattctagtgaagttgatatagtctcatttttaattgtcctgtaatggaacagtagcaaattcactaaacttttgtgttcagagttaaattgttctcagtactttcaatgtaggggaatgtaataaacatagtgtgtatgtttgggttttaattacacattttatatatgagccatttagatatgcagtgttaattctatactgcatttgaagtgtatgtaacttagcttatgttaatgcagtcatgaagttggtttgctccagcatccggtagtctttaaacattcttttagtgaaattgtcattgttttatcagtgctaatgtgtgcaagcagtttttttattttgcttttctcctggcatcagaaagtggtggcgttttctgtactggattgcaccaaggaagcttttggggaggaaggaaggacattaaattctttccctggtaatgaaaagagccctttatcaatacagtgctgcaatttctggatatcagctacactttgtttttaagtttgtttttgacatgtttatttggcaaattttataatgaagttttaagttgaaaataaaatgtagcaaca

SEQ ID NO: 656 - protein, 611 aa, Homo sapiens
MPSRKFADGEVVRGRWPGSSLYYEVEILSHDSTSQLYTVKYKDGTELELKENDIKPLTSFRQRKGGSTSSSPSRRRGSRSRSRSRSPGRPPKSARRSASASHQADIKEARREVEVKLTPLILKPFGNSISRYNGEPEHIERNDAPHKNTQEKFNLSQESSYIATQYSLRPRREEVKLKEIDSKEEKYVAKELAVRTFEVTPIRAKDLEFGGVPGVFLIMFGLPVFLFLLLLMCKQKDPSLLNFPPPLPALYELWETRVFGVYLLWFLIQVLFYLLPIGKVVEGTPLIDGRRLKYRLNGFYAFILTSAVIGTSLFQGVEFHYVYSHFLQFAATVFCVVLSVYLYMRSLKAPRNDLSPASSGNAVYDFFIGRELNPRIGTFDLKYFCELRPGLIGWVVINLVMLLAEMKIQDRAVPSLAMILVNSFQLLYVVDALWNEEALLTTMDIIHDGFGFMLAFGDLVWVPFIYSFQAFYLVSHPNEVSWPMASLIIVLKLCGYVIFRGANSQKNAFRKNPSDPKLAHLKTIHTSTGKNLLVSGWWGFVRHPNYLGDLIMAWSLPCGFNHILPYFYIIYFTMLLVHREARDEYHCKKKYGVAWEKYCQRVPYRIFPYIY

SEQ ID NO: 657 - DNA, 3815 bp, Homo sapiens
agaagcgccgcgaggcggggccggggaggcgcgcgcccggcttgcgggactgcggggcgcgagagcgcggccgggtagcgtcgcgcgcgtggatctgccgccgggttgctgtgcgactattctccgggagccgtccgtgtcaccgccggaacctggcgcaggttaattatagaaaatgccaagtaggaaatttgccgatggtgaagtggtaagaggtcgatggcctgggagttcactttattatgaagtagaaattctgagccacgacagcacctcccagctttacactgtaaagtataaagatggaacagagcttgaattgaaagagaatgatattaagcctttaacttcctttaggcaaaggaaaggtggctcaacttccagttccccttccagacgccgagggagtcgatcaaggtcacgctcccgatcccccggtcgaccacctaaaagtgcccgccgatctgcttctgcttcccaccaggccgacattaaggaagcaaggagggaagtggaagttaaattgactccgctgattctgaagccatttggaaatagcatcagcagatataatggggagcctgagcatattgagagaaatgacgcacctcataaaaatacacaggaaaaattcaatttgtcacaagaaagcagttacatagcaacacagtatagccttcgtccaagaagagaagaagtcaaattaaaagaaatagattctaaggaagaaaaatacgttgcaaaagaactggcagtgagaacctttgaagtgacccccatccgggcaaaggacttggagtttggaggagtacctggtgtgtttctcatcatgtttggcctgcctgtgttcctcttcctgttgctgttgatgtgtaaacagaaagatcccagtcttctgaatttccctcctcctttgccagctttgtatgagttatgggaaaccagagtatttggggtctacctcctgtggtttttgattcaagtcctgttctacctactgccaattggaaaggttgtagaaggaacgcctcttattgatggaagaagactcaagtatagattaaatggattctatgcttttatcctgacatctgcagtcatcggaacatctctcttccagggcgtagagtttcattacgtgtacagtcattttcttcagtttgcacttgcggccactgttttttgtgtggtcttgagtgtgtatctctacatgcgctctttgaaagcgccccggaatgacctgtcgcctgccagctctggaaatgctgtctatgatttcttcattggccgtgaattaaaccctcgaattggtacttttgatctcaaatacttttgtgaattgcgccccggattgattggatgggtggttattaacttggtgatgcttttggctgaaatgaaaatacaggaccgcgctgttccatccttggccatgattttagttaatagtttccagcttctctatgtggtggatgctctctggaatgaggaagcgttgttgacgaccatggacatcatccacgatggatttggattcatgctggcttttggagacttggtgtgggttccctttatttacagcttccaagccttttatttagtcagtcatccaaatgaagtgtcttggccaatggcttctctaattattgttctgaaactttgtggttatgtaatcttccgaggtgcaaattctcagaaaaatgcattccggaaaaatcccagtgatccaaagcttgcacatttaaaaaccattcatacttcaacgggaaaaaatcttctagtttctggatggtggggctttgttcgccaccccaattacttgggtgatctcatcatggccttggcgtggtccctcccatgtggttttaaccacattctgccttatttctacataatttatttcaccatgttgcttgtccaccgagaagctcgtgacgagtaccactgtaagaagaaatacggcgtggcttgggaaaagtactgtcagcgtgtgccctaccgtatatttccatacatctactaatgctcttctggcttttctacaaaatactcctgcaattccagctgccatttgcaaaaacaaggaaaaaaatccgaaactttcttttgttgcactgacagggtctgtacttttttttttctttttgagtcaggactatggagccgagtagttgatcttttaatatagccgtgtttacttgtattaacttacagttaacataggaaaaatacaagtaaggatgtgagaatttgcattttaatgggaaattttcaacccttaatctgaaaacagaagacagtcttaatataaatgtactgtgaagaatgctattgatgtttatggtttctgattacttttcaaattttgatgtttttttgccagttggcttttcttaaatgaaaacactgttccatttaaagtacatttatgttttattcagtaagagaatagaattttcatttgtttttctttaaatcctttactaattatataatttgaaagcaaaaagaagggcctatattaaatgctgaaagtgaaaagtgatgacattattagcagacactgcttaaaggagaccatttgtagcagttggcttaacctcaacttctaaaactacattgaaaatgtaaatacatagcttagttttttgtaatatatggtgacttcagatttttttgtacagtattttgaatgtgagatgattgtcaggactaactgtctttttaacaaaacattttcagtattttaaataaaattttgtaaagtaatgtgaattaaaaattttggaacaattagaattcattcactattgtatagaagatgctgttaaaacataggaagggtatttttcttgatccaaagtttgtgaatttggctttgctacctcaattgcaggtgtttgtttgcctttataaactgttgcaaatagaaaaaaaatagaataagtatatatttttggagtaacatcaatatttaaacatttttacacagatcggtgtttgaaaatttgccatttcaggctaatatttttatatatttttgactttttaaaagttcatcagtgtttttgctactgttaagcttatgcagtttatactgtattttttatgtatcctttatatttaccaaacctgactccctgtaaaggagtgctgtcttaaaaacaactgaaggggttaaagtcgtttcttttagtttaatagatgtgcataaggtagctttagcaattaaattctagtgaagttgatatagtctcatttttaattgtcctgtaatggaacagtagcaaattcactaaacttttgtgttcagagttaaattgttctcagtactttcaatgtaggggaatgtaataaacatagtgtgtatgtttgggttttaattacacattttatatatgagccatttagatatgcagtgttaattctatactgcatttgaagtgtatgtaacttagcttatgttaatgcagtcatgaagttggtttgctccagcatccggtagtctttaaacattcttttagtgaaattgtcattgttttatcagtgctaatgtgtgcaagcagtttttttattttgcttttctcctggcatcagaaagtggtggcgttttctgtactggattgcaccaaggaagcttttggggaggaaggaaggacattaaattctttccctggtaatgaaaagagccctttatcaatacagtgctgcaatttctggatatcagctacactttgtttttaagtttgtttttgacatgtttatttggcaaattttataatgaagttttaagttgaaaataaaatgtagcaaca

SEQ ID NO: 658 - protein, 611 aa, Homo sapiens; identical to SEQ ID NO: 656

SEQ ID NO: 659 - DNA, 81463 bp, Mus musculus
  misc_feature (1)...(81463): n = A,T,C or G
gcataaaaaaactagctgtggggcctcaaaagacagcttgtggttaagatggtctgccgctcgtgcagaagatctggactcagttgccattgggtggctccccagttacaggggatctgacgtcctccccttctggcccctgtgggcaccaggcacacaatacacatgataaacatacagacatccagacaaaattcccatacacaataaagttagaaaggagaaagagatggggtttgggggagggagagagggagcagggaagggaaagagggagccgagagggagagagagaaagctgatccatcaagtaagcaaggcagagacggagccagcaagcaatgttcctccatggttcttgtgctaggttcctgccctgatttccttcagtcatgggtttggtctggcagtgtaagatgaagtgacccctctcctcctccagctgcttttagttgtggacacctttgtttgccgtttcagttgacttcagttttttagaagattgtttcttttacatctatgggcatttagttgcctctgaggccagaaaaggtagaatcccttggaagtgaagttaggagctacacagtatgaattgaggatgggggtgaggggggtggagagagagagagagagagagactgtagttatttacttagtgtgcatgcatgctgtatctgtttatacacccggactccagaaaagggcaccagatcctagtacacatggtcctgagccaccttgtgattgctgggaattgagcacggtaccactgaaagagcagcagacagtgctcttagtctctgaaccatctttccagcccatgtaacacagagttttaaaaagaaaggaaaatgaacttaaagatagtgcaatacaagttttaaacaaatgcggcttctccataaaatttattatattttctccctatttaaagctaatatgcatatggtaaattatacacaacagaaagtttgccatcttaaccactttagactgtagaatttggtggcattggttaaattaccttattgtacaacgagcatcagcattcaccacagaaccttttcatccctgacacaaacgctccacgaagggcaagtattccctgccattcagatggcccagcctgtaaggcccgtatatggaggaagccaactgtggaaagtagtcctttgatctcttacaggaagtctgtgatatgcaccccttaccccgaatgaatgcaattaaaagccaccattcttttccttctttccccagcccctggcagccaccatactgctttatgcctctgactttatgtgttttgggaacccattgtaaatggaatcatatagtatttgtccctttgatccccgcttgtttcgtatagtataatgtcctcaaggttcacccgagatacagcattacaacaaaatttattttcttttaaaggcttgaataaaccgttgtatgtatgtatcaccttttggttctctgctcatctctatttgaggtatttgtttttgaacaaagctgctgtgaattggctatgtaaatatctatttgagtccctcttttgggactcatcatctgtctcatataaatgaacacagataacttggtttgatttttcatgaaaaacagctgaggagactcttaatttaacaatacaaattaaagatatgtgactagtttacctatatattctactttagcctttttgtgagataataagtttataaagagtcttgtcccaacaactgatttaagtgcagcatttggtagctggctcatttatggtagttataaaacaagataaatggctatattggcgtttactgtgtgttggccttttacatttcctacaatagttttgggctcaggttgtagtgtaaattgtacagctgtaggaaagccacacataggaaaatagtctgtattctaatgttatgtctgtcagctctagccatctaaaattcaatcatgagtttaaagtgttctttttgcatttaaatctttataacgaagcattttattcagagtgatagaataaattcccagttaatacaaccattcagtaatacatagattttttttctttttagatttatatatttatttttatggtatgagccttcatgtggttgttgagaattgtatttaggatctctgctcgctccggtcaactctgctcgttgagtccctgctcactctgagtcaaagatgtacttattattatatataagtacactgtagccatcttcatacacaccaaaagagaatgacagatttcattacagatggttgtgagccaccatgtggttgctgggatttgaactcaggacctttggaagagcagccagtgctcttgcctgctgagccatcttgccagcccaatacatagtaggtctttagttagggtagtagatgtaaccacagtcatacacttctcaattttttgttgtttttcacttgttcagagggtcttctgtggttttaagttagaattttatcttaacttttctagtcactacttttctataatgaactggtcaaaatatctttgaaaaaaataggtagccatatccttctactcgcctagtagatttaaaggtcacatttgtgttctttagattttcatcactgtgacagaatacctgacacaaacagaatggtttatgtttcagagttttaatctaagtttatattttagagatttaattccaaggtcaccgagctccattgattctgggccagggcacagtgaggcagggcatcacagtgaaagcatgtcatgaagaaaaattactttgtgaccaacaggaagctgagacaggcaggacacaaaatttacccattttaaaggcaccctccagtgactgttttgtagttcccactaatgccatcaatttacacatccaccgccagattaaaccattaaaaagggaatcctcgtggtctcagactgaatgagtgggaaagcaggcgagctgagtattttcctaagtgggtcttctcccactccctcagacagttgtggtcccaccttctatgcttcttcctctgtaataaatgcagcaaaccacgaggaaaagaagtcttttccagttgctttggtcatgtattttgccacagcgataaaaataggtttttgttttgttttttttttttaagttgaaaggtttcaggagaaatctgctgtgtttctgtcctgaggggcttgctctccggccgggtaggtcttcctcaggatgtgccccatgaggccgtcacatcctgttcacggtcagtctcactcgctaccttactgctgttgcctccttctgatagataggttttcattttctctccatgaacgcttaaaaattccatcccagtttctccttaattgtggttctaagaatagaatattgtatatattccttagttttatattttctctctaggcatgctgttgacaatagcaggttctttttattgacttgtatttactgaattttacggatcctgtacttgagtgccagtaagaatgatttcaggtgggtattgtgtgtggtacaggctgcttatccaggcagtcgggaggcaaaagcaggaggaatatcctggaactacatgttgagatcctgtctcaaaaaacaggcaataagatatttttatagctgctgttgttagcacagtttcatgtaacctaggctggcctcaagctctatatgtacctgagctcctggtcctacggcctccatcttccaagtagtggtgtcagaggtgtgtactaccatatcaggtaccgtgcttggagtcaggtcagcacttcaccaaccaagctatatcctttacctgaaattattattttaaagcttaccttccagattcctaagcacgcagctatgttcagtaaggaccttctttctacataccgaggaaagaagtacagttgcgggatttttcatcctgaaaggtggtccatcaggttaacaaagtattttcaaaagcacactgttgtgcttcgggtgaactgacactttttcttggctgtggatggattgttacacctggctgcatttgcattttgtgtatgcacttggatcctgtgggataaagagcttaatagtaacattgctgttgtacctcttagagattaataatactgcctttgtgaaagcgatgactgatgatgcatcttgcctttctacatatttgaagtgtctgcatcccagatggctttcttgctttgcaaaaagaaaaaggaaaaaaagaaaatgtttgtttgctgccattatttgtgtctgctctttgtcagtagcattcacaatgtttttgcaattttcttcaatcggtaaaccacgagaggagaacctgttattagtaagcagaatttctcccatctttagcaggtttcttttaatggaataataacaaaggggaaatgttatttaaaagagaagccttcttatgaatctgctgatatttgaatttagttaatgaaaactttggtatccttaaaatccttcatgtttactttcaattttattttaattattgttacttggcttgaactgaaaattacttcctgagttctagagacaggaagtccatgatcaaggtaaaaataggattggcgtcctctgcggcttctccccaggcacttgtgctaaccatcctattcccacctcctagtatgcccttgtgtgtgtggtgcttctcatccctagagtggttagtgtgtaaaaagtactggtaggcagaagctgtcctattcagttcttcagaaattaacaaccaggcagggtggtacacacctttaatctcagagacaggtagatttctgtgagttcaaggctagtatggtctaaatagtgagttccaggataaccagaggttctgtcttggggagggggtgtgtattaaggatcccatttttatgttgcctcttgaatctgttaaaagaggtacagggttggaatcctgatggtcattttttttctgtgtaagtaagccatcaaatgactcttaagtatgactgctgcctcccagttaaattatggctttggccctgaaattcccttgatcagatagctaactagtgatttctatttcagagagctgggggttggggggagttcaaaacccaagttattcctattttgaaaagcaagaggagggtgtgtgtgtgaaagctactctaggggctggagagatggctcagcaattaagagcatggcagcccacaactgtctgcaaatccaagatctgacatgctcacacaagcataggtgcaggcaaaccaccagtgcacataaaataaacatatatgcatgcacacatacatacatacatacatacatacatacatacgccagagtttaggtgctcagctgtcataccatttactacatctgctgacaattttaaaactacagttactgacagtgacttttcagtcattgcaaagccccaaaggtcacttatacactcctacatacaaaccagccatgggtttggaaacctgtaaacttgaggggaaaatgacttgaagaaacaggagcaaagtccagtgagaagaattttgtctactccttccttggttcaccatgaggaaggcaggaggccacagaggggactgaattttttcaggtgaatagtcatagtgtcttttggggaaggggctgtaagaaattaacaaaaacttcatctcatatatgtaattggcttttatacagttcatgagtgggttcctgagcagtagacaacaatgggttttgtaaggtaggagcacataacaggagacatgggctcgttactgtcggttagctttttcttaagggttaaagccaaggagccttatagaccccttcctctgtgtgtgtggggggagggggcaggcatagaaaattaactgttacccgaggataaatctacttaaagtttcaatttgattgtggcttttagcattagtgactccattttggtgtgaaccagtctggtcttttgaacctagtaaaggagctcagatcaaaatgttttcttagcattgtaacatggtggttatgttcatcctttgtatcctttgtgttatcttccagcatcccatgcattcctctcttgttttctagtctagtatccttgcttctgtccttcatttcctggtcaccttctgcagtagccagagtcatatttttaaaaaccaagtcatgttctactttaagcccaccagtatttttcctatctccttcctgtggctcaaatgctacctcctcagatactcactaggggaccacaaaaaggaagcaactaatgatggctttagggactctaggaagacttaacaaaaggaaaagcatttgcttctgtattttttatgatttagattttgttagatgcatttatttactgaacagtatttaaggatgccactgtgtgatagcactggtgtgtttcttgacaaatgatcagtaactggtgtctttgacagggaactgctgtttgttaaagactgcgttctgtatcattactacataatatatacaggaagtgtttttttccttaaatataaggaacatctcatttattggtgcctatttttggtaagcattctttaccataatatataactacctgtggaaaatttaactatattcagaagtgaatttactgaccaaggtataaaactatacataaagtagtatcgtatttctttacactgtgtgtgtgtgtgtgtgtgtgtgtgtgtcgggggtggtaagcattttaatgctgtacttcactggtaaataccaaaattaacattaggaacatgaagtacaatgaagtctgtacactagctacattacatcataaagatgtggttttgtttgtgagtgttaagtatccagtcttcacaaagccacagtttagtactttacttattttatcttttttcataattgtttcactgattcagaaataggaagactttgacaagtttttattttgaggcttgccatggttgcatataaagatgcattgctctgttcttggatatatcccagcaatactttctgtgtggctgagaacagccacaattagctaaggttttctctatagccaggcttcttttgaatcttggatcttccagtactcagcctcctgagtgttgtgtgccatacgtatacactgccatacctgacagatattgctgtcttacttaaagcaggtctttgacaaattcactggaatagactttaacagggtgaaaacacaaacatggatagtgtaatgtctggaagactaatgttttgcttatgtatatggtgttttgcctgtgtgtatatgtgtatatgtgtatatcacgtgtgtgcctggtacttgcagaggccagaagaggtcgtcagatttcctaagactggagttacagacaatagtgaaccagtgctctttcttgctgagccatctctccagctcttttgtacctatttttctgtttaaaaaaatcctcagccgagccatggtgcatgtttttaatcctgacactcaggaggcaaatgcaggcagatctttgggagtttgaaaccagcatggtccacagtacagccagagtttagaaaaacaaaacaaaaatcctccttctaacaacttgtgatggatggtcttcccctacaggtttttaaaatctacccagttgctaagagaccaaaatatcgatatcctcttccatattgattcattagatctgttttttaaatttttaggtaggtccataaaattaaaaaaaaaaaaaaacttgattgccgtcttttaatggcagtggcaacatagtttaatggcttacttgtgtgtcacatctgtggtcacagttgctgagagagtgctagctggtctctgagcctgtgtgaacctccttagtttatatctcccctgagattgctggaatgacaggtgttgcagctaattcaagtcatcaggctttcacggcctcctgaatttttttttttttaaagagatgtggtcttttatagccctagctggccttgaactcacagagatacatctgcttttgcctcatgagagagtgacagggttaaggcctgtgccgctgggcctggccagaactgagttttgaacactggacaataaaggtttgcattaatttgaaggctttttttcctcatttcatattaaatgagtttctgcagctataagctgtaggaagcactgaccttttgcttatttcagtcatctttgctatacttatataaaagttgtcatttagtacgtgtttgtattgtaagtaatgagtcttcaactgctgtactgacaagtatctttaaataatgctctctaaaaaataaatagttcaagctttagtcattgacttgtttccagtctcagaaaatttctaggcaacaaaagcaatttgagacagcaccaaaggatcttctacaccatggttgtttatagctcaggttctgcagaacttctgtaacggaaacttagagcaattctaactaatttctccgaagcaagtttatcgttcagtgcaatgatttctttaggtttcccatgatcttgtcatcaaggcaacacaaccccctcccttggagctgtgcttacatggatgagagaggcatgagtaaggtgggggtgggggtaactttttgagggtgtttaggaaaagcatattgagtattgcccgaaatctcttgaggcagaacctggtggactggacaagcaccttctgttcagatgatatgggagtgtgtgaactatttcagagcatctgtgttaaccactcacatgtaggcttagccttccagaccaaaggttctcagctttcttcatgattggtgaccttaaccataaaacgatgtcgatgctacttgcctactaactttgctactgttgggaatcatatcagaaatatctgatatacgaaggctgtctaatgagggattgtgtgacccacaggatgagaaccactggtctagaagctgtgtttcactgggtttgtagtcagcagtgtgcttgttttgatgctctcctttgataagtgatattaaaaaggagctgtggcgtgggataaggtaacaatcggtgtcccgttcccccccccacacacacacacattagaaaatatttgaaaggtaaatgtattgttccgtaagaaactgaccttgtttctgtttactggtctgcctcaatattatttagtagcaagtaattaggatagatggcaaccataaattttggtcatttgcttttttagtatttatatgtagagaagagggttttaaatctaataggatccttagaaatcgtcttgtagtcttaaacttttaatttagtggtgtgtgtgtgtgtgtacacatgtgtatgtgtgtacttgtatgtgtacttgtgagtgcagatgcctttggaagccagaggcatccggcctcctggagctggaattacaggtagttttgggctgtccagtctggatgctgggttgatctcaaagttgtgctctctgcaagagcagtaagctctcttaaccctgagctttccctccagccccttattcttctacttttaaaggaaaaagggagacaaatgcttaggtataagatagtagtaacctactaaagggagtgaaaggagccggtcatgttgtccgccattgaccgtttcaactccctgtttgaagaacagatactgtgttgtttgagaccttgaagtgaccataatgataaaagtaattttgtcaaatgtcaggttaccattgtatacttaaacaagtggtgattaacttagtataaatagataatgttgatgatgataataagttagatacatttagaataaaatacttctggtgtccttgtgtttttatgaatcgcacactctgtccatattctacgttgcatttgtctttcccattagacttcacccccaggagttgattgttaactgactgccaggttggctaaccctggctcatggttctgtggcatacctagcatattttaaatatctcatttaaattttatttttttacagtgaacagagtatctgtcaggcaagagctgctgtgatggtctatgatgatgccaataagaagtgggtgccagctggtggctcaactgggttcagcagagtacatatatatcaccatacaggcaacaacacattcagagttgtgggcagaaagattcaagaccatcaggtaaggggctgctgaaattcttcatgtttgtgcatgcatgaatatatgtgtgggtgcagacttgcacatgtgatacaagcatgtgcagggcagaggacagttcttgcgagtgtattttctcttggcactttgtaggaactggagagatctaaaggaggtccatcaaacctcgctgaggaggggtttgtcttccttagattgtcgtatcaggccatccatctggcccctttttataaattcagaatagacaataggaaatacagtataaggaacacattgtatgctgtttgtttgtttgtgtttgtttgtttgtttgtttgttttcaagtcagggtttctctgtgtagccctggctgtcctggagctcactttgtagactaggctggcctcgaactcagaaatccacctgcctctgcctcccgagtgctgggattaaaggcatgcaccaacatgcccggcacattgtatgcttatgggacatttttatctatctacttattgatcaaagatatagtttgtgtggctcaagaagtgatttgaaagtataaatggtttcagaaagtattgttaaattcataagtgattaataaaaatgtggtaggcattagtgttgctggaatctttaggcttttctttccagttcatatctaaggtgagcttttggtaatttcctttttcatatctacaagacagtagctgggttgtctgattacttgatgccttggtcccgtccgatccagatcaggatcctcaggcaaaggaaaaagtagatcatgccttactgttgtatactaacagtggggacttttacagattgtagacttaataagttcccttgtaaaagtgtttttttaaaagatgtaatttaactaatgtttaaaaccaccctgctacaaagtgcagggaaaatatacttagattctatttggtgccctgtgagttcttgctcggagagagttagagctgtacttttccagtaagctgtaatgtaaacagatgctgcagtaaccctgaattttaagtttgtttgtcaactggtaatagctaggaatttataatcgtcacgcatgcttgaaaggaatgggcattgaaactggttcttctgcaaaaattgggactccaagaggctgtgtctcataaaaagaggacacagagaaaaatccttctctttttactgaggagactgtttgcctgagaaatagaaaccgcagtctcccttacataacttattgactaatgctgatagcaggggcagtggggttctttagacacctgattaaaagtgcagtgctctctgatgagaaactgtcatagttgtgggttagtctacagaaattagttcacctcttctctgttgtgtgcccccctcctccctagctctcctttttctctcactttcctcactgtccagacacagcctctgatctcctgtttctctaccaaaaaatccacgtatcactgcttgtcagtagctgagctatggtgtctgcttcctttttatctgttcccctgctgagtggtccctcaggttaaaggcatgtcagatgctgcccaggatacaaataaaaaatcattgaactcttttccccttgtttttacatgcatgaatcttgcctatgcatgcctgaatcaaatgtggaagccagagaatggcatctgactccctggtactggatggttgtgagccactatgtggatcctgggaactgaatcccagttgtctagaagagcagccaatagtttttactgtctccagccccctgttgaaccttcttaacatttcaagctaagagctgtaagaaaaggctgagaaagatattaatagaattgaaattatagtaggtagatgattactttgcttttaaaatatgaaacttttaaaatctgccaatggtgacacagtatctctctctctcactgtgtgtgtgtgtgtgtgtgtgtgtgtgtgtgtgtgtgtgtgtgtgcgcgtgcgtgcgcgtgtgtgtgtgtatgtgtgtgtgagacagagagatcctatcttcaaaacaaaacaggaatcaattctctcaatcatctaacctttgagaaaaataactttgatctttaaaaataagaaatacaatctggtgtggtggtacgtgcctttaatcccaccacttgggaggcaggtagagctctgtgagttcaagaccagcctgatctgcatagccaattccaagacagccagggcttcataatagaacctgtctcaaacccaataaacaaacaaaagaaatatatgtattctcacttaatggtaactatctagggaatgactaaccacaaaagcatgctatatggccaggttgtgttatagtttcatgcagcctaactccatataggtggtagttccattaatatagccctattcatttttagcctggccacaacgaagtgaaaagtacatgaatacctatttttttgtgacttgccacagcattagccttgtctaaagtcagctataactttccctatcttctcaacaaatttgtttcttttatgtccctgctgaaatttatcacaacataaatatttcacattgtatctttattcacaagcttaagatccacacccttcagaagctagcatcatgcaaaaagacaaaagatacttggtatgaaccacattttttaaaaaattaatttattttttatactccatatttccttccccgtccccaccttccagctgctccacattccagaaccacatcttttttaacattgttctatgcctagccagtaggtaagcaagaaaaagggaataaaacagagggattaaagagtatgaaatgaagaagtcagttgttggtgattatgtttttagatagaacaaaatctgatcataaatcatgggaatcagaggatgttagaattaataataaaccttgggttagtaataggttagaactaagtaaatttaataaatattccagataggttgtctagaaatggttttcctctgagttagaaaatgaagaggttaagtagatactgtttccaatagtgtcctagttactttggtgattctgtgaggaaatatgctgactaaagcaacttgagggagcaggaacaacaatctgtctggtcacattgcatctccatctaggaagcagaaagtgagcaggaagtgaagccaggctgtagatgttcaaggcttgtgtacagtgaccactttctcgagaaatgcccagcctgctaaaactttacacctttgccaagcagtgttagcagctgggaaccaagttgttcaaatatgagcctaaggaggacattttaagaccacaaccaataacaataactactttatcagatcccacgcaaatttagtaggtgttcaagataccaatatagagaactaatgagtgttaatgtcagcccaagtaaggactatatgatactcatgaagtaaagatagctttgtgacattagtgatcaaatgggcctttttagctttagtacagttttaaatttgggaattgacaatgttttaaaagtataaatggcagctttccacaaaggaccaaaaatatctaaagcagtaatgaggaacagagtagaaggcagagtctggaggtggcacctagtgtaaaactgcaatagagaagacactactgttgggcgaatattagctatactgaccagtggggaaaaactcaacttgtaacaaaaggtaaacctgtagcttagctaaaataatttggacacacaaagaaaaaaccccaggaagcttgaactacctctcaccagattgcaaatcagtttccgttttactggggtgcaggtgttcatggttaacagtagaaagcttccagaagacaaaatgaagtagtatttttataactttcattgacaaatatctcttagaacacaaaaacattaaaagagaaaagcatttttaatttgaaataaaagaaaaggaacttcttaccatattattaacattgaataggcaagacagggacaagatatttgtcatataaatatttttccttgggcaggcgnnnnnnnnnnnnnnnnnnnnggaaaaactcaacttgtaacaaaggtaaacctgtagcttagctaaaataatttggacacacaaagaaaaaacccccaggaagcttgaactacctctcaccagattgcaaatcagtttccgttttactggggtgcaggtgttcatggttaacagtagaaagcttccagaagacaaaatgaagtagtatttttataactttcattgacaaatatctcttagaacacaaaaacattaaaagagaaaagcatttttaatttgaaataaaagaaaaggaacttcttaccatattattaacattgaataggcaagacagggacaagatatttgtcatataaatatttttccttgggcaggcgagatggctcagtggttaaaagtggacagagaaccagtgctatcatttgacctccatagatgtgccaggcctgtgtgtgttcttctaatataacttagggattactttaagtatatagaaagatcaacacaacagtggcggtgctacacaatatacacagcatacaaacttttgtatactgctgtgggattgtaaatgataggacacatttagaaagctatgtggagttttccactaaagttaaatatacttatgacatcgactagtccaacatgggttcatgttctgtaaaaacgtgcactgtgtgtaccagcaaatgtttaataggatgttcatgttattatttgtagtagccacagattctgggcaataaaaatgtcagtgaaagaatgggcaggttgagccaggcggtagtggcgcacgcctataatcccggcacttgggaggcagaggcaggccggattttctgagttcaagggacagcctggtctacaaagtgagtttcaggacagccagggctacacagagaaaccctgtctcaaaacaaaacaaaacaaacaaaagaatgggcaggttggtagtttatacaataaagcgaacaaaccatggttgatatataactggatgactcttaaatatgcatctgagtaaagagggcaggtacatttcccaacatgaattttgtgatgctgttcttatcaaatcgcaaatcttataaaactaatttgtagtattagagatagatactctgcctggatgggagaagtccaaaggggactttacagttaatattccatttttcaatttataatttatcaataaataagttaaagtatatttaatgaagtacattgctttttttgtttttgatttattattttgaagcaggccttttgtgaacatacgatggcttaagttccctcagactcacttctgtagacttgcttttattctaggcaactgttccaactagttttcataaannnnnnnnnnnnnnnnnnnnttatcagatcccacgcaaatttagtaggtgttcaagataccaatatagagaactaatgagtgttaatgtcagcccaagtaaggactatatgatactcatgaagtaaagatagctttgtgacattagtgatcaaatgggcctttttagctttagtacagttttaaatttgggaattgacaatgttttaaaagtataaatggcagctttccacaaaggaccaaaaatatctaaagcagtaatgaggaacagagtagaaggcagagtctggaggtggcacctagtgtaaaactgcaatagagaagacactactgttgggcgaatattagctatactgaccagtggggaaaaactcaacttgtaacaaaaggtaaacctgtagcttagctaaaataatttggacacacaaagaaaaaaccccaggaagcttgaactacctctcaccagattgcaaatcagtttccgttttactggggtgcaggtgttcatggttaacagtagaaagcttccagaagacaaaatgaagtagtatttttataactttcattgacaaatatctcttagaacacaaaaacattaaaagagaaaagcatttttaatttgaaataaaagaaaaggaacttcttaccatattattaacattgaataggcaagacagggacaagatatttgtcatataaatatttttccttgggcaggcgagatggctcagtggttaaaagcactgactgctcttccggaggtcctgagttcaaatccagcaaccatatggtggctcacaaccatctgtaataggttctgatgccctctttctggtgtgtctgaagacagctatagtgtacttacatataataaataaatctttaaaaaacaatgaaaattttttcctttggagtcatataaagtaaaggtggatcagttaggagagaagtgggccagaaatttattaatgaatgtaatcaggaattcacaaaagattatcttgaaacaacaaaaaaggagacctgtgagatagcgtagagggtaaaggcatccactgtgcagcctggctacctgggttttatccccagagcctacataaagatggacagagaaccagtgctatcatttgacctccatagatgtgccaggcctgtgtgtgttcttctaatataacttagggattactttaagtatatagaaagatcaacacaacagtggcggtgctacacaatatacacagcatacaaacttttgtatactgctgtgggattgtaaatgataggacacatttagaaagctatgtggagttttccactaaagttaaatatacttatgacatcgactagtccaacatgggttcatgttctgtaaaaacgtgcactgtgtgtaccagcaaatgtttaataggatgttcatgttattatttgtagtagccacagattctgggcaataaaaatgtcagtgaaagaatgagccaggcggtagtggcgcacgcctataatcccggcacttgggaggcagaggcaggcggatttctgagttcaaggacagcctggtctacaaagtgagtttcaggacagccagggctacacagagaaaccctgtctcaaaacaaaacaaaacaaacaaaagaatggnnnnnnnnnnnnnnnnnnnnatggacagagaaccagtgctatcatttgacctccatagaatgtgccaggcctgtgtgtgttcttctaatataacttagggattactttaagtatatagaaagatcaacacaacagtggcggtgctacacaatatacacagcatacaaacttttgtatactgctgtgggattgtaaatgataggacacatttagaaagctatgtggagttttccactaaagttaaatatacttatgacatcgactagtccaacatgggttcatgttctgtaaaaacgtgcactgtgtgtaccagcaaatgtttaataggatgttcatgttattatttgtagtagccacagattctgggcaataaaaatgtcagtgaaagaatgagccaggcggtagtggcgcacgcctataatcccggcacttgggaggcagaggcaggcggatttctgagttcaaggacagcctggtctacaaagtgagtttcaggacagccagggctacacagagaaaccctgtctcaaaacaaaacaaaacaaacaaaagaatgggcaggttggtagtttatacaataaagcgaacaaaccatggttgatatataactggatgactcttaaatatgcatctgagtaaagagggcaggtacatttcccaacatgaattttgtgatgctgttcttatcaaatcgcaaatcttataaaactaatttgtagtattagagatagatactctgcctggatgggagaagtccaaaggggactttacagttaatattccatttttcaatttataatttatcaataaataagttaaagtatatttaatgaagtacattgctttttttgtttttgatttattattttgaagcaggccttttgtgaacatacgatggcttaagttccctcagactcacttctgtagacttgcttttattctaggcaactgttccaactagttttcataaactctgctaggaatatgtttaaataaatacctacagtctagatttgtactgacttctattttcccagtttttagctggctttataatgaattaattgttttttaggttgtgataaactgtgccattcctaaagggctgaagtacaatcaagctacacagactttccaccaatggagggatgctagacaggtgtatggtctcaactttggcagcaaagaggatgccaatgtcttcgcaagtgccatgatgcatgccttagaagtgttaaattcacaggaagcaggtaaagtgtctgtgctttcccagtactctgcagtggaaatgctatgtatatgttaaagcaaaactttctcctcagcttttaagtcatatatatatattttaaatagttcctgttactttctagaaaaatgtgaactctttcttacttgtttgtgttaaaactatagtctatctgggcatggtggcgcatacctttaatcccagaatttttgaatcagaggcaggtgggtctgtgagtttgaggccagccagggctatctagagaaaccctgtctcaaaaagggaaaaaataaaaaataaaagaggagaggaagaaaagaagaagaagcagcagcatagtctagaagcataatgctatgagtttaattagtctagttttttttaaagcctcatttgaattatctagattagtttgtcctgctgtaaaaactaccaggtctctgtgttgctcaggctagcctcaaattcttcatttcaggcaatcctcctgccttctgctttccaaagtagctgaaacttcaatcattttcttatgccttttattattcgccttttatcaagaagtacataggtttctaaaatgtacttttcaagccaccactgagcctagggacttatattgagagtatgatctcctgatgcttggctctaatgcaatgattccataactgcaattttgctattgttataaattgtactataaatatctgtgttttctgatggtctttgttgaatccctcaacccccaaagtagttgcgacccacaggttgataagatttgaggcacaccctcatcgtccaagccataattggattcttaaaactatatgttgctaagaaggaagaatagaaataattcactttgaaaagctcaagtattcaaaaccttattatcagagatatactaaattttgttttggtttaagaaacagaaaaagaaatacacaaatgtatggttctcattagcaataaattttatgatcagaaaatgttatatatgaaaaaaatacaaatgtagttactccttcctgtgttgtatgtttggtagtgattttattgatataaatgttccgtgtaaaacacatatagcttaatgaggagtattacagccagataaaatattgatatttttttgatgatatagaattctaaaaatccataataaatggtatatttatagatcttactctgaagcatgaaaggttcaaggtatcttaactcctttgcctgttttaaaaatgaattttagaggaataggcattttgagatcttgcagaaggttctgtgtgccattgtacctctatctgttttatatgaagttttctttagggggaattaacatctgtaaggaacatatttgttttcattggatctcctttgagtaaataagctgctgggacttactttggtttgcctcttcaagatggcgaagtctggtctcctgtaaatcatttctcctaataactatactgtctttgtcagcataggactttattagcatatgttataggaatagtttacactgtaataattaggagacaagcgagaatcataattcctgtatcttaaataggccagttacgtaatttaaagcgtgtgtgtgtgtgtgtgtgtgtgtgtgtgtgtgtgtgtagcagcttctgttcctgtgtttggaacctatgaccattttcatttctcagttttcaaatggggatacagtttagaactaaatgtcacttagcatagttcaaattattgttaatggtggttttgtcttgttattaccaagttgaaactattgttcttaccagtgaataatattagtttgtttgccaaatgccaatgcccaataacttgttttattctgatcctgattgtttgaaattcagtcttcatgaagagactcaaactacattcttttacagaataataaacattaaaaaatagttttgactcataaagttttacaagtgaaaattaatggttttatttgctatagaagcatttttggtgtgtacagtatataggattattgttatgggtaagtttgacaatacattgtctcttctctttcatgttttcaattgtagtgtacaaaatggttgaagttagttatctttgtcatggaccaagtaagtcactggcagcgaagttcttggttctattttgttcattcaaaaaacaaagcattaaaatagttcatttgtacatagcatgatgtatttatttacggaattactttcctttgtaaatacctgaattttgatgacattgtctttgaagcagaaatatggggaaatttttttaagaatctagtgagtgcctggagagatggctcagtagttaagagcactgtctcttccaacgaccacatggtagtttataatactggaatctgatgccctcatctggcatgcaggcatatatactgacagagcactcctatacataaaataaataaatcttaaaaaaaaattccttaattgtcatctggtggtgtatgcctttaatcccagcacttgctaggccaaagaaggtgggtctctgtgacttcaaggccagccagagctacaggagcccctgtctcaaggaaaaggacctggagagtcctccttgggaagggatgcctttcttattcagattctcactgtaggggtggtttgtcctgtacctattgttgttgtgctgacccctcccatccacctaatcaaacacactcagtaattctgaatactatcatggtcttgtctttccttgccaaagcaatttgcttttagttcacagccatatgtgtgtgtgtctgtgtgcctgtgtgtgtaatttttaaaatcatcttctgtatgcaagcttttggaaagcttgactcttttgcaaacagtagcccaacacacttgaccagaagcaaaagaacaaatatattcatgaaggtagagctgttatgtacatccatctgcctgattcacagatttttgtctctttcaagtttttattagtatatattaactgtaccgaataatggattgagtgatgttgatattttcataatacacataatatactttgaccatactaatctccattaccctcttttttttatttaatttttatttatatgagcacactgctgcttcagacacaccagaagagggcatcggatctcattacagatggttgtgagccaccatgtggtttctgggaattgaactcaggacctcttaaagaaagagcagtcagttttcttaaccactgaaccatctctccagctctctatcaccctcttagtttttactcttgtactgccatttttcttccttctttctgcctttccttcttccttctcattcgctcgctctcccttcctttcttccttccttccttccttccttggtgctaggagttgaactgaatccagggccttgcacatgctgggcaagcactctaccaccaactacatcctcagcctggtttaccactttataaagccatgccccatactcactgttactggtcttatttttcttatgtatactgttaacttgaggatctgccattaccattatcagtaaatccttagtgattctcagacttaaaggtcatggacatcttcgttcaaacagaatctttctgcagctcagtacaaatggaccaaaagtccggaagaggtggcaaggggatgtcctctgattaatgtggggcagggatcacagccactgagggtctgcatagctctccaccgcatggtttagctctgtgctctcttctgcttgagccagtgattctacagttctttctccctttttggctgccatttttcaaagccctctttttttttttaatttttttttttttttaaagaaaaagaatgcagtgttttggactcgtcattctaacctttacaagctgtacttgcatatatgtgtgtgtttcatattttcagtttttttatgaaaaggtgggtggcaggaatgttttcctttattttgtttttaacatggtatgcaattatctaatatactggaaagtacaggaggtgctaaatacagtgtgttatatttggaatttaaaaaaaaaacaggaatcacatgttctatcattttttttaaaggcgatgaattagtgctcctgcttttataccaaatgctacagtataactttccttctcacctatggaagttgtctcagtttaaattaatgtattctatagaccaaacaacaatctttatttctatatttgcttatcaagtatatttataggcttttgtagataatagctgtggcttatgtaagctacaatgccagtcctgttgatggctggttgaggtgaatttgcacagccttgttgcatttttgtacatggtttaaattgtttgaaaataggaaatatgtctttaaattcattttaaagaaagaaaatgtcatgctagttagattattctggttttgttcaaccatgattaaacatagcttaccaaaagaaaaacctcaaaatattttttactattaactaaggactgagtttgttggtttgttttttaactattgtgaaagaacagagcgagagataacctttctatggttaaagttttcatcagatttataataaattttggttctattaattttttaacataaacttggcaaatgttacttccttgagccttagcgttattctcagcattatgtgctgtctttgttatgcttggaattggtaggattttcaaaacccccaaatatctcaaattcttggaattttttgtttttgttttctttttgtttttttgtttggttgggggctttgtttgtttgttttgaagcagagtctctgtataaccctggctgtcctggaactcccctatgaaaaaagccctggctctgaactcagagatcctcctgcccgttacttcctttgttggggttaaagtcatgctccactgtgccacaccctcgactactttgtcgccagtggcagttttaatttgtgtagtcttgtagctgctgagattaatatgaacaatactaagcttatcatctcaaagttttatccataatgtcctctggctcacctgctctttgacatgtcactgtccagcggtctgctgatgccctcattttgtcactgctgcagtttgaggccgggcttcatcgcttacctgtggtgcttctgatcctcttctaggataaacctcactggcaatttttatagaaaccctgtgagtttagtgatattgttttagaagtaagatttgggctcaaggtcagtagattggctcgccctaggacctacagccagacagtagatcttaagatcttatttcaaaattcagataaaagataaataaatggatctttggggggagggagagagagaatgagaatttctagcttttgaaaaagaacaggaactaccgaatcaaactttcattttctgttccctctcttatacctcaaagcctaaatttttgttcagtgtgacaaacgttttcaatccgaaagtgatttgggcgagtaagttctcattctgaaagagagcgattgggtggcggcactggacgacctgtctctagatcgctcttctgggtttcccttagtcctactcttgccctgttttcttggtcctcctgttgacccacaagaatgtgttgagttgtgagctggaattggggcaagaaagtgaccggtttctagaaccacttaaagctactgctatcatttgttcagttcggctttagcttttagcatttgtattgacatttgaaatcatttcctatctagctcttctcggtcattaaaaagtaatagcaggtaacccatttaatagtgtgtagactatcgtcaccaagatcgctctgcagttttgcttcttaaccatggtctcctcctttgttaaaccagaggtagaattcataatttgagcttaaaacccttacttagggattcagtaaatgtggctcaaggatgcttgaggggagctcctgttcgtacctctacaaagtgctatgtagaaaagttcctttctgtatgcataaccagaatgacaaactgaatgccgagagaataaataatcctgttgtcttttgtgaaaccaaacatcaaaggctttattttagcccatttcttttcctagttctaaagagcaactgactgcataaagaaaggcctgttagccaacagttcagcccatttacataggacagacttctgctgaaggcctcagtagatgacatcatggtactggttggctatatgtgtcattgggagatcactttgccagactagaaagcagctgatggacctctcctcttagaaaagccttcctatggatgaccctggctcccttctgagggcaacactcccagctgcttcctactaggctatccctcagtgttatggagcctgcaacacatgcagcatccagacaaaccacagcagagcttataaaaacataaaactgtgttgttgaaatcacatggacatgtttctttgttcagtttgacagttgagtcctgttagtgcttccagctgggatgttgtccagtcttgttgccttggccttatacaggcaaccatggctgcagtgagttcctgagcagtgggcatgtcagatcagatgacagcatcccagcaatcctccttgtgctcactcttacattctctccgtcctctttcatgaagtctcctgaattcgtgtttgatttttagggagcaccatgttagtctttggttgttgtcttagtcagggtttctgttcctgcacaaacatcatgaccaagaagcaagttggggaggaaagggtttattcgggttacacttccatactgctgttcatcaccaaaggaagtcaggactggaactcaagcaggtcaggaagcaggagctgatgcagaggcaatggagggatgttctttactggcttgcttcccctggcttgctcagcctgctctcttatagaaccaagactaccagctcagagatggtcccacccacaaggggcctttcccccttgatcaataaatgagaaaatgccttacagttggatctcatggagacatttcctcaactgaagctcctttctctgtgataactccagctgtgtcaagttgacacaaaactagccagtacagttgtaaaactacttctctgaagtggggttatgaaaattaagaggctggtactatttttgtggtgagtctggagtccatagactttaaaggttagtgtaatctggtgtcatgcagcccatatcacacccttgtgtgtctgcatatctggccagaagctgcactgtctccagactcgccttacacataatttcagtagcagtgctgttggcctgcagaggtcattgaccatttggatgcttttcttgcacaagcataaaactgcacatatttgttggttttttttttattagcattttactggatgccattaagtctgatatctttgagatacaaaaaaagataaacagccgggcatggtggcacacgccttttaacccagcacttgggaagcagaggaaggcagattctgagttcgaggctagcctgttctacaaagagagttccaggacagccagggctacacagagaaaccctctgtgtgtgtgtggggggggggggaataatgatagactcctctgtcttcacactgatttaaggaacgatcaggaaccatttctaccttgatggaattgcagctcagaacaccagccaaacctttcctatggattttaccttgtaattttgaaaagatttacacacacacacgcatatatatcttgtccatgtatgttgcagtaaatctccaatgcaaatatgccctggcagtcaaatcacaactcagttaatatgagtacatgctgtgcgcctagattgcactacactaccatcttgcacatctatgagaccccttagaacttgcggtttctccaggccatgtgcttctgctctgcttttctacttcctcctcctctgtgtcctctctctcaaccttcccctccactttccttttatctgcccatgcatcagctctcctttattttacaaattaaggtgggaagcaggtttacaggaaatcacccgagtgctgactcatttttttcctcgtatgcatccccacaccagagaagggaattaacatcaaatataattagccctagagctatccacaacaattcccctttctgtccaattaaaagactattttatcacagatataattaaacacagctattaccattttgtaatttataaagtataagagccctaacaccctaacatctttgttaatgccatctatccttacttaaaagactatagttctgtacctggctatgtcttggctttagattgaatgccatctgaacaccatcctctcaaatctgttcctctcacagtaaaaagcctgggttggctaggagactatgcagttattcaaccccatcagaaatccaagaatgactgatattaactgaaaatatatagagaggttaacacagcttccaaaacgtagccaatacatagagacctctgatcacctggacagtcccttacttcagcagttggagcatccgtcttcagcctactggccagggtcatctgacagacttagagaaacaggaatattaaggactagcctactgtctcggcagaatcaggatgtcctaacctgtaattgtgtccttcctttctttggacagtattatgtctgtaaatgaaatgaggcaatttttgcctagtggctgtttcaccacaactggagtaactcaaagatactcagtttcgtctttgaatccaagacagggaaaactgttaggagcagactggtctcaacaagtgaataaataacattaaacttgtggacttttgatgtttttgaaaaccaactatctatgtaaagtaatctagactgttgtctgttaactactctcagccatttgtaattaaaataactgaaagcactctaacaataaactcagagccatgaatttcctatttggccctttactctcaaggcttaaacagctcagatctgtttacaataacagcaatagaaggactgggtctaagccctgtgcttcaaaatttttagcatcaaggacaacctgtaataaccaaagcctcgggaactgggacgaagacttcataacttcaagatgaacatgggcggtgaaatatttttgaagagagggggaagggtagggaaaatggggaaattcgttggccacaccaatgattgtattagtctcggatgtttatgtcctgactgaatccggatgaaaaaccaagatatcaggagttcaggcaggtcagttcagcatgtctgatagtgaaattcaccaaggctgtatgttctgtaatctataaatctcaaaacaaaattttagtattatccagataacctttttgtttgattcactggaatctagttctcagggggtctccttctatcaaatctgatccatataagtctggaaggtgtaataccttaatcaccttttccaaaaacacaaagacaaaaccttttccccaaatgagcatatcctttagctggtaaccaggaaaacctgtagcttgccctatgtcccagaggaacaataaaacaactacaacactcaaaatcacacacattttagcctatttaggcctttctaatttgtcatgtcaggatattaacccaaaattcctgtgaagtccaagttagagcatatgagtctcctgcagactttattatatcacctttaaaacagtcaattcacacgtctatctatacgtgcttataagatgcagcttgtcaaatcaggatttaatctcaaaagtcccatggagcccacgttagacagaatatgaggatcctgtaagacttattagagcaatatatctttatactatctttaaagcaattagttcaaacttccactaatatctgcctataggaagcagatagtttttaattgttaagctctctaccaggagccacagtcatttatttaatacctattattacatctatttgttatgctctctacctagaaccacaggcttctatttaattaatacctgttataatatctatctgttatgctctctacctggagccacagacttctattaattaatacctgtccatagcaggtgattatctctgctctctgtatttggagttagtgagtagtattccctatctagttctgaactgcatgcaatatttcccatctttaagtatcaaaaagttatatttctctctttatatcaataaattacctggtccggaaccttttgtacctttgtttcctgattctttattcacaggcaggagctgaatatagaaagacatgtgttgtctctgtccctgtttggaggtagaggaggcaggttcgggagcgaaggatacagggaaggaaacacagaaaggttctttctggcatagatgcctttcgttctctgtaggcccctcaaacccagtcagcttcaaatccaccctgctgcagcctaggtcactgcccaagccccattcaggggctgggggacagtgaattttcatctcaggttagttgagttcaaatcaatatgttgggcatcattttgttgcggtaaatctccaacgcatataaatgaaaacacaactcagttaatatgattacatgctgtgcgcctagattggcagatctaccgctacactaccatcttccacatctatgagaccccttagaacctgcggtttctccaggccatgtgcttctgctccgcttttcttcttcctcctcctctgtgtcctctctcattttctcctcctcttcctctctctcaacttttcctccactttcccttcatcagctctcctttattttacaaattaaggtgggaagcaggtttacaggaaatcacctaagtgctgactctcacaggagaagggaattaacatcaaatatagttagccccagggctatccagaacacatgttcacatgcacattaattagtaccttgtctctcagctaacaccatgcattactgttttcatactctacacaagatagaaatacctaaatcagtttttaaaatatcgaatggtagtatctttgaagtttgtatttcatatacagattgttgtaatgctttattaattcccaaaatattcctaaaatttaatagtcttagaataaaagcctcagtggacagatttttttgtatttgtacatagatactgtgttacaggatattagaggaataaaggaacaatggaatgattgaaagcttggtcttatatgtcttttacttcatcagagactacaatacttggctggaaatatctgcaaggcagtgtaaatactgcacaaagtggtgattgggaaatggatttagcaaatgtagcatgctatttgtgtaaagttactaaaaatggttcttctgaggtagacttgctatttctgtgagtttaatttctaagatgattcacaagaaaaaacacaggagtggtgttttctgaacgtgttcaggtctttgtctttgtttttgcttttgcctttttttgtttgtttgtttgttttttgttttttccagacagggtttctctgtagccccgtctgtcctggaactcactttgtagaccaggctggcctcagaaatccgcctgcctctgcctcccgagtgctgggattaaagcaccacacctagcgcttttttgccttttttaagataaggtctcagatcgggtcactcttactgtgagaaaatcataaccaaagctacttagaaagggaagggcttatttgatgtttatcactattcataaccgaaggacatcaaggcaggagttcaagtgggctaggaacctggaggcaggagctgaggcagaggccatggaggggtgctgcttactggcctcctccacatggcctgctcaacctgctttcttatagagcccagaaccacctactcagggttggcccgacccaaaatgggctggacccacccccaattaaccactaattaaataaataccttatagctgtatattacagaagtattttcaaaactgaggttccctcctttcagataactctagcttgtgtctagttggcataaaactagtcaggatagggtctctgtacaaagccctggctgtcctggaattcaccatgtagaccaggatggcctggatatcatagagatccacctgcctttgcctcccgatagctgattaaaggtgtgcaccaccatgctcaactgaagtactttgttatgccagtgctgtctatataagaagaaagaaattttcactgagggatttgtttagatacattttcctaatcttttttttttttttaactcaaaccaaagttttcgctcttacaccccgagtttgaaagtatgactagataagtgatgatgaaagatcaccagtgggtctcccagtggctaggaagaaggtggggtgcacatttgccagctaaccttgaagcagctttctgttagactggtctggtacatgcttcccttgggtcctttatagccagacctataaacacaccacctacaccctgtgagatctgtggtgcgcatctttcttttccatgcttttttcaaagcattttaaatagtcaatttctgggttatagaaagaaatttagtaaatccagagttagccacaagtagcacttaattgcttgtaaagagtaaatctccaatgtgactcttttatattaaagctcagatttttcttttgaaatggaacttctagaccccttaaggtagactgaagggtgtgtttagtgcagtaatatagtatttgcataagtcaatgttgaatttccttctttggaaagcagagctgtctcattgctcttcctgggacctttgaaagtaagtctgcttaccagaagcaagcgcttccatctcagtagatatgttctcctcagtttgaacagtgcagtattatttttgagtttcacatttcttgtaaaagaagagctaagttgctccagccatgctttcttcactcctggaaacaatggtgagcaaggatgtatctttgatttttttttttttttttttacttagaatttttctctggctttttatgacaaccttacagtccattaaaagcttcagaattccttctttttttttttgattgtttatataattactaaattggattatatagaaatctgtagtttttctttcttctcttttgtttttgagacaagatcttactatgtaaccttgcttggcctggaactcacaagccagccagtacctcacagagttctgccggcccctgccttcagagtgttgcgatcagtggctgtgtcaccacagctagtcagtatgtacataaaggttattttaaggaaacgtttcctagaatttcaagtatttctggtcctgtatatttctcttactcctttattgtaaaagtacatacagatttcattaattcttgtctttattctttttcctcttattagctgtattatctagatgtaggtacatgatatagttaacatgtagtagaccttcttgtttaaaagtcgagaaaatgttgtaaaaatttttaaagttgtatcaattatctgcatatgaaagtatatagtagttgatagcagtaggaaggtaaatatggttgttaagtctcaaacctggacagaaggctgaggagcctcctattaatacatgaacgcatcagagcagacttggcttccaggttctcccagcatccctcagtccttacctgttatagggtatggctggcatcccaaccccctgccttaaacttctccatttcagggtctgggctgccctcctctatatagtccagccatttggctctcctcatgtggtccagctcagggtcatgttcactctgaactctcccagacgtcccagccaatgggacagctaacctcctccaccttacctaggagcagtcatgttcttcccttatttcttttttgcattcagtggtatagatgttatctatctttcagccactttaagtctagtgcagcagccagcttattctaagaagacagtgtaattatccagcaattgcatgacaagttagagaagccttaggccctgcctctggttgggcatttataatggattgttgataaataaaggatatttctgttgctttgtctctttttcttttttgaggtcgaatagtggaaggctaaatttaacatagaaattgtcagtgaagaggtaaaatgatggagaacctgagtatgagaagtatttaaaagtactttactaggttcactatacagctttcttaaactgaaacaattgattcatgtttatagatttttttttaaatgttatgctcatttctgcttttgcctgtgtgtatgtttgtgtgaggttgttgcatcccctggaactagagttagagacagttgggagctgccatgtgggtgctaggaatagtaggtcctcttgaagagcaaccagtgttcttggatctctagcccgtcatttatggagtttatttttaaagatttatttattattatatgtaagtacactgtagctgtcttcagacataccagaagagggcatcagatcccattacagatggttgtgagccaccatgtggttgctgggaattgaactcaggacctctggaagagcagtcagtgctcctaaccactgagccatctcgccagcccctggtttaaatttcttaatttttatggttctttttgtttggttggtttggttttcaatatatttcatctaaacaacaaactatgtgtttgaaacggcatgacattagaaataacttgaccataaaacaggacattgtttttgtttgtttagactgggtctgcctgtgtggtcttttcagtcagattgcttcagactccagagtgctagtagttcaggtcttgctcagataccctgtttctgatttctgagtgggagtcacaggtggctccccaagcccacctgacacatatatagattttggggatccatcctccagtcttcacacttgggaggcaagattactgagctatcgcctcatccctaatacaacatatttttaagagcagttaataaaagaaagaaaggtagattgttactacacctcagagatcatgatactcagtttgtcagcatttgtgtttgggtgtgggtgtgcttgcttacaggcacgatagtctgtaaagaaggaaggtgaagatcagaggaccttgtgggattggttctttccttccagtgattgaactctggttgtcaggcagccttgcatggttggctgataggcccctggtcttagtttgggtttctattgctgtgaaaagacaccatgatcacagcagctcttttttttttttttttttttttttaagatttatttattttatatatgtgcgtaaactgtcactgtcttcagatacaccagaagagcgcatcagatcccattgcagacggtcatgagccaccatgtggttgtttggaattgaactcaagatctggaattgcaatcagtgctcttaaccgctgagccatctctccagcctccacagcagctcttataaaggaaaataattggagctggctcacagttcagaggtttaattcataatcgtcatggtgggaaacacagcatgcatgcagacatggtgctggagagggagctgagagttctacatcttgatcagcaggcatcagctgactttagcttcctagatctcaaattgcccctgacaatgtaacgccctcttaacacttccagtgggctatgcagtcaagcacggggggggggggggggggaatggatgtatatatatggggggccagtccctttcaaaccaacacacacctttacctctgagccatcttgcccattcctttgttaacactttctcaggtcatttcaaatactacctgctaaagccttacatttcctcacaatggaaatcacagttttaataaaagcattaaaactattataataaattttaggttatcttgagtctcaaaaacagattatgttatttacatatttgctgccccgtgtagatagaggcttcttagtgagcaacttgtttgaaatacagtgagttattgtgcagagagaaagatgaacacaggcagtataaagttcccatgggaaaggagccgctgacctgtatgaggggaactgtcctggtttttgatgtgctgtcctgaatggatgtatatattcaggcttttgacttgttatctttggaagctatgccatacagtaaggtttattttgttgtttgtttcattatttgtgaaaagtagccaaattgcagaactgcctcagactttactcttgtattgcttatgcacacacacacacacacactgttggcatattgtatacattataaagcaagtatagaaatattttaaaagaaaaggaaagtggggctggtgagatggctcagtgggtaagagcacccgactgctcttccgaaggtccagagttcaaatcccagcaaccacatggtggcttacaaccatccttaatgagatctgactccctcttctggagtggctgaagacagctacaatgtacttacatataataaataaataaatctttaaaaaaaaaaaaaaaaaagaaaaggaaagtgaacagaagtcttactgtttcttctctgagtctgctaaatgtttcagccctgcacactcataagcgagaactcataagtcatcaagcgagaaccttgtcagtggaaatagggaggagacatgggaagggttcatgggcaggctttggaattggttaagaaatactaaggggtgtcaaagtgttctgtattctagttgtgcaactgatagataatgctggttcaaagatactctagtcagaaaattaacatgttaccactgtagaatgtcctgacaaagggcagggaggcatgaaaagtgatttgatgagcaggtcttgatctgagaacagtaggatatgacgggcttggtaaattatacacccttgaacttctagttgatttgactcttaaaattttcctcaggcagaaacagtctgtagttccttggctaaaaataaaggattaacaaagcatggtggactgaggggctggtacaatgtagtaaatgacctgcagttactctatggttagcagtcatttttcttcttttttttttttttttaaatttctattagatattttccttatttatatttcaaatgctatcccgaaagttccctatcccctcccccccccgccctgctcccctacccacccactcccacttcttggccctggtgttcccctgtactgaggcatataaagtttgcaagaccaaggggcctctcttcccagtgatggccgactaggccgccttctgcatttttcttctttttttaaatttgaagccataaattgaaggagggttacctttttggtagcaaaagagggaggagaggtcaggtacatacacacattgccctagattaaataaagaaatgacaggtctagatgatgggagtttttcatatgtagttacaaccacactgctccatttcttgagattaatgaagattttctttcattaaacatgtttgtttcaaaagaaaatttgaaataatactgtgaaagagttttttaaaaatgcaaccttacagagccaattgccttgaatgaatttattgtttgcattctctctacagtactgtgcaatttggaacacggttgttgcggctttagagtttaagtgtttttaattaaaatgtgacttgcaccatgtcccgcctctcttctctcccttcagactctctcttgccctctgctcccatgctccaactccctctcaaattcaagttgcccccccccccccttttaaaaagcttttggctgttgtagaactcactctgtagatcagtctggcctcaaactcagagatcctcctgcctctgcctcctgagtgctgagattaaagtcatgcgccaccacataaatatataaatacagcctgttgcgtctgttttatgtatgagcttatctttttaatgtggacagctatcattgcagtacctgcgtctgggtattttgagtcctctcttctctttcagatacctcagtcttagaacaaacacagccacctttgctttgaccccttggttatgaagggcttcatcacagtggtcagaagtgtgaccatcgaatgctaacactcattctgtcactcagtggccagcttcccagaaaggcaaatcaaattcagaccagtctttaagcaaacattatctcatttaacccttagaaataaaagatgcagagaggaacaatgttcatctggagatgattagtagctaataatagaaaaaaataagtactttataaagtacaaatgtctagaagtctgctgtagtaatgatatataataataaaatgcagtgatatggaccaaagctgaaaagtctgtcattttccatcactgataccctcacttaacaaagtcttcatttccttgttgttgctgttgttgttgttgttgttgttgttgttttaagtcaaatggtaaagaataataacagcagtgggcaaagcctgaagggtggcagttttgcaaattacattaagagaaaaacatctgcaacaagatcaaaggccaaagtagttatcaagaatgttgtattacttctagaaatataatgaagatgttcaattttacattcttgattcccttagccttaactaagctcctatagtatggccttctttaaaaagtagtgtttttgcagataagtgctagtattaaataatactagcattactaattaatactgaccttacctatgcaatcagtcttctcaaattgagtaaaggaagagttaatagcatcaacagtaagcaggaagctgctagccttatgcatatgatggaatgaataatttactatcttcggggaaatgcaaactgcagtagaattcaagcaaccctatcagaaagtaaatcaatgtttaacttggtaacagaaataaaagtcactggaaggaagacacttaaggatgacaaatgcaggacactgcttagcagctcagttgtgtgagagagagactgagttcttgggtggaaagggttagtcccctgcagtgataacagtgcctgcattctgacgattgtcaggtgactttctgctgaaatgattgctcatgggatggggcagcttctttgctgtctgaagcaagatactttctcagggctttcatgtaagttttttctcttaattgtccttgtatgttttcctgtttgatatggattaaaggaactaaagagtaaaacctcataactaggtgtgttcactcatgaaggttttgtggaagtagcatttgtaaataccggtaaggcatatttttatacaggagtttaaatttaaaatatgactatataatttttctgaactgtttatctccgttagcatcacctcgttcttgttgagcttgccttcggatgcttgtggttataaggctgctctacgtactgtgcatgcacttggctgagagatgggtgcgtgaaaataattagccaagttggccctatcaattttttctactggtgtttaaatacctactgtattgatactttaaagtaagagttcattggattatgttgtctattgctaaaaatgaagaaaaattttgtgacttattgtattaagataagcctttgaatataaattggtttggttctgattttactaaaacttttcatttagtaggcattatcttaaagaatatacttttaggtaaatctaaaatactgtcttgtttgctttaatatggtcttccttaaaccaacatacatttgagccattaactgttttcttagtacccataagaaaagaaaatctttccttgatgaaaagggttttctgaaaaattattattgatgtaccttttgcatgttattaatagtaagaaaaaaaatttcttatcccagttttgagtaataccttgattttggataaagcatttctcttttcagaaattaccactttctctttgagtttttcttcttaaaaaagaatttatgaatttatttcactgataaactaaactttaatataaatcatgtaggttaaatggctggttgtggccacacaatttttacttatttattattatttactatgttgtatatatagggaaaaatagtaatagagtgtgtctctgtaaaccttgttggttattgctaagtataaaacaatctcatatcagtgggtacatatatatctttttatttataacttttgggcttttctccagctggtataaatgaccagtcttaattaaatgaatcttgagtatttcccctgaactttttttgactatagttctcctaaatgggaggttagacctcatgaaattaattctgttagccatgtatcttaactctctatacttcattttcactattgtttttaaaaaaaaaatacagtcttaaaatgcaggttgcattctttgattgtatagctcaggaaatatttaagttataaaatcatcaagtttccagaatgaggatctagctaggacgcatgtataaatacattttgaacatttcaaagccccttttagttaatgcgaagttcttcagatggccctattgtccttcgaagcgtctaacaccaaggtgtctgttgcagcccagagcaaggttactgctacgcaggacagcactaatttgcgatgtattttctgtggtaagcaacattatgtttacattactttttcaagctgtggtacatactacttgcacatagccataacttttgtttctctaggccatagtctggtttgtggtatttgagatatgaagcaggcttctgcataatgtggtgacagttgttgtgttcatgaaggtcattttgggttagcttttgagttggcttatttgtgaggatttaactagaaataaaatcttaaaatattctttcacctcttccaatataaatgagagagatttatttttttaattataattttcttgtgaatagacatctggtctaatttaggaggaaaaggcatgcattcctcatgacttgagtaggtgagtgtgcattgttgggaaggagttctgtttccctcgacgtagttccagctgtgcggattgtagaggcagacggagcctgctctctcagtgcgttgctttcagaggacagcgtgctttatttagtttctgtgccttagaagtgagtttaggtttatagattattttctgtcatgctcactctaataaatatacatgtatctatatacatgtattatttgcatgaataaattaggtatatcacttagtcactccatgctagagctgatcaatcatatgtatatatatttcatatatatataaatttcttttatatatatatacacatatatatatctttgcacagggaaatttttatatagattagtatgtagatacattttgtttgaattctttttttctatttgattctgaaacatcctagtttagaaacccaaatttcaaaataaagtgtttcttattttaatttttttgattcacgtatgatatgcctttttgactcctaccttgactagactatttcgtaagagaaaattataaaatggtatgctacaaaaaattttgaattaatagttcagctagtgtatgtactttttctatgtaactcggaatttttagtgtgacttcttagtattgttgatatggtttctggcttttaagtttctatgcttggattagataagcatgttataataagggaaaaaaaagaggaaattctaatttatctcctggtcatgtaagtttcctttggatctgctctagctggtggttacagcagtgagcacctattttatggcgagttgtaaatctctgctcctcgcccccagactccagcttagtactgcagatggcttaacatcagtaatgttatctctggtctggtcttaccccgggcttctcctgggcctctaggagcaatcattgatatttgtgtgatgttatacctctcttcagctcattttggaaatgcacttgatactgtaacttcgtgcttttcgggttgagatccacgtgtagaatgatagcttacccagttttaaaggggaaaaaggaatttgaccgtattaacaaaggggagtttttaaaacataaaataacaggtttaaaacacagatttcctttataatggccttttatttatatacagtcttccatctgattgctaaatttaagtttagctgtattgtatataacagcacctacttgtcctttagtcctgtttttagtctgtggctaattgttacctagacttgtgagaattaaaatgaggagagtaagtgaaatgcgctttggccaaaactcagaattgaaggcaagactgaagtgccattcttattggagagaagttcatatcagatttctatcatttatagaatgcatatccgcaacattgctactctgtctttattaggaacagtaattcacaaactttcctttgcctagcctgggcatattaggactagccataggcctggttatcaggcagaccctcaggcagagggctagatagagcagaatcccccatttctgcaccttggttgtttctccccccacccccaccccccttttttcttcttcacaacgataactgataaaatgctatttacccattgagatggttgtgaaagtatctattttgtattttatgagaagacagatactcagtttggaatatggcccatttgaaaaaatagtatacatatcagaaaatagagcaactgatgaccttggctaaccgtagtctctgctttttgttgttttgtaacacctttgatacagctcactaattttatatccctttaaaatgtttgatgaaaaggaatatgtaattgtgtacctttagtttataatttacccagaatttttatctaataattatagtattctataattatgcataattgcatatatatttcaggatgctggatttttacaacttggcaatattggtgaagaaggaaaacaaaacaagcagattaaatgtagatgtcacagaatgccaaagagggattttaagaatgcccggataaacagatggcttgttatcatacagctatgtagtaaagaattacaggagttaattcttagattaaaatcctcatcttaaaggattccttgaagttttcctttttatgtggtaggagtgcactgtagtgaatttccacattaagtttgttttatgagtcacatcaggattcttaggggctttttggaagttttgttctgttgagagtatatttaacccacggtgaccctaacctcaaaattctcctgtgggtgcctcccagatgctggcatacactaccatgctgggcccagagctagattcaaacaaacaaaattgtttagtaagatcaataagattaaattgaaattttaatatatttgacttgaatatataaatttcagctaaaagtataggcttaattcattgataggatggttgagatacgatgccttctctagatgtgagcatgacaattagactcccgatttccagctgtttcattatactggccaaagttttcatttaaacactcagacataatttttaaactgagccataatgatcttttaagttggttttaccaaattcttttactttatagttttaaaataaaataactataagcatagatatataaattatactcctcccaattttatatgttcttaaatttgtcctcccagctcagtgtctctctacttttttctaaaaggatcttttctctataaaataggaaacattaatgtacagcccaatatggcagtgtttttcaaaacatcattgtgttaattttctaaacattctattagacaacatattttcatttatgtaaacatttatatgtgtgtttgcttttaaaacgtgtttttggtttttcttgttaattacatggggttgattttatattttctttatttggttctcaaagtatcaggcttatatctaatgaaatacattgctgcagttgtcatctaatttgtcattagagggcaaattaaatgactaatctaaaatcatgtaaagagatgaagtttagtaggtaagttcagatcattttcctgcttttccatactgggaggggccagtgctgtcttacatcctgatgaaccttcgcttccggctgtgggtctgctccacgaggggaaatagccgcttccatggtcctcacgcagcacagcagcatgttgtagtacacacggcactgagtgtcaggccctcacacagcacagcagcatgttgtagtacacacacggcactgagtctcaggccctcacacagcacagcagcatgttgtatgtagtacacacggcactgagtgtcaggccctcacgcagcacagcagcatgttgtatgtagtacacacggcactgagtctcagggccctcacgcagcatagcagcttgttgtatgtagtacacacggcactgagtgtcaggccctcacgcagcacagcagcatgttgtatgtagtacacacggcactgagtctcaggccctcacgcagcacagcagcatgttgtatgtagtacacacacggcactgactcacttactttttatagtagtgctctacacaactctgagaagtcaagtgacacttctcagacggtggaaagaaactgtctttactttcttgcttttactcttgaagatttcaaggtcgttctagcttaaccttagattgttcatctcattgtatattatactaggtgcaacaaggatctcacttaatttttatatcctgtgacaataagatttcccataatttagtgacagtctaagataataaaaatgggtctgcgttatctatggatgctgggagtggctggatggtcagtggtttctcatgacagttccgtgtttgtgtaaacacagggtctccccaaccctctgcctttcttaccccaaatgaaaagttgttaagatgacctagaacattacaaattcagctaagtaggttaatactatagagtttagcaaatgtttgtttcaccagtcctggaaatgccaggtcattaaacaggaatggcagctcaggtgggcaggtttgataactgcattagcatacttccgtctagtatgcggttctcacactctctctctcctgtttttcatttccagtgttctatttaggtgagtttttaaattctgatctttcatttaagtttttcctctccacctcatgaataattaccccaaacaaaatgtctcattgtctcggaaactgtcaggctcgctcgggcgcctattcagatgctcattgaacacttgtttcaccaagctcttcatatataaatgtttattttccctttattgttggtgtttccatttgtttgaagtaagccttctggagatgatgacagcattatgttgcagtctttcatttgctgtgtgttatgtaagcttatattttattttgctagatgaaaagaagatgcattttttttaatatgtgatggttttatgttgttctcatggtttaatttcctccacccagcttagtagaatagtaatattcatctgtaatgtttcctccctttgtagggccaacattgcctagacaaaattcacagctacctgctcaagttcaaaatggcccatcccaagaagagctggaaatccagagaaggtaaatccatgtgtttacactttctggttttgtagcagacccaaaggacctaacaacacattgggcccttaggtctttgaaattgtgacttttcattctatctgctttttttgtagaaagcatacttgtgatacatctaaaactatattaaaaagactcaggggtctgttcccttcagtaagcctttttctttttttcagtatgagtgtgtgtccaagtgcacctgtatgtcccatgcatgtagaagttagaggtcaatctacattggctgtcttcatttgctctccacgctattttttgaaacaatctttcactgaacttggagctcactgattctgtgacccagatgaccgcagagctccgagatcctcagccccaccattcagatcatgggcacgtaacattcctagattttctttaagtccttctccttgcataggaagcactttgccaactgagccatctcccagccccatgaagtcttcttttatactaaatatctgtgtccagtatcactttcatatgaccattttaactagaaagtcaaagtgttatctaagtaagtctataaggctctgatcttagggctttatggggttaggaaaatacaagataatctgttgatggctaatggtggttaaacaaaaatagcaacattatctgtcatttcagtacaatctagaggtaggcttgaaattataatagttttatccgttctctgccttttagcgaaaatcaagtgcataatacctcatttaggggtggatttttcttaattagaatacacacacacacacaaacacatgtatcacttaccctttcagtatgaactatgaaattattaagacagtttacatgcgttggagagatgactcagtggttaagagcaacggttgctcttctaacacccacatagcatctgaaagctgtctgtaacttcagttcttagggggccaggggcttcagtgctcttttatgctccttgtaggccctgtacatatgtgatacacagacgtacatgcaggcaaaacacccatccatacacataaaataaaaataaatagttcttttttagaattacagtttgccctgggcagtgatcttaaaagcctttaatctcagcactcaggaggcagaggcaggcagatctcttgagttcaaggccagcctggtctacagaataagttctgggacataaagaaaccctgtcttgaaaaaaaaatagggggctggagagatggctcagtagttaaaagcacagattgttcttccagaagacctgggtttaaatctcagtacccacatgtcagtttacaactagctataattcaagttccagtggatatgacaccctaatacagacatacatggaggcagaacaccaatgcaaataaaataaaatttaaattaggaaaaaaaaatgttagcaaagtttacatcctgcttttcttaccaaaatttagtgtttattttatactcaaaaatacttctttaagtaaccacatttctagtgcttaatggccgtatatgggaggcattagagtaaatcttcttctagtgaaaattgaatttacatctccaaggtctttttttttttttttttttttttttgtacttacccgttgttcatactggtatgtgctgtgaggaaggccaatttaaactgtcttctcagccagggacagtggcacagaactataatgtcaacacttagatgccaaagatgaggattccagattcaaggcaaaatgaaatgtattttgatatctcatttacattttgtatttaaacataagtacatatttgtacttacttagtgtgggccagggcctgtagtatctgtttattttgaaatctagtttccttttctaagcagcttcatagaagctattaaatgttctcttaaaatgagggaagaaatcaagagctgtataacattgttgtggtccaagaaaagtggaattgaacttgaaagaaagaagtttgtgcctagcttgggaacagcctgcttgcctgagtcaggaagcccgtgggctcctgattggtttctcacgaggaaacaggagtgggtggggaacctgagcatttgacacgtttaaccacatgaagagggttgtgtgcagttctgctggagagcttggagtggcgcattggtgcatacatagggttgacgtggggaaagccaaggaaagtattagtgttcaggatacaaataggaagttagtttccttggaaagtagctgatggatgggcagggaatgaaatgctgtgtcaatactgcaggggaaaggagaaagaaaaattgggaggtagccagagtaggtaaggagctagagtataacgcagggatagagctcatggaggccccaggttcaattgctgaccacccagatagtgggaattaaataatttatcaagtaggaaaagagttacatctaaatatgagaagtcgggtatagatatttgtaaagaaattgctgttcagaaccttgagataaattcaagaatgttaaaacttagttgcttctgtaggaagaaatcaggagtagtgagcattattaagatgctctataataatccccttttaaaaactaggtatggcttttatacgttgtagtcaacataaagttgttggatattttaaatattactttgttgacctaatacttttattatatcataatacaattttctgtgtgtgtgtgtgtgtgtgtgattcatcaagtcagtttctggttcctactcattattaatatttggcttccttggctgtgatgggaaaatatattctaagaaacatgagtcagtcctacattcatctcaacacagaagatagtttagttaacatctaaaaatagctttcaaatcatcactactacctgcaagttataaaggggaataagaacccctttatagcacagaactaaggacctggagtaatgaaagtgtacagcactcccattatcctccagaggcaggatggaccaagagtcgatcgcattctgctgtaagtattggctcttgtcttaggagttttgtgatattcaatttcaactatcttctttttttttttttttagtagagcggtgaaatgcccacacaggacaatgaaaagtgtgtatctacaccagctgtagtagtacacacctttaatcccagcacttgggagacagaaactgttgagtctgtgtgagttcaaagccagctggggcttcatagtgagaccctgtctcagaaaagttaactaaaaaaaatacaaatttttacattttgacatatcagcattatttagtgttagcaaccagaatgctttttttttttctgatttgttctcccacttcattttatgaaattgaaatttatatttacccaaaaactgtcctaggtaaaggtgaataaaatatatcttgacattttatttatattttgcatgtctcacaagactatgtcttcataaaaacataaactaaacatgtatttgtatgtatattgattttgttgtgggccagtattttgttgttgtgatggtagtgggttttgggtttttgttttttgttttcatttgtttacttttagggactgatgttttgggggaaaatacctcaatgatagatagatatatatatcttttatgtttttacttaatatatttaaaatactttagtggccataatagtattcacttatgtttgtttctggaaaaggtatgttaattgttttctctgaagaacattcaaatgattgaaaatgttacatctaacttaaaaaaaacaagcatcttggaattttctcacagctcggaattcagacacgtgtgttaataaaatctggagatggttttactacttggcagccagcagacagatgtaaccaacctctagaagaagggtttcttgcattttctgtatgcaagctggtagtgatgactctaaggaaagcatcgtttataattttggagactccttaaaaagatttggaaatgtctcacattatagcttaaaatgttatggtcagatttgtaagcctttcaatttaagtaggaattattcatgccaccacaaatttgtaagtcagaaaatttcttgatggtgttttcattcccatatacatagacatcttttcaatgacctggctaaaagtattcactgctttattcaaacatcagtctcttaagtgtatcaactgcatacttgagttatctatcggcaaacttggaaatattctttggcgccctgctcttttccttagtacacattctatcttttattggctggaagcctttaagattatattggcatgtgcaaaactcttcttaagtcagtacattctagttataagggtcattatttcaggactgcttccagactcagccatacctatctcacctatggtgactaccaaaagttacttatgcttgtgttaaagcattatgatgctttgagaaacacgtgtaaaagttactggttttttgtttttgtttttgtttgtcttttaatgcccagcaattagaaaggaatgcagtgcagtcagagtaccatgtagctcagctgtggacagtgattatctaatgttagtgtcgccctgacattgatttttttcctatagctctgtgtgtgtgtgtgtgtgtgtgtgtgtgtgtgtgtgtgtgtgtgtgtgtgtgtgtggtatctcagggtatagtataacctaactgtagtttcattctccctccctccctccctccctctctccctccctccctccctagttctccttcctacctcccatctccccaagagccattccctaattctcatcagaaaagagctggcctcccaaggacatcaggcaaaccacataactagctgcaataagaccaggcacataccatcacacaagcatccagtgctcaccactgagccatatccctagcacttaaaggcctaaaattttaatacaaacctcagttgagtttcctcattaaatgtgtgttattgagggtgagtgctgttttttttttttttttcgtgatttaaaatttcttaatgtttctaatgtctttgcagcataaccacattgatagctatccctcaaaactggtatagctgataaattatcaaatattatagtaaatgtaccctgaaagtgtgatttcattagtagtctgtttcttaatgactcaaaagaagtactgcagttggtccctgcctaactcgccattgatatgtgaacgggacattgtgtagagaaaggctgttttgagtgaggtatgtaaagaattgatttgaaggatgggctttttccttttgtttttatagctgccttagacgggtgaaagttctttttccagtattttactgttgttttctgtttgtgggttttgttgtgggtttgtgggtttcatgtaactcttcgtcttaccagagcccagctggatggttggtccagaaaaggttccagttctaagcttttctgaacgatcatcaatacaacagtctactttatggagtactatacattttaaagagcttttattgtgttatcttctttaatattagctaaatgctgttgaacatgtataaagaaagataactgctttttagataatttcctcaaataccagagaaccatatattaagaatctttagaattgcctgcctgtccacctagaagtagttggaggaggtttcagggttagtaagataaatgtttattgtaatatgaataataataatagggtaaattatatcctacactggagactgcttaaactcaagagctaagcagtggtgctgacgtgttcgtgggagttaaagatgccaaactaaagttttagggtaatttttccagtatgtattgtatcagaaaaggcagatttcagagtcatggtgacatggtactgatttgcttgaattttaaagttgtatgtgtatgttattataaggcaaaagcctacacatatgtaccaaataactatagttacttatggatataaaatgtatagtttatttcttacttaactcggtttattttcaattcagtaaatgtttatttagctgtggctatgatcattgtgttttctgaaataacttgtgcagctaaaatgtttcatttttaagaaaaggagattactcagggtgtggtggcgcacgcctttaatcccagcacttgggaggcagaggcaggcagatttctgagtttgaggccagcctggtctacagagtgagttccagaacagccagggctacacagagaaaccctgtctggaaaaaaagaaaaagaaagaaagaagggctggagagatggctcagtggttaagagcactgactggctcttccgaaggtcctgagttcaaatcccagcaaccacatggtggctcacaaccatctgtaatgagatctgatgccctcttctggggtgtctgaagacagctacagtgtacttacatataataaataaataaataaataaataaataaataaataaataaatctttttaaaaaaaaaaagaaagaaagaaagaaaaggagattatacttcactttataattatttcatcatctgattaatataatgacttggccatcaaagtggtaggtttatttgcaactctattctcataaattgtgttgattgaacccatgttaagagcttactagtcccattggaataaaatacaatttttttatatcctgactatacagattttatatatctgtaaggaagctttcctaagtggggaagtagtgacagcgtgttctgcgtctgtctgaatcagacgtgaggtgaacatccactcactgtagtgatgtatagccataagtgcatatttttattcgtccaatgtttaatttcaggcaactgcaagaacagcagcgacagaaggaactggagagggaaagaatggagagggaaaggttggagagagaacgactagaacgagagaggctagagagggagcgcctggaacaagagcagctggagcggcagcggcaggaaagggagcacgtggagcggctggagagggagaggctggagcgcctggagcgagagaggcaggagcgggagcgagagcgcctggagcagctggagcgggagcaagtggagtgggagcgagagcgcagaatgtccaatgctggtaaggagtctgcagacgcgcatgcgcgacacgcgcacctcctacagccgagatgggccaaggctcctgcagctgtcagtggcgatacttcccatgtgcggtgcttgggaataagcagtacagtttgtagttaggataaatgctcaacaaatattgcttcagtgttccttttattgcttagaaactaaaaggaagcccttgggaatttttagtctgtcgttttaatttttcttaacgccctaaaattcagctataaagtgtgaatgtttttatgcaaaaaaaaatttataatgatcttggaagatatttcccttgtgccattgcttaaaattatcacatactgtatgtattatgctacgtacaacaagaagttagcttggttatagttagatttctgaaggaaaaattaaaatagattaaaaatattctcaaaaataaccggttatttaaacattttctggtatgatgaagaaaatcacagtctgatggaatttatagtgtcatagaggattatgatatagtataaacatttaagatggttaatatttatcaaagaattttaatcttgagctatatgagaggccaatgccggttcagtattggttaatttattgttcttaactgcataattgtctggagttatggctaagaaggtagagatgtccaaaaataagacactgagttgggcattcctttcccatcgtagtaaacatttcgccaggtttgaaaccacaactcggtttattctgctgtttataataattttgatgcagtttttagtggactaagtaataaacattaagactgttactatccttgtagaggataaattattaatccacatatttaaaagaacttatttcatcctcttttgggtttcgaaatgtgcttacaagttaagttttctccagtggagacagttatttgcctaatcccctggtgctaactgtcatccacgtttgtgcgttttgtctgatgctggtctcgggcttcactggctccctttttctctctccttttttatcctgtctttgccgctgctttccaccttatgtccagctccatcttcagacagctccctgtctagtgctccacttcctgagtattccagttgccagccgccttcggcacctcctccatcatatgctaaagtcatctcagctccggtgtcagacgccactcctgattacgctgtagtgactgctttgccacctacttccacaccccctacaccaccactgagacacgcagcgacacgttttgcaacatctctaggttcagccttccaccctgttcttccccattacgctacagttcctcgtcctctcaacaaaaactctcgaccttcttctcctgtgaacacaccctcttctcagcctccagctgcgaagtcctgtgcctggcctacttccaatttctcgcccctccctccatctcctccaataatgattagcagcccccctggcaaagctactggcccacggcctgtccttcccgtttgtgtctcctctcctgtgccccaaatgcctccgtcaccaacagcacccaatgggtcgctagactctgtaacatacccagtgtctccaccgcctacctcagggccagcagcgccacctccgccgccaccgccaccgccgccgccaccaccaccgccgctgccaccgccgccgctgcctcccctcgcctcactctcacactgtggatcacaggcttctcctcctccaggcacccctcttgcctcaactccctcatccaagcccagtgttctcccttctccctctgcagctgcccctgcctctgcggagacccctctaaatcctgagctgggagactcctctgcttccgagccaggcttgcaggcagcctctcagccggccgagtcgccaaccccacagggtaaggcttcacttctgctgctgactactggtcattctgaggagtgcagagcaactttgcctgcctagaagagtggctgggtcctatggatttcatgattgagcgtctctatgccaaagtgctatttggggttgtattattattattatcattatcattatcattatcattattattattattattattattattattattatttagaacattaaaatgaaggattttgtttttttaaatcctgggccttagttggaatttagtatgggagatgtccatattaaacttaggttttagatcgtttgcagtaagtactgtattataggtgttttctaatatttagggatcctagtacttctacattcatcttaaacttcactaggagcacttgactgtttcatcttccctggggtaaatatgagatattttcctagagacatggagatctgtttaatagataaatcatccctgagttttccctggagcactcctgccctaagatccctttttcatttccacttctcctgtattgagctctctgtattagacctttagggtaggtagcctcaggccctttgcagaagcagagggttggcaggcttggtgtatcccccagagggttctattgcaagtgttgctatacaggcaaacagaaggtccttgaaggtttcctgtagacacggaccgtgatgcagggcagcagggaagggccatgtaacattaagtgcagcctgtggacataaagatggacgcggttctgtacataagaaggtgcatggaaccctgcctttgttcctctttataagtataggatgtagagaggaagtgtgcttatacaaacaatgtaataatctggatttagacatacctcttttgttaaaagtagatttttttgatgctgtcttactagatttttgtaaaaggtgaaaagaaatttatcatgtgtaatttagtatctctctgattgacatctgagcaagaggccctgccaggctaaagcctactggtgctcggagctcagtccgaaggatggaagagctcaccgtcagccctctgttgctctgtgtgtattccctggtgaaacctccgaagtgacagctactccccaagtgtgcaactcactagctttacagaaagaaaattagccctgttaaggcttaagtaaatacttactaatttggtgttttcaattttaagtaaattctttactctgtggtttttttgtttgtatgtttgtttgtttttaacaatatttaaaagtacttcctatatttctacctcaaagcctaaaatcactttatatttaaattctttttggttttttcgagacagggtttctctgtataaccctggctgtcctggaactcactttgtagaccaggctggcctcgaactcagaaatcgcctgcctctgcctcctgagtgctgggatcaaaggcatgctccaccacgccgggcatatttaacttcttaattctcagttagtttgaggttttacctcatattagtttattatatttcttcagtaatgcctatctcagactacatgtagaatcattttaagatactaaaacctaagacccatttctccaaggtcttcatcttgtctgtctgtagtcagatatgtttgtcatcataggtcaaaggcttaggattatcttgggtctgttatctcaggcagtactaactgcatgtctctctctctctctgtgtgtgtgtgtgcatgcgtgtgtgtgcgcataattttctaaatttgtataaacatttgtcttcaaatccctggggggggcggagctcattagttttattagaaaaagttgaatattaaatggttgtatgtgcaccttggctttcaattctaatatccttagttaaaaacaagtattatgtattaagtattatgatagatcattttgttcagtgcagtgtctgagtcacttacttgagcatggcattctgtatatctgcccgtgtaacccacagtgatttagctgtgttgttaatgactgtgttaactttccttcctctcaggccttgtcttgggaccacctgcacctccgccaccaccccctctcccatcaggccctgcctacgcctcagcacttcctcctcccccaggaccccctccaccacctccactgccatccactggtcctcctcctccaccccctccaccaccccctcttcctaatcaagctcctccccctcctcccccacctcctgcccctcccctccccgcatctggaattttctctggatccacgtcagaagacaatcgccctttaactggacttgcagctgcaattgcgggagcaaaacttaggaaagtgtcccgggtaaattaccaaattactgaccttctaaatgtgtgtcttaatgtgtctaaatgcctaaaatagtgacattactggcatgaacactgcctttaacttgactgattaaaagccaacataattcaacattttagaaaagtgtatcgtgaggagtttctgagaccatcggctcaggcttagcagtcagcatctgactgacagctgccttttgcttgctttgcctgtacatccttactacacctcagtgtaaatttggagggagtagcgagtgacttttaggccatggtttttctagttcaagatcatttgttaaattagctgtaatgtttgtttgttttttttaaatcaatgacagttgctcagtttctatcacctttaaaaacaatgacagttggtttgttttgttttgttttttaattatctttcagtttggtttatcacatttccccctcaatattggatttaaatgatatgtttgggatgaggacaaaccataacaaggattttatctttcccagtgtatcatgtagatagataatattgtttcatcccattattggtgatcgtaactttgataaaaattttcactgataaatgaagtccatgttattcactctcttggctcttcaaatttaaaaaaatatactgttttggaatcaataacatgttcttctgtgttgaatatattggcaaaagttattatctacaaaggaaattattatgtatatgtgtgctctcattaaggtggaggatggctctttcccaggtggagggaatactgggagtgtgagcttggcctcatccaaagcagacgctgggcgtgggaatggacctcttcctctagggggtagtggcttaatggaagaaatgagtgccctgctggccaggaggtaaggaacttaatgtgatgcacatgtccacagtcagaaagatttagaacaaaagtagatagatgatagccagaggtaggtaggtaggtcatataaaatctttaatgaatttaccttttcaggagaagaattgctgagaagggatcaacaatagaaacagaacaaaaggaagacagaaatgtgagtggatgtaaactaactctctctctctctctctctctctctctctctctctctctctctcagttcattcagagacgcatgtgaagattaagcatctgaatgaacttaatgtttgatcttatgtttgctcattttattcctaactacacaaccagtaaaaaatggcttgagtgttatgtattaaattgtaatctcatttttttttaaggtttatttatttattatatgtaagtacattgtagctgtcttcagggcgtcagatcttgttacagatggttgtgagccaccatgtggttgctgggatttgaactttagaccttcggaagaacagtcgggtgctcttacccactgagccatctcaccagcccgtaatctcattcttagtgaattgagttgaatctggggaggtgtggggaaagttgaagttcaaacctataaagttaacttgttcttatattcaccttgaagggagtgaatgaattcttacactggtgaaattttctaatgtgttgggtttctcaatttctttgtgctatgtgagattaaagaattttattaagtcaacagtttataggttaccttatacttttagctataccccttaggagtacccccttcatgccttctccacatttcagctgggtaaacttctatctgttctccatgttgtcattgaacacagggtgcccatgttgtcattgaacacagggtgtcgtggttctctgtgatgtctggcctcctctcatagcagatctgtccatgaggttcctaggggtgactagtacaggtgcttggaacttagcgagaaagaaagtgctttgggaaggcagcagggaggagcctaaggggaagatgagagaaacaagcaggagaagccagagtgtcagacagatggtggaaaggggagtgacagagaggacatggggaaggaagttgggaaagctagctgcagagagccgcactttctagtgactgtgatgttcatgtgactctttctgaatgtttaggaagatgcagagcctataactgctaaggccccatcaacaagtacacctggtaagttcaggagaaaacgatccctaagtgctaatcccctctcattaagaaagtcccttttcctgtgtttggatcaagtgactgcttgctcacaaaaatgttaaaatgctgtgtgtatatttgaagacactgacctttcgtctgccttttgttttttttgagacaaagtttctctgtgtagccctggctgtcctagaactcattctgtagaccaggctggcctcaaactcagaagtctgccctcctctacctcccaagagctgggatttaaggcgtgcggcgccaccactgctcggcttcgtctgccttttgtgatctcattaattagggcttttcttcctgaccctgaaatctgttaaaacctaacgtttttgttagtgctgtctaggcaaataccattgtgtgtgtgtgtgtgtgtgtgtgtgtgtgtgtgttctttgtgttgtgtacttgagagtattcattacagggaattatttttaaaagttttttcttttttaatttttttcaaagatttatttattttatgtatatgcgtacactgtagctgtcttcagacacaccagaagagggcgtcagatttcattacagatggttgtgagccaccatgtggttgttgggaattgaactcagaacctccgcagtcactgttgttagctgctgagccgtctctccagcccctaaatagtcttaaaaggagagaatgaagtgagcatgctaggacgtgtatttcagaacagccccagttgaagctagagccctccttctgggcagccattgactgctgtagctctttgtctagcagttgggaggcgtggaattttctgtctgttggcgtattagctggtgttatcactatgctggccttggtcagcgactgtgttatcgtgatttcatgggtacagcttctccgtcgtgtctaagggatgttatcttgtaaagtaacatttatttgccagatgtagttgttgtctcagaggctcactgcagagtaagtccacccttcctagttctttctcaattctggctggttggttcacctcagctgttctggctcaaaacttctgaccaagctgactgattcagattggcctcaaactgactctggagtttgttctaatcttctgactcctcattctctggctcattctgtcttcacctacaacctgtctctacaaaactgtcccgatagaactgagccccttcctccttcctcctcccttccttccttccctccttccctccttccttccttccttcctccctccctccctccctccttccttccttccttccttccttccttccttccttcctacctacctacttatgtgcactgctcccctaagtctcctttctttcctctgctgttcttgtgagatttgggcatatcctatctctgactcttttgtcaaatctttctctgatctgtcactttgtctgccttgcaattagatggcactttcaaacatagctgcttccttctgcaagctaactttacttccattgtttgggattaaaggtgggtactaagggcacgtctgtgttccagccagagggattgaaggtgtgtcgttccagccagactctatacatttagctgtgaacccagaacagccatgctcctggattaaaattcttgtacactgtctagcattcggcctggtcctttggctctaagaagctccccactctctgtgtgatgttcctgaactttagatgtaagagttacatttcagagatactaattggggttggcaaacagtcaatcattattctgcacagctgtggatcttaacaacagtctccatctgttgcaaaaaaaaaaaaaaaaaaggtgaaagccatatttatctgtggatgtaaagacaagtatttaatatagttagaaattatgttagcttaggaaaatgacagtagtaggttttcctttcaggtcattttcccactcgtaaattttcttttgaagttagctgtcaatagatttattcttgtcattaacatcctgacttcatgaggtggtaactaggattcacctgtcgaatctgggctgtctctggagaaaacggtgttgcattatgcattgtaaagtacttggcttggctgtggtccccagagaagagacaccctaccctctgcttccacggggctgagtaactcttcttcacaacaaggggcttaagattaacagagcgcgattactaacaggggcttccctaatcgagaaaggcccccaatcgtctacgctgttacctagtcacacccttccactgcatcatctttgataactgtctccgtggcccccacctggctgctattctccccacctctgttacgtagggtagtgtggtggatgcattttttattccatccttcttgtccctgctctgttttttgttttgttttgttttgtttttttgatgttctcttgctctctctggaacttgcctttcctgtgttcactgacagaatgccttagcatgcccacgcaaaagggaaaccgaaatcatgataaagtacaggaagacccacggcagcccgaggttcttcccttagacacctggccacagcaattcagggcccaaagcgggacctgctcacatttagttttgcatatatttgaaagagactaaagcctccccctgagtgaagctgtgcagaagccacatgaggggagacattagaagataaaacaaagttcttatttaaaactatacagtgacatgtgacccatatgtagacttggcttaaacgtgactcaaatgctattcctctgtgacagagattcagtcttttgattttctcaagttctgtagtcaggtcagtggtagcgcacatcagtgagtcagcccagttagagagtcaccgcccagagcacccagatggcccgtcacggaggggccggtctcttaggtcctgagaatgactggttttcacgtttatttggagctgtttttgccaagagagctgtttagacttatgtgagatgttgaacagaagaaacacatcatatattgtagtttttatttactgttggcacaaaaaagtttagtacatttgaatttatcagattctagtataaattatacttatttctttatcatgcttgttaccattatcatttggattatagaactgtaatatttagattttttttgggggggggggtttccaagacagggtttctctgtttgccctggctgtcctggaactcactctgtagaccaggctggccttgaactcagaaatctgcctgactctgcctcccaagtgctgggattaaaggcgtgtgccaccatgcctggcttagattttctaatacaggggtttttttcttgctattttctctccctctcccctcccccttcccccctttcccctcccctcttccctctcctcttttgttgttatttggcagttttttgtgtagccttggctatcctagagctcactttgtagaccaggctggccttgaactcagatccacctgcctctgcctcctgagtgctagctaaaggtgtgcactatcacctagctttgttttgattttttttcttttagacaaagtcttactatgtagtcttggctgcctgaaacctattatgaagaccaggctagcctcagactcatagagctctgcctcccccatttctgctttaagttctacaataatacaatttagaatccttactgtttagaggtttttgggttttttattggtattacctctgtgtacatagagtgatggtactacaatggcttgttctgtaatgattctggaaggttctaagacgtgtttaatcacccctgtttcttatttttgaagaaccaaccagaaaaccttgggaaagaacaaacacaatgaacggcagtaagtcacctgtcatctccaggtactgactttcttttctacgctttatgtgacatgcgtgttttctaaagagaagctagcgcaagttgtacagaggagagcaggcgctccagatccacggcactgagctcctggcgcgtttgctgctcccgcttgtctgataaattctacagataatttgtctctcacatggactgatattttaggagagtttcatcccttttaatttgtttatttttgaaattcaaattaaaaggaaaaccggtgcggcaagttatacgtatcactgaacttaacaagtagtcctatgtctgtggctttgcatctatgttactttcctcttacgagtttgaaagaaacttgcaagtaaatggtgttccaccctaaatacttggacaagttcccaaagaaccaagggtatctgcaacataaccagagtagaattcctgccccacagtaacttagtattgaacaataacgaaaatctgatacagtattgagcaataatgccccattagtcccgacatagttttaagaattttagaagaaaattttatgctttatattgaaaatcagctagatgttctagagaatgcaagagagcaaacataaatttactgtatcttagtcaaatcttctaagtgtggactggagaaatggcctagtggtcgttttggcatatacaggttctattcctagcacccgtatggctgctaacaaccatctgtaactccagttcctgggggatcaaatgctgttttctggtctacgaagacactgtgtacccatggaggcaaaacacccatttgcatattatttaaaaaataaataatctagatttggcagtgcacagtttttactcctagcattcatgaggcagaggcgagtagatggccaacctagactacagtagcgagaccctgtttcaaaaaattaaatcaatcagtcgagatcgtgtctcaaaaaaatacagagcattcatcacaacttctggcctccacatccacgtgcacacatccacacacaccacagaccaggaaaggcaggttggaggtgaggctcagttgggagcacccttacctaacatgcagaaagccctgagttaatgtccagctctgcatggactgggcgtggtgtcgggtgcctgcagtcccagcactgaggtgcaggggttggggttgagacgggagaaggtcaagctcatcctaactacagcctggcttgcgggaaaggaggaaaggatgacgcctgagttctctgtagcaagaacattgtggtaaaagggctttaagatgagtgatcgatcaccttggaatgttctgtggttttcagtaaaaatctactggttttattcatgatgggagaaaatgttctttacatgcctgtgaatagtcagtctgttgctttgaaattcatcaaattgcagtgtctttgcttgtgctttgatccctggtaagtagatcgctgcagcctacagaagtggccattgtgtcttcatgtaaaccagtttgagaatacccttttaaatttggtaaaatagatatcttaaggataattaacaccttttgtttttgttttgcttgctatgtaactataaattggtagcatcgtgggaattattttttcaaggtctgctgtataccctttaaatggtttttccccttcatagacgggattctccaaggagaaatcagattgtttttgacaacagggcctatgattcattacacaggtatcatcctgctgctgtgactttgtggtttcagacctttcagtaacatgtccaggggagggctgagctttttctacctggattggtaatcaccacaagggagacacttaggaggactgaggtttcttctgttttagctgtagtttgacacttaaagtagaacgctgctatcgttcaatagttggattcatatttgctggaatgaagaggaaaatcatcctacattgtctagttggggctttagagtttgcctttaaggctgttctcatcataattatgtgacaaggcttttttaaaatggaattgaaagtcctgtgctggttttgctagaacacaggatagaatttgtagccataggcaaagctgcttgtttccttaatgtagtgaaatgagtgtctttaacagtttggtatctgacatcctgagcacattgtttctagatcaactcagacctcgggatgttaaacatacaggtatgggagtggagcttagtggtcagtcaggtcctcagcacacgtatggcttaggttcagtcattattagcattgcccctgacacctctaaagggctggtggccagtatcagtcatctgcttctttcttaattggaaaaaggcaactttttaaaagtctgcagatgcttttcagctatttgcagaattaatttgaaagaatagaaagtttaaaaattgtggtatcaatatgctctcttaaagctaaaaacaaaaaatgtgtagccaggtggtgcatgcctttaatcccagcactcaggaggcagagagacaggtggatcttgttgagtctgaggccagcctagtctacagaatgagttccaggacagcaagaaaccctgtattgaaaaaccaaggcgggggagggaggaagaaaggaaaaaagaaaaaaaaaaaaacacatgtatttaaacatctaataaactcgggttttattctcagttaaaatgaaagcccataaggtaaaagtaacataaagaggggcgtggtagtgtgtgcctgtaatctccaccctcagatttccactgaagcagggttatgaagtaagggtcgccaggactacatagtgagaccttgtctctgataaatgattgaacacataaaccactaaaatatgtgtaatttattagaaatatattaatgtattccaggcacagtggcgtattctgtaatcctagtgttgtggagtcagaacagaaccaggatctctgtgggttgaggccagcctgatgtacgtagagagtctcaaggcatccagtagttctgtaattggactctaatcaaattcttatttgctaaaatttcttttatgccactggcaaccaaaatatttgccagacttattttgctgaccagttaattttccataaatgtccagcctttttatttgtctaattgttctgaacaaaaggtttattaggaaaatctctggaacatagagagaaaaaatagtaccttacaacaaaatcttctaagtcatgtgactgccacacacacctggtgccaggatagtgttcctttttaagaaaagaaaaaagaaaaaaaagtggtgattgcttctttccttcagtatgaaaagttcccccctgagtcagttctcatggtgctggtgctggtgctggtggtggattgcatggtagcatgaattaatttttttaaaaattgcatgtttgcacaattgtttattaacattttaaattgtttaataaatacaagtatgtttatacccagtagcatatttcttcattaagtagcagattgtacgtgttagtttgaatgtcagaaatactcgttctatatcttaaggaagaaaatcactacttgacctcaaatgggaaaaataaaagcagattattaataatttaattctggaaagcagaaataattaacaagtataaaatgcagtgagccaaccctcaaaaatatttactgcacctgactatacacagtacactgggtcttgaatcataaatgactgcaattaagtaggcacctcaacacagaaaggtgtggcctcatgggagggggcaggttctttatataaacagagtttctgtataagcaggtacccaatacgttgaaattggttattcttgtttcataataagctttttaagcagtaaaatggtttgatattaaagcaaattaacataagtatttcatcttcatgaacaatgcctttgggtttggagtattatatcttatgtgaattataaaatacagctttatagcaagttacgcatgttgggtcttgattcagatacatgtctagcattggtgctctgcagaattgaaatacctgattgagcagtggtttatagagcggttactgctctaaaccagaaaacggagacctgagcgaccgaagcgccaggtctcctcctgaggctttccatccattttcaggattggagagggagccatgattgattttggtgttggaacttatcaaatatgcctaatcccttaatttactttgtaaaaattttaataaaagctaattttttaaaagtaattgacagcttctgtcctaaaatttcccaattttttttcttgtttttattcattccattttcttcctcttcaaagcagagtgcgtttatgaacctgcaggaagttagggtaaactggacacgagggtgcttctaacccaatagtcaggttctagcttttgtctaaatactgaaaatggaagcaaaccgactagaaactgaccttaggaaattatttcttcctacaaactgaggctcagaacttacaaactggtctttgttaaatatttaaggcagtagagctttccctttgttgatttgcctgatatttaatgcctaatatagtttttcaaaagcaccaaacatggctgtgttgtatgggccttgagggtttcgactggttgctttgttgtgtccttggccagcatgccgtgtgttctctggtaccagggagtgctgtcttctactttctccataaaggagtttcactgtattgtctcctttttcttttaatatagatgattaaattgataaagtaaaaaacattttctgctgccccttctaatcagtcctgaaattttgacaattaactttttagcaaaatgtgtttaagaaatgaatttaaatctggctttgggatggcaaatttatagttacttacaaactcattatatattgtaaatataatttatctgtcctggaaatttcttttgtacagacccaaatccacaccttcatcacagccaagtgccaatggagtccagacagaaggccttgactatgacaggctgaagcaggtgggttctcagtggagctttctgtaagcctgattgttacgcgggcgtgggaaaccttaccctttaaccccacacgggtcctggagtgtgctgaaagcttacacaagcacagatactttagactatttaggctgtggccacagtcgtcccatatcgtacagctcagttcctttctggttcattgagctccctttaaattccagcagcagggcaaagaatagcttaaatgtaaggacagggctggcagttctaccttctagaaagcgtgggcttctacctttcggtggcatgttggcaacagtacacccgacaaacctgaacaaaagtgatactggcaagaatgtaaggaaacgaacggccaccctcacacacgtatgatttctaagaagctgcttgcaaagcaaagctttaacttctgaccagtgattgtatttaaagtgatttataaaaatagattggagcaaaagtaaagaaattttaacagattggtagtcattggccttactcggacatgaaaagctttttctgtaatgaattttaaaagagaatataaattcttcctgaagtgaacagcatagcactcacataacttaaagagtaaatcttccataggtagctcttgttttttcaccagtcattgtccttttaaatttaagtctacaattgaatctacaatttttgatgggagacagagcatcattctcacacacacacacacacacacacacacacacacacacacacgaatagtctcataaaaaatgaacaggtgaggctggagaggtggctgcttagtagtgaagagcacccactgctaaggcagaggacccacttcccaacgcccgcattgtctcacagccatccagcttcagaggatctgacaccctcttttggtttgttaaggcaccaagcacgcttgtgatgcacatacgttaaagatatgctcaatgatctgacattttaatgaattgtttcatttagtgaattatttctgctctcagagaccagaacgggaggtctccctagaactaagttcagaggattgtgggtagctatttggaaccaaacctgggtcctctataagaatcagcctccacactagttttaaatgttaagtctgaaatctggtgcatggttaacactcacagtccatctcatttcagactaacttcattgtaagagctcagcagctgtgtgtggcaggtgcctgctctgttaggtacttgaagtagggcttggtaactgtggtgctaagaaattgccatacttcaaatgaggtgacaaatttgccaagagctaattatccagtgacctcttccttgaaacttttgtatgtatcacatctcaggaagctgccagagggttggccatcacagccatctgagttatacttctctgaatgacaggactgacttttgatgttctagtctttctatcccatatcttactgggccagagtaagcaaagatgggtcaggaggaaataatgtaaacagagtttacccaggccaattctgtcctaagaagtagaattggaactgcggaatcaagtgtcagggtagctgagcataaggactgagcttgacctgggagcccagcaagccaggcatgttggtgcatggtgtccttggcctgctggccagctagcctggtctactagatgacttccaccagtaagagattgccttaccaaagggggttggggccctgcacttgtaaaataatacccaagactcctctgggtacgtacacatacaagtatgttgtgatacattctctaacttacctgaacaagaaacctcttagacatcccttcatttttgttggttttgctttgttccctggtgttttctcttgatacctcaggacattttagatgagatgagaaaagagctggcaaagctgaaggaggagcttattgacggtgagtacctggcgcatgcacgtccctgtagacagctgtgagactgacttcacactcgggggggggggagggttgctagcctttgctcaggttgttggaaagctgctgtatttttatcattggagttatttgtaaaaatgaaaataaacagatttctaagtgtcaagtgtagaatttggtgtaataataccaatcaggcagatttttctctccactcgtccatttccattgaactgcccttgtttttgagcccacagaaccagtgttcctgtcttaaatctacaagggagggagtaagtggacatagtcgtgtgtgattagtatctttataaattaaacatctgtgcagtgaagatgtagatcctgtatctttgtatgaaacagttagaacagaaccttgaaagttgttcaggagcgacccgttcctctgtatctcctctggtggattgactctggaaaccgtttcttccctgttgtagcaatcaggcaggagctgagcaagtcgaacactgcataaagaagcaaactacggaggggcaggacttgaatctggagaaaacaaaaattcctacaaacaactcttaacccccaaacttttaagctgtaagaagaaaatggatacacagtcaggagggaagccgtcaacctctgaaagcctcagacagtgactctggcgatcagctgtcccctcagtgtgctgctttattctgtctgacctttaccacaggatggagaatgatattggagttcccttagcagtactaaacccgtcaggcaagatcaccgtgcattgaaatattttcatgtctagatgagtctgcacgttttccataatccattgctaaaataaagacgagaaaggcttcagagatttttttccagagggcgctgatgaagaatttgatttagtaagttctgctgttgcgttgtaaatgtttctctcaggtttgtcttcctatcatatttgatattccgtgaacactaagatcataaaggatggaacaaacggagttgtatgtgctttcagagggtggtgtttaatacgaaaggtcccaaaatgtttagtcccacttgaggaattttagaatgataggaagtctctcgggttagccttcatgcaattttgtagtttaaaacataaagtccgtccagaaattaaagatttagatgccttcctaaattgttacaatgctttaccaaatctatgacttctacataaccaacagtggtcaaatggaaaacattctattatagatttactgtaggttttcaaccttttttagacatatgcatgtggacatttttataatgtaattacaatcaccacaaagttagcttttttaattacagacaataatgcatgtcacactaatatgtagtggccttttcagggcctagtcccagggaaaatattttgtagaatatagggaagtgggaggaagggaaggaataactttttatttaaagttaatttctgcactatcttttttttctcaattatctgcatgaattataatgaaaaatattttgtgactttaatcagtaaacatgttaacaaaaccaagtacttaatcttttacatcatgtcttcagctatttgtattttaaccagcaatttcaacggtctgaaacatgattctgagcgtaacatgtgagtccgtctcactgtggaactcacgagtttgatcactgaatttggcagttattttcacgcggcccccacagtgctgcagtgcttgggttcacgctcctgactctgcggctgctccttgacctttgctgtgctaaaatacaagaaatatcaataatggcagcaaccagggtcacataagtcactaggtaagggagaccaatgaggagttctgcagctttcttttaatagaactaaagtgaggcttaagtggtagggagtgtctgctgttacaccctgagtgtgtgtgtgtgtgtgaaaaaaaaaacacaccaaaaaagggcgaaagaactgaatacaaggggttgtgaaatgaactgagaagtgaaacggggaaatgtgcaagaaccacaaatggaataagctggcaaagacacgtccagaagaggaattcgctcattgacacaaaaaaacattgatggaaggattcttcgtaagggtaagcaatgaaggaaaactgagttagttcgaaccattcctagtggcccagattaaaagcccgtaaacagacagtatagatggatcttaagagcgtacgtgcnnnnnnnnnnnnnnnnnnnnagagagagaaagtgatcgagcttaagagtgtgtgatagatattatgttccacccctttataattggcaagattaaaataagggagaaaattttatatgttgtaatgttagctttttggaaaatctaggaaatcaaaaattctccaggctgtccatcatgatttatgcttgagttattaatgtgccatatttgctttggaatctttggctatcaaaacttttgctaaaaaaatagtagatacaatccactttgatttgctttctagatttcctatgtctcagctgtaaagcaaagcttgatgagagtagttttctaaaccctgcagtttgcagctaaccccactgcagagccgtgtgaatgaggggttttgttaagagtgtttgtttctgtagaaacttcatctttagattaaagtgtgagggatgagcggtcataagtcaattctgtggctttctctacccatcagtcgtcgtctcgcaggaatagtaaaggcattaaggatgcggcaagcatgtacgctgttctaaaagaagtatgcatctcatttactgttgaacgtttgattacgcaactactttgattgtgtacgtgtgtacatcccttacagatctgatcaaaaatcgcttttcattttgttgctaatgttaaatagtctgtagtacgtagagtactgggtctagatggtccaaagtgagacaaaaatgctgaagtcaaatgctaagtcctaaacaaagctggtttatgcactaaacgttttgtgccttggtctaatatttaacacaatgtctgtaaaaatgacaaaaaaagaaaaaaaaagaaccgacattggctcatgctgtatctgtatcctccatgatagtacgtcctcccacatgactaaatgtgctcctacctggatgcttcactgtcacccaggacagtcgtgtcgtcgctagagatttcagtgactacaatcgcaagctaaagcttgagttgttttcccaaaactgttccttggaaccatattgtgacggtgggtccttgcttctgtgtgttgactgtcttcagctgagtccagtttagggatcgtctgtgatgacaggaaggctctgctctcctcaacactgtgatctgacctgcgacaactctacaatacactctgaatggctagcacgtccatagcaaacaatctgaatgtacaaaccttagcgtggtgctgaaatctcttgagaatagtaaccgtgatctcaaagtctgttcaaaacgtgtcaatcagaactgaagatgaaccgctgatgaatgtccggtcctcatgccgcaggcgtgtttcctgtctaggttttcagttctctgctgttaccaccatagctgttccagttaactctcctacacactaacttcatttgtgcgattgaaataaaattgcagtatgtgcatgtttcttgtttgtgacacttagatggtcttctgcaatgatgtgttaattccaaaccaagtgatactgggtgtgaaatcagcaccttaggaagcccagggtttcactgtttacagtttaaacatcatgtcactgttctttaaagatttcatccacgtctggcgtagtggaaaacacgaagggaatatgtaatgatctttctaccttttgttttgcagtaagcgctgtgtgcctcttctgtcttacatgctcccagcacagcttgtagtcaatgtggtgaaaagtgttttactccattcttttgtcctataacacagtcatatatatatttcacttcatttacacggttcattttttttctttatgtaatttgcatattaaaggatattgccaagtaattaactttaaatgtagcagtctgtaccctctacagtgatctctttatgttggctttttatatatacttatatatatgtctcagcacctttatctattacaaagttccattttccaaacttgtaatttcctcattagaagtacaactctgtctgtgtgtgtgtgtgtgtgtgtgtgtgtgtgtgtgtgtgtgtgtgtgtctgtgtgtgtgtgtgtgtgtgtgtgtctgtgtgtgtctctgtgtgtgtgtgtgtgtgtgtgtgtgtgtctttccccctttatcagacctcggcatctctcccaagctcctccgtcctctttgtgcttcctgttcctggcattaatttgcatttgcaaccaccttgtgttgctcactgttgtgaagacagccagctgatttttcttttggttccaacttacactcctgctttatctacaaattaaagtcacttaaattcgaaaatgaattaagtagcaagtcctaagcttttccatttgcttagctaaaattactgtctcttaacttttgcccatctttgcagtgaggctgtgaagaattcatgtttgtacgattcagggcttgccaggcagggctgcaggaactgtttgatttcttgtcgccatgagaattacttaagccctttaccacggtctttaatcctatgggcgtatctgtaatccagcatcctggagacagaaacaggaggattgtggatctgatgtcaggctgggatgcatagagaaaccgtgtctaaaacaaatcagtaaaatcctatgggtcgtaagcataaaaacgcggagcataaaggaactcaagatgaacataaaaagcagagtgtaggggggtgtctgtccctttatcacactagaaagcccacttccaaaggcagaatagttttcacttccagactcaacctgttctggtgacggcatttttgtttttaatacaattggtatctgatcatctccccagagctctgtgactctttggtgagaggcatttactgttttataagttcagttcctttttttttttttttttaaatcaaaacttgttgtattttaaagaatctgactaaacagttattctggtcagtacttcatgtgaagatcctggagaacatgtacgtacaggaatcgctttcagttaagcatacgcctgtttgagaaactaaaatcgtcaatctctcaagagaagccatttatttatgccaaatattcttggggttgagggcggggatatgatatagtctttctattcccaacatcaaaataggctctgcactaaatcttgttcccttatgtttaccttggtggctttttgaagtaccaagcttctttctaaagcctctttgtgggtgaatgtgagaatgagcatgtagaaaccagtgttcaaccttggcacccacctgctttgagacagggtcacaaattcagctagacctgctggcagtgagcctcaggagatcctgtctgctgcttgctgctgggttgcctagcttgtaccaccacgcccagctgctctgttttacatggattctggaatcttaactgatgaccttgtgcttgcaagggaggcagacactcttccaattcagctagctttctagccctgcccccccccttttttttttctttatatcttaatgctggaacaatgaaagattcaaaatttaaacattaagattgattagttgattagaaaagaaagtaaaatggtacagtaaaattaccatttacagacaggggccttctatcggtacaatattaatgaatacctcacataaggaagatggggctttaggataaatttgaaaattgttgaagtatgaactatgttaatttgtaaagcaaccgtcactgaagggtagaaagtgacttggttactgtgacttgatgttaaaaagaattttctacaatcattggttctatttgttgaaattgtaaagatagggattgtgtgaggaggagagggtttgggaaagggcgtttcccttcggttatagatgctctgttgtagaactccctgagcacctgtaggtttccagtgcttgctcattaacatagagaataactgaaaactgaagctttggttaagtgcttgaaccagagatcagtcaccacaccctacctagtttgaagcttactgggtattccaataaagagcttttagaagtttttggtgtggaaccccaggattcctggataaaggaggcccagataagagcggagagggaggagtacttgactctcttgagttaggaaactcaagagcatggtgaactcatcactaaatccagccttttctaaacaaaaattaaacagagttaaaagaatttcacattctaataaaagttagaaatgtccatgcacttcattgaagagctatttgtaagtgacagtctccatttagcccgtaaatatgtctcagctgcccccttctgagtccagaaagatgtccttagcagtagaaacagactccttcaaaagaaaattacatgtctaatacaggcagtgagtgatgttgccgatagatagggtgttagccggcgctgggtgtcgcaaaggaaataaaaccccagggaaagaagtgtgcatcgagtctggctctgggattcatccctgttgtggtgggaatacacagtgtgtatgaggtccctagtattgaaaaaatcaaaatgcagctttaatcatgaagtaagtaacacaggaacctttttcaagtttgatacctaaggaaaaaaaaatgtttgaaattcaatattctctagtcaattctgtctacccagccttcctataaagttttggtttgtttttgttttgttgtttttaagattttaaacttcttttagtagagacatagaagattgtcattccatggccaagtttcacctaggtgagttttggcatttgatattctaacttctggaatttctctgagtattttgatcctcagttctgaggtctgtctgtttgggggtggggcggttgtctttaaaccacaagccctacatgatgccaaagccaccaggcctctcttgtgtatcaggagtagaactaagttggcttagccctttggggaccaaccttgttgcgtagtgtgtggtaccagctttgcgctttgcctgggaaaactgtatctcagaaaggtaattaggaaggtctcaatatttaggtggtggtggtagggacaggttaaagtctagatacaatttctgttgaccacaagggcagggagcagtttcaggagtttgtctacttactctggacaccttgcttcatttgctgacagtgaacttgggcatctgtggttcctgtgagacatctcagatgtgtatcttgtctctgtgctcctgtttaactgtggatgtgagccctgaggcacccagccgttgacttgggactctgccagattacatgtgtgtaaggtcccttctacttctgggatgtagtttgagtttcttcattcacatgtcctcaagctgtgatcagtctgttatttcacccaagaaaacagaattcttctgtatgcatatgggtgttttacctccatgtatatatctgtgcaccacacatgtgcctgctgcctttggaggtcaaagaagggcatcagatcccctggaactggagttctagacagtagtgagctaccctttggatgctggagcttctgaaaatacacacaaagtgctgttaatggctgagccatttctccagcccccttctctctgaccttaaagagtagcttttgaatgtttagaattactagatcgtgtttggtgaaatctttatatcctatttatgagtgaagtaagagcaaatggccattctgagaccaggcagtggccattgttagtcccagctacgtcagctgtgtgctttgctgaagcactggggcagcttggtggcttcaggacaagcatgtgccatcagaaaggccagtgttctctgaggttcttctcttcttccgtggtaggaagcctccccatgtactcatgcctcgagctgtttctaagctagctgactgctgcactgctgtgagcagtatcttaaccctcctctttgccaggggagaatgcacctcagctgtgttactgtgtaccgtgtcactagcaacttgaaaaggtgacaatacgagtctgtctctagcctttttattatacaaagtccattcattcctagcttcttgtttttaaactccgactttactgcaattaattgacagtcccctctgatactgtttaagtgttgtgatctctcgtttgctttgtttgtttgtttgtttgtttaaggcagggtttctctatgtagccctggctgtcctcgaactcttcttgtagaccagaatagcctggaactgagagatccaccctcctctgactcctgagcactgggactgaaggtgtgagccactgcctccacctgccccactgcttgctttttcagataagtgactagaagataagtctgggcatcttgtcttcctagtgtattttactctgattctttcctggtttatgtattgagattcatttctcatagacagaacttgctttttattgtgtgtagatttggagggaaggatcaagttattcccgtaaatgtaagcaagctatcttgaggcatctgtagttgatacaaaatatttttataatatattaacaggcatggggtacttttgaggcagcctctgtaatctgtagccacccacttaatctccagggtcccccattggaagataaaaggccactgtatctgtagtttatctagaacagagcttcaggattccagctggaaagacttgagggcctaacccctgagagaggtccagcccctctgcctgatgcaggcctcctgctgccttcatgctttctggagggcctctggcagtcagaatgagtaggtcagtgtgtggcttgaaagctgtttctaacattgattttgtttgtttttcttttgttagggttttttttttccctgttttgtttgtttttaagagattttggttggttttggttttggtggggttttggttcgtttgttttttgacaggttaggaagtcagtgatgacccttactgtttcaagaagcagattaaattcttaaatacattttccttctcagacctcaacttgataaaccaaaaaacatacactaggatagcacagtgtgtgggattggaaggggcagtctcagagatgagctggagcactggagccctcggcgcaggacacgctgaactttcagtctcgtgtcctcgtcctttgctgtagatactagcaatgtgctcttccgtcctttaaacacgcccacagctggactccttggtaaagggtggtgaagatttgcagcctgccaactgggacttttataccctagagtcgggagtggactgaagtcagactttaggagttaagtagatgctcctccggaatggagagttgtgttgtaaatcatttgccagctggaactttgtgtaccatatctcggtgaatcttagggattataggccttgctaaagttcaggagaaaggaaactggccacagcttactgtaaggttttgctcaattgactgaaattatttgaaagtctgtctagaacacgatttcatcaagtaacaccttcgtccaagctcggcccacgtttgaggaaggggaagcgagggggcgagagggaaggcgggatgggtggctgaggatcaggtagcgctggagcttggcaccaaagtttctcatgattgcatatggaggaccacttgtgatccaccctcggaagactcgccagaaagtagcagttcctgctacacactacagtgccttccaacgacgttctgtgtgaactgcatgcagtttcgtgtaactccagagtgtaacatgtatgtgcatgatctgtccagaatgtgcagagctgggattcaacagaaagggctgcgccctgctgctgctgggtcagcaggctgctggggtcggacttgtgacttaggcttgcagccttggatcctggggtttgcactgatatggttctgtcatccaatcagatctgtctcccttttagctcctttcctactttgcagctttgctgattttaactgcttcattcttctgcttcttggtatctttcttttgaaataaaaagacacaatacctaattcaaaagagatttgtattcatttttccagttcctcttcatttacctcatgtatggcaacgatgaagcctggtgccctgttcgcatgattgtgagtggctcgcactgcactgcacttggcttgcccactcgcccactcttctgtattcccgtccaaggaggagcaggcaacctccttccatttcccaggatgctcctctgccccctttatctaacagtgttgatggaaactcagtgatacattcaattagtgcaatgatggggcctcagtggaaagaaggccccagccccttttactgagagactctagtcctctgcttaattgcaagcctgatttctaagtagcaaaatgtgctggtcagttttctgttgctgagaccaaaatcatttttttttaaagatttatttaagggctggtgagatggctcaatgggtaagaagctctgactgctcttccgaagggcctgagttcaaatcccagcaaccacatgatggctatcacgtaatgagatctaacgccctcttctggtgtgtctgaagacagctacagtgtacttatttatagtaataaatctttgggcctgagggagtatgtgagtacaccatagctgtcttcagacacactggaagcatcagatcccattacagatggctgtgaaccaccacgtggttgctggaaattgaactcgggacctctggaagagcagtcagtgctcttaacctctgagccatcatctctccagccctgagaccaaattcttaagtcaacttaaaaggaagaaaggtttatctggttgcggtttcagaccacggtcatgagaccctcttgctttggtcttgtggtgcagcagtacaccatggcagagggaggcctggtcgtgtcatggtggctgggcagcagtacaagcaaaaggaggacaattgctaacacgtttgaagacacagactacaacctatctttcactgaatcctgactcccaaaacttcggcctgatacttccataggcctgtaaccaagccctggagcataccacatccaactggcactggagggcacctcctgcacagcgagggggaccaaggtaatgagcggaaggaaggcagtctggtgagcgtgggcaagtgtaccaagccatggagctgctgcttgtattgtgaagggttagggtcgtcagaaatcaccctaacatggtttctgtggttgcaatgtgctgaggggtagctgcctgctgccgacagcccacgctgtccatcagtaccacagtttttgacacagcttcactcactatccttctcaatcttgttgcaaattttgtgtatagctcagactctgatcctcctctgtcagtctcccaagtgctctaggcgtaggccttaaccatcttgaagatgtcttcttcagagctaggttttaaaatcatccccagggtctagagaagtggccccaagattaagagcacttgctgctctgtaaacctggagtcggttcccagcatttatgtggtggcttacatacaggcatctggaactccagttccagaggatctgacctccacagtcatcaggcacacacatggtacacgtacttacatgcaaaacaagaaacaaaaaaaaaaaaaaaaaaagagggctagagagatggctcagcggttaaaagcacttgactgctctttgaaggtcctgagttcaaatcccagcaaccatatggtggctcacaaccatccgaaatgagatcctatgccctcttctggtgcatctgaaaacagctacagtgtacttagatataatggggcttttttgttttgtttaaaagaaacaagaacatcagatgcaacgttgttgctgtggtaatcggatagttgtcgctgtgattcatacaatacacagttgaatttgtgaaaccaggaagcttagtcgttatgtatcctgagactttttttttttttttttgtagctctgcctctgagcctagaacctttggaacctacctttgaagataggtgataggtttcaatctgctgagacaagtgtgtccgcacaaacaggccacctaaatgctgtaaggagatttgatagtttttagccagaaccctgataagtggttgaggccttaccatcatgtttggccctcttatcagttggactaaaacaggaaacttgctgcacacagctcactaaatgcatgtgtgactagcaccagggtcaagaagcatccatatgggactccatgtgagccccttcatgttctttctgtagttcacagccagcataacctctcctgccttcttctcgccacacttggctgtctcctgtgcttgatataaatggaactgtgcctttttgtgcttggcatctttctctcagtcttgtgcgtgagcctcatccacagcgcattgtggtgggtagtccgtgctcagtgtgatagagtagttcccagcttggggctattacgagcagtgccactatgagtctcccagcatgtgtgctgaacagatggacgcctttcttctgcgtttgtatctaggaatagccatggtgggccaccacagatgccatgccacttcagcaggcacctcctctatgtacacactatggcggtagccacctgggaggatatcagaggggactgtgagcctcctgttgtgagcctggcatcaatccagcaaacatccagagatccaaacccgagcacaccacaaaccgtgttctttgtttccctggaatgtaaatgagaagcacctttcattcatgactacacctaccaaatggatacttacaagacaggactccctgcccctctcgagatgtttatatttgattcgtttttaaatggattgcatt

SEQ ID NO: 660 - DNA, 3425 bp, Mus musculus
tgtctcctctcctgtgccccaaatgcctccgtcaccaacagcacccaatgggtcgctagactctgtaacatacccagtgtctccaccgcctacctcagggccagcagcgccacctccgccgccaccgccaccgccgccgccaccaccaccgccgctgccaccgccgccgctgcctcccctcgcctcactctcacactgtggatcacaggcttctcctcctccaggcacccctcttgcctcaactccctcatccaagcccagtgttctcccttctccctctgcagctgcccctgcctctgcggagacccctctaaatcctgagctgggagactcctctgcttccgagccaggcttgcaggcagcctctcagccggccgagtcgccaaccccacagggccttgtcttgggaccacctgcacctccgccaccaccccctctcccatcaggccctgcctacgcctcagcacttcctcctcccccaggaccccctccaccacctccactgccatccactggtcctcctcctccaccccctccaccaccccctcttcctaatcaagctcctccccctcctcccccacctcctgcccctcccctccccgcatctggaattttctctggatccacgtcagaagacaatcgccctttaactggacttgcagctgcaattgcgggagcaaaacttaggaaagtgtcccgggtggaggatggctctttcccaggtggagggaatactgggagtgtgagcttggcctcatccaaagcagacgctgggcgtgggaatggacctcttcctctagggggtagtggcttaatggaagaaatgagtgccctgctggccaggaggagaagaattgctgagaagggatcaacaatagaaacagaacaaaaggaagacagaaatgaagatgcagagcctataactgctaaggccccatcaacaagtacacctgaaccaaccagaaaaccttgggaaagaacaaacacaatgaacggcagtaagtcacctgtcatctccagacccaaatccacaccttcatcacagccaagtgccaatggagtccagacagaaggccttgactatgacaggctgaagcaggacattttagatgagatgagaaaagagctggcaaagctgaaggaggagcttattgacgcaatcaggcaggagctgagcaagtcgaacactgcataaagaagcaaactacggaggggcaggacttgaatctggagaaaacaaaaattcctacaaacaactcttaacccccaaacttttaagctgtaagaagaaaatggatacacagtcaggagggaagccgtcaacctctgaaagcctcagacagtgactctggcgatcagctgtcccctcagtgtgctgctttattctgtctgacctttaccacaggatggagaatgatattggagttcccttagcagtactaaacccgtcaggcaagatcaccgtgcattgaaatattttcatgtctagatgagtctgcacgttttccataatccattgctaaaataaagacgagaaaggcttcagagatttttttccagagggcgctgatgaagaatttgatttagtaagttctgctgttgcgttgtaaatgtttctctcaggtttgtcttcctatcatatttgatattccgtgaacactaagatcataaaggatggaacaaacggagttgtatgtgctttcagagggtggtgtttaatacgaaaggtcccaaaatgtttagtcccacttgaggaattttagaatgataggaagtctctcgggttagccttcatgcaattttgtagtttaaaacataaagtccgtccagaaattaaagatttagatgccttcctaaattgttacaatgctttaccaaatctatgacttctacataaccaacagtggtcaaatggaaaacattctattatagatttactgtaggttttcaaccttttttagacatatgcatgtggacatttttataatgtaattacaatcaccacaaagttagcttttttaattacagacaataatgcatgtcacactaatatgtagtggccttttcagggcctagtcccagggaaaatattttgtagaatatagggaagtgggaggaagggaaggaataactttttatttaaagttaatttctgcactatcttttttttctcaattatctgcatgaattataatgaaaaatattttgtgactttaatcagtaaacatgttaacaaaaccaagtacttaatcttttacatcatgtcttcagctatttgtattttaaccagcaatttcaacggtctgaaacatgattctgagcgtaacatgtgagtccgtctcactgtggaactcacgagtttgatcactgaatttggcagttattttcacgcggcccccacagtgctgcagtgcttgggttcacgctcctgactctgcggctgctccttgacctttgctgtgctaaaatacaagaaatatcaataatggcagcaaccagggtcacataagtcactaggtaagggagaccaatgaggagttctgcagctttcttttaatagaactaaagtgaggcttaagtggtagggagtgtctgctgttacaccctgagtgtgtgtgtgtgtgtgagagagagaaagtgatcgagcttaagagtgtgtgatagatattatgttccacccctttataattggcaagattaaaataagggagaaaattttatatgttgtaatgttagctttttggaaaatctaggaaatcaaaaattctccaggctgtccatcatgatttatgcttgagttattaatgtgccatatttgctttggaatctttggctatcaaaacttttgctaaaaaaatagtagatacaatccactttgatttgctttctagatttcctatgtctcagctgtaaagcaaagcttgatgagagtagttttctaaaccctgcagtttgcagctaaccccactgcagagccgtgtgaatgaggggttttgttaagagtgtttgtttctgtagaaacttcatctttagattaaagtgtgagggatgagcggtcataagtcaattctgtggctttctctacccatcagtcgtcgtctcgcaggaatagtaaaggcattaaggatgcggcaagcatgtacgctgttctaaaagaagtatgcatctcatttactgttgaacgtttgattacgcaactactttgattgtgtacgtgtgtacatcccttacagatctgatcaaaaatcgcttttcattttgttgctaatgttaaatagtctgtagtacgtagagtactgggtctagatggtccaaagtgagacaaaaatgctgaagtcaaatgctaagtcctaaacaaagctggtttatgcactaaacgttttgtgccttggtctaatatttaacacaatgtctgtaaaaatgac

SEQ ID NO: 661 - protein, 395 aa, Mus musculus
VSSPVPQMPPSPTAPNGSLDSVTYPVSPPPTSGPAAPPPPPPPPPPPPPPPLPPPPLPPLASLSHCGSQDPPGTPLASTPSSKPSVLPSPSAAAPASAETPLNPELGDSSASEPGLQAASQPAESPTPQGLVLGPPAPPPPPPLPSGPAYASALPPPPGPPPPPPLPSTGPPPPPPPPPPLPNQAPPPPPPPPAPPLPASGIFSGSTSEDNRPLTGLAAAIAGAKLRKVSRVEDGSFPGGGNTGSVSLASSKADAGRGNGPLPLGGSGLMEEMSALLARRRRIAEKGSTIETEQKEDRNEDAEPITAKAPSTSTPEPTRKPWERTNTMNGSKSPVISRPKSTPSSQPSANGVQTEGLDYDRLKQDILDEMRKELAKLKEELIDAIRQELSKSNTA

SEQ ID NO: 662 - DNA, 2754 bp, Mus musculus
agtgaacagagtatctgtcaggcaagagctgctgtgatggtctatgatgatgccaataagaagtgggtgccagctggtggctcaactgggttcagcagagtacatatatatcaccatacaggcaacaacacattcagagttgtgggcagaaagattcaagaccatcaggttgtgataaactgtgccattcctaaagggctgaagtacaatcaagctacacagactttccaccaatggagggatgctagacaggtgtatggtctcaactttggcagcaaagaggatgccaatgtcttcgcaagtgccatgatgcatgccttagaagtgttaaattcacaggaagcagcccagagcaaggttactgctacgcaggacagcactaatttgcgatgtattttctgtgggccaacattgcctagacaaaattcacagctacctgctcaagttcaaaatggcccatcccaagaagagctggaaatccagagaaggcaactgcaagaacagcagcgacagaaggaactggagagggaaagaatggagagggaaaggttggagagagaacgactagaacgagagaggctagagagggagcgcctggaacaagagcagctggagcggcagcggcaggaaagggagcacgtggagcggctggagagggagaggctggagcgcctggagcgagagaggcaggagcgggagcgagagcgcctggagcagctggagcgggagcaagtggagtgggagcgagagcgcagaatgtccaatgctgctccatcttcagacagctccctgtctagtgctccacttcctgagtattccagttgccagccgccttcggcacctcctccatcatatgctaaagtcatctcagctccggtgtcagacgccactcctgattacgctgtagtgactgctttgccacctacttccacaccccctacaccaccactgagacacgcagcgacacgttttgcaacatctctaggttcagccttccaccctgttcttccccattacgctacagttcctcgtcctctcaacaaaaactctcgaccttcttctcctgtgaacacaccctcttctcagcctccagctgcgaagtcctgtgcctggcctacttccaatttctcgcccctccctccatctcctccaataatgattagcagcccccctggcaaagctactggcccacggcctgtccttcccgtttgtgtctcctctcctgtgccccaaatgcctccgtcaccaacagcacccaatgggtcgctagactctgtaacatacccagtgtctccaccgcctacctcagggccagcagcgccacctccgccgccaccgccaccgccgccgccaccaccaccgccgctgccaccgccgccgctgcctcccctcgcctcactctcacactgtggatcacaggcttctcctcctccaggcacccctcttgcctcaactccctcatccaagcccagtgttctcccttctccctctgcagctgcccctgcctctgcggagacccctctaaatcctgagctgggagactcctctgcttccgagccaggcttgcaggcagcctctcagccggccgagtcgccaaccccacagggccttgtcttgggaccacctgcacctccgccaccaccccctctcccatcaggccctgcctacgcctcagcacttcctcctcccccaggaccccctccaccacctccactgccatccactggtcctcctcctccaccccctccaccaccccctcttcctaatcaagctcctccccctcctcccccacctcctgcccctcccctccccgcatctggaattttctctggatccacgtcagaagacaatcgccctttaactggacttgcagctgcaattgcgggagcaaaacttaggaaagtgtcccgggtggaggatggctctttcccaggtggagggaatactgggagtgtgagcttggcctcatccaaagcagacgctgggcgtgggaatggacctcttcctctagggggtagtggcttaatggaagaaatgagtgccctgctggccaggaggagaagaattgctgagaagggatcaacaatagaaacagaacaaaaggaagacagaaatgaagatgcagagcctataactgctaaggccccatcaacaagtacacctgaaccaaccagaaaaccttgggaaagaacaaacacaatgaacggcagtaagtcacctgtcatctccagacccaaatccacaccttcatcacagccaagtgccaatggagtccagacagaaggccttgactatgacaggctgaagcaggacattttagatgagatgagaaaagagctggcaaagctgaaggaggagcttattgacgcaatcaggcaggagctgagcaagtcgaacactgcataaagaagcaaactacggaggggcaggacttgaatctggagaaaacaaaaattcctacaaacaactcttaacccccaaacttttaagctgtaagaagaaaatggatacacagtcaggagggaagccgtcaacctctgaaagcctcagacagtgactctggcgatcagctgtcccctcagtgtgctgctttattctgtctgacctttaccacaggatggagaatgatattggagttcccttagcagtactaaacccgtcaggcaagatcaccgtgcattgaaatattttcatgtctagatgagtctgcacgttttccataatccattgctaaaataaagacgagaaaggctt

SEQ ID NO: 663 - protein, 797 aa, Mus musculus
SEQSICQARAAVMVYDDANKKWVPAGGSTGFSRVHIYHHTGNNTFRVVGRKIQDHQVVINCAIPKGLKYNQATQTFHQWRDARQVYQFGSKEDANVFASAMMHALEVLNSQEAAQSKVTATQDSTNLRCIFCGPTLPRQNSQLPAQVQNGPSQEELEIQRRQLQEQQRQKELERERMERERLERERLERERLERERLEQEQLERQRQEREHVERLERERLERLERERQERERERLEQLEREQVEWERERRMSNAAPSSDSSLSSAPLPEYSSCQPPSAPPPSYAKVISAPVSDATPDYAVVTALPPTSTPPTPPLRHAATRFATSLGSAFHPVLPHYATVPRPLNKNSRPSSPVNTPSSQPPAAKSCAWPTSNFSPLPPSPPIMISSPPGKATGPRPVLPVCVSSPVPQMPPSPTAPNGSLDSVTYPVSPPPTSGPAAPPPPPPPPPPPPPPPLPPPPLPPLASLSHCGSQDPPGTPLASTPSSKPSVLPSPSAAAPASAETPLNPELGDSSASEPGLQAASQPAESPTPQGLVLGPPAPPPPPPLPSGPAYASALPPPPGPPPPPPLPSTGPPPPPPPPPPLPNQAPPPPPPPPAPPLPASGIFSGSTSEDNRPLTGLAAAIAGAKLRKVSRVEDGSFPGGGNTGSVSLASSKADAGRGNGPLPLGGSGLMEEMSALLARRRRIAEKGSTIETEQKEDRNEDAEPITAKAPSTSTPEPTRKPWERTNTMNGSKSPVISRPKSTPSSQPSANGVQTEGLDYDRLKQDILDEMRKELAKLKEELIDAIRQELSKSNTA

SEQ ID NO: 664 - DNA, 179487 bp, Homo sapiens
  misc_feature (1)...(179487): n = A,T,C or G
ctcagcctcctgagtagctgggataacaggtacctgctaccatgaagggccttatattctattggttgatgccaaatgaatagaacttaaccaagagagcaaattgcctcattaactttatttatttatttattgagacacgatctggccctgtagcccaggttggtgtgcagtggcatgatctcagctcactgaaacctctgcctcctgggctcaagccatcctcccacctcagcctcctaagtagctggatctacaaggcatgcaccaccaagcccggctaatttttgtatttttggtagaggcaaggtttttcaatgttgcccaggctggtcttgaactcctggactcaagcaattgcccgccttagcctcccaaagtgctgggattacaggtgtgagccacctctacctagactgctttaattcttccttccctattctatctcctcatctagttttggaacagagttactctggaaagcaactcttgaatcaaacctgacataaactattaacttagctagttacatcaactttcaaaattaaacagactgtccagtgcttgggataccagaagaccatgaagaatcacaggccagctttcttaggaattgcttcttaacttaatttgggcatcattcagtaggaaaagaatgccacgccagacttgatattaaacagaggccggaagatataaataactcaaataaagcaaatcaagaatcaccatctcactagtaggaggagagaaaataaagtgaaaaataagaaggaaaagaccagactgtgaacttttgaagggaaatattatttgcaagtgagagacactgaataaaatcaagtacaatgagttcctcagtgaacattacaaaaaaacacacaaaacaggagctatttaaagactaattatgagatgttgacagatataaaatgccacctgagttagacaagaaaacctgaatgggaagctaggatagtggttttctattcagggcctttccctgaaatataagcaccctcattggtgataaattttaaatgagcaagtcctaaaaaaaagtttttcacaagaatataaatgaagaaatagatgagttattgtcaaagattttggtacatctcatcctagagtaagacttttatggcaaattgctttgcagacaaccaaagctaaatatagcatcaggttacttttggggtacagtatcccttagctactctctgaatctaattagaacgttaataaaaagaatgctagacattctcagaacacctttaaaaacacactggcgccgggtgcggtggctcatgcctgtaatcccagcattttgggaggccgaggtgagtggatcacgaggtcaggagattgagatcatcctggctaacacggtgaaaacccgtctttactaaaaatacaaaaaattagccaggcgtggtggcgggcgcctgtagtcccagctgctcgggaggctgaggcaggagaatggcgtgaatgcgggaggcagagcttgcagtgagccgagatcgcgccactgcactccagcctgggcaacagagtgacactccgtctcaaaaaaaacccccaaaaaacaaaaacaaaaacattggcttacaagtatatgcatatatccaaactcagcaaattgtatacattaaatataggcagtttttttaaaaaaaatacaaaaacacaagagacaacacacacacacacacacacgcacaggcttggctttattttgtttatcaccctgtgttcaacaaaaactgttagcatttctatgagttttttgtttactgagttggtttaagtaactctatccctataagctttataaaacctccactagttgtatgcctgaaatatctaagttgaaggagtggtgagtgaatgaatggctactggctacttctctagtagcattactgttctggaaatgaagtcctaacattaatttggagttgtaatttggaggctcatttaactcatttattgagcccctacagtgcacaaagccacaagcctaagcactaggaatcaaatctgtgcctaagggaaggccttatttattgcttgggagatagaagtgtcatgatttaccagataggatatctctgtagtttctagtggcagaatgaggaagttaaggaattgagagtattttgtttgttttatttttaccttccatttcctaagtgggccttgaggcttttttttcttttctttttttaatcagaggaagtaaagtgaaatagaagagatcctgtggtgcagaggttaagagtgtgggctatgaaactggcctttctggccttctcatttactagctgtgtgacttcgggcaagtctcttaacctttctgtgcctcactttcatgagttgtatagcaggcatgactataatgatacccacttcataggaatattgtgaagattaatggagttaatataagtaagtgcctagcaggtgagtaaatatgactattggtcaaccaatcacttagctacattcatctcttacattcctgccactcaaataacattatttttcttaaatataaagcttgtttgtgtcagactccatctaaggtaggtattcccacagagaggggcctgaaataagaggctaaatttaaatttttccctcaatggctttaattattgatttgcagttcaattcatttgctaccaaatagagtattcaatcactggctactttgatcaaagaacccaacagcttcatatacaaaatgagtacaatatcaacattttacttcattaaaagtcggtactcatgataagtgagttaagggtattagaatgtttggaggccaaatgaaagtattataactaatgacacataatgacattatttatctgattatttcctgcctttcaattttagaaagacttgactagaggctgaatttggacattaaacccaagaaaatgaacatttgaaggtaatttctcaaagtagaatttggccaggtcaccaggcttagcaaccgtttcaaagagaaagataactgagatttttaatgagctttgaaacttacctaaaggtgggataaaagtgtggtgttaagcagtgtgaatttttcttttttttttttttttttttttttttttgaggcagagtctcactctgttgcccaggctggagtgcaatggcacgatctcggctcactgcaacctccccctcccaggtttaagcgattctcctgcctcagcttcccgagtagctgggactacaggcgtacgccaccatgctcagctaatttttgtattcttaatagagatggggtttcaccacattggccaggatggtctcaatctcctgacctcgtgatctgcccacctcagcctctcaaagtgctgggattacaggtgtgagccaccgcacccggcctgtgaattaattttagacagcttgtttaggatacatcctagtggtaatatctttcttctgtactgtaattagccagaaaataatcttttatttaataacattttttctgatctcctttgaggaaatactctaaggtcagttgtcacctgatcgtattgtctgtgaaaattgagtggtattctagttttattacaataaatcacttcaatgcgagaaagagggtaccaattttttttttacctagctaccagctagattttataaaataggggctaagagttcagaattagattatgatgatcgtttctctttctttctttcttctttctttcctttctttctttctttctttctttctttctttctttctttctttctctttctctctctctctctccctccctctctctctctctctccttctttctttcttgacgaaacttttgctcttgttgcccaggctggagtgcaatggcacggcctcagctcaccgtaacctctgcctcccaggttcaagcgattctcctgcctcagcctcccaagtagctgggattacaggcatgcgccaccactcccagctaatatttttgtatttttagtagagacagggtttctccatgttgatcaggcaggtctcgaactcccgaccttaggtggtctgactgccttggcctcctaaagtgctgggattacaagtgtgagccaccgcgcccggatggtgatggttcttttctattttctttttattttttgggacagggttttgctctgtcacccaggctggagtgcagtggtgtgattatggctcactgcagcctcaacctcctggctcaagccatcctccaccctcagcttcctatgtagttgggtctacaggtgcatgccaccatgcctagctagaattttattttttagagagatagagtctcactatattgcccagcctggtctcgaactcctgggctcaagtgatcctcctgcctcagccttccaaagggccaagattacaagcatgagccactgcaccaggctcgacacttattttcaatccaatttctaaagcactataatttgattgttatctagatatggggaccacctgccatattctttaaatggtggccatagctgaattttgtgggaaaaaatgcattgcattttatagaatatggcctctatagactaatgttactccaaaaccattcaggctatgggaatcttctgccaaatctaaacactgtagagctaagaaaagaaagagactctggggaagacgaaatgaaattaactgaataaatcctaatttggaagggagaaaaatgacaaatggaagaaaaatgcaaaaggcagagaggcaaatagtttcctctaatgtctgtgtctcctgataatattttagagctgacattatatatgggcagctaaagctgaaagatgagaaataaaaatatcttgaatcctactggaatatcatgttctacgttatttttttttccattcttggggacacaaacaaaaattacactgtgaactaactgccacaaaagaaaacaaaatactgttaggtataagcagaaagtgtacaatcaagttcactccaaactaccttctcttcctcacccatctgtaaagtaacttaatttttcgagggagagccttttttttgggtgatgggggagaccgtgcctacaatccttagcattgatttcctaactgctgagtagcattagtcacgcatcctcctcatgcccataaatggaggacaagcctacactgatgctatcagatgaatttaaacaaggcatgttccaagtgaaccctcagagccagactgacaacactcctgcagcaaactcatcttcaacaggagcaaattttatttccttttctgagtacacactgctaacaaatgtataggccaatgtgatggctctgtactgtacacctagggcttggagcaggcctcctactgtgatattaagcaggggtggctgggcgcggtggcccatgcctgtaattccagcactttgggaggccgtagcgggtagatcacctgaggtgaggggttagagacctgcctggccaacatgttaaaacctgtctctactaaaaatatgaaaattagctgggtgtggtggcgggcgcctgtaatcccagctactggggaggctaaggcaggagaacccctcgaacctgggaggaggctgcagtgagcagggctctcaccactgcactccagcctgggcaacagagcaagagtcggtcgaaaaaaaaaaaaagcatgggtaaaagtttatctaagagaaagttgaggtctatatacttgatgttaacaacagagtatatttcttttgatgaatagtttttaattagagaagtcattcactcatttattcattcaccttttaaatacctaggtgcctacatgatgggccagccattgggccttgggccagcaacccttatgagagaagagttcaaatgatttccactattcagccaagccaacacaatctcagctaatttttagtttttaattttaattgtttagagacaggttctgtctctcaggctggagtgcagtggctggatcatagctcactgcagcctcgaatccctgggctcaaacaatcttcttgcctcagcctcctgagcagctgagaccacaggggcgtgctacaatacctggctcatattttttttctttgagacggagtctcgctctgtctcccaggctggagtacagtggcacaatctcagctcactgcaacctctgcctcccaggctggagtacagtggcacaatctcggctcactgcaacctctgcctcccgggttcaagtgaatctcctgcctcagcctctggagtagctgggattacaggcacctgccaccacacctggctaattttttgtatttttaatatagatggggtttcaccatgttggccaggctggtctcaaactcctgacctagtgatccgcctgcctcagcctcccaaagtgctgggattacaggtatgagccaccgtacctggctacctggctaattttttaaaaattttgtagaaatggggtcttgccatgttgcccaggctggtcttgaactcctgggctcaagtgatctgctgcctcagcctcccaaagtgctgggtttacaaacctgagccatcatgccaggcccagacctaatttttaagcagagtttatgagaagagaatcagctttaatttttattgccttagtgcactctcatcccataagaaggtagtttgatatagtcgaaggaacaatggaccaagatttggaaatcctgagtttaagttgtgggcaagttacttaacctctctgggtctcacatttcttttctgaaaaatgagtgggctggaccgaagattccttccatctctaaaattcttttattctatatggtaacacattccacagcatttcctttgtgaccagaattagtctgtgacttcctacctcaagtatcgctttgcactctttgaatgttaaaccaaatatgaacaagaagcaataacattttgtcacagccaacaaattgcccttccacagaatgacctttgggggtcaggccacccattgcaatatctaaatccaaaaggcaatgaatgctatgaccaacttgtgagctggcaggctgccatccaaaaggatggaaatggttgtaggcagccaaaattcttggctggtacatttttaataaacatagaaaataagaacagcattttccacttggattgcttaatttggtgcccataccattggaacatttgctgttagaataaagatgatgtgatatatcacttatttagcgcaggatggattaactttcacaaatgagaagtaggttatggagtcatctgtaaggaatttttatccttgtttcttgtgtctggcaggagatagcttgagtcattacagcactctctccaccccttttggccctttgtaagagttttccctgaaacataagctctgtcggatttactgtattgctatgaatggactaaggcaaattggtgtgacttctctgtggtcgaatatgttttattaatacttttccaagatggttcaatatgtcttaatttttccaagaaaaaactctccacagcacatgttcaaatacttgaggtatgtgtttcaaactacagggagaaacttacgtaagacaatgaccctcatagttggtagctatgatttttaatcatgcctgttgcactaattgatccagttacttgagctctatgtttccctgtctctacttgcaatatggcaactagaacatttgactggcaagtttgttttctctccagtggttggagatccttgaataaaatgccctctgtaatggtaagctgtaattagatatgtgggtggaaattagcgttcttcaagtacaccatgtttaaggcagaggcatcatgctttctactacctgaggccaccttgatcctctgccatagctccgggtcactgcttctatagggctgttggtctaaggctgccggttccaaaaagaaaataactcggtattgagctctgaaaccaggaattttatttatttatttatttatttatttatttatttattttttagatggagtctcgctctgtcacctaggctggagtgcagtggtgtgatctgagctcactacaacctcctcttcccgggttcaagcgattctcttgactcagctgggattacaggcgtgcaccaccacgcccggctgtttttttattttttatttttagtagagacagggtttcgccatgttggccaggctggtctggaactcctgacctcagatgattcgcctgcctcagcctcccgaagtgctgagatgacaggcgtgagccaccgcacccggctgaaaccaggaagctttttttatggttaaaaatgggctacacagttcaattatagacaaatcaggcattgaccacggatcactataacctgtcttttcatttggaagtgtacattatcccaaccttcctaactatcttttgaatggtacctgcatcttaaaacaaaacaccaaaacttttgaatggattcctggagtcatggtaggtcctccattttggatgagatccttcagcaataggatccctgtagcaacaacccttttctatcctcctcaccttttatacagaaagtacatccctgtcttccggactaaaagggggccgtaattcgtacagttaaaaattttattattggatttgtttttagatttaaaaaaaaccgaaaacaaaaccttcaacaacgatcaattctggcttcctggatgccctcctccccgacttgacttgaaatgaaattgcctcgccagtattttatatctactttttaagggaggtgacttcaagaccattgggaatgacgaaaaatttaaaattatcattagttcctctctctccccgccccctgcccgggattccctctttgctaatgacgctggaaagcggctccactggctgcgtttctcttcttccactcttgcggcaacacactgttccgcgcgcgtctcccggcgactgcgtttccccgagagtcggctgcgttcgtttggggatgaagtcatccctatacctagtgtgcacatcaactcgttccatcggcgcagcacgctgggattcctcgggaagaaaaggagcgaagggaacaatgatgaccatattttccatttatatgcccctcctcaactccgcaggaatcgctgggcgcagccgcggcgagggcgggcagttgggctgaccgggatgccccccgattccctcatccccgtcctgagaccgcaacagggcgggctgagcactcgccccgcgcgagggcacccggccgcgagccgacccggagtctcctggcccggccctgtgcccagtcacgcgtccaagctccccacgccggtgcctacgggtctggcgcccaggaggtctcggcgcctcggtctccgcaccgtggccgtgggggaggcctcggagctccccaagcctctggggagcgggaggcgacggggagggggccgacggtcaaggacaaccacgggcgaggaaccccggccgacaactggccggaggtgttgggcgggaggggggggtggtggcccgcccgaatcccagaggggtgcagggggcggggtagggaggcaacaaagagcctctctccgccgccgccgccgtcgcgctcgctctctcccagcctcgctctccgcagtccggcgggggcccggccgccggcgcgggggagtgcgcccggccccccgcctcccctttcctcccctccccccgcaccgccccctcgcccccgggggaaggaggggaggagggcggcgcctgcgtgttcctccgccgcgcgccccgcctcctcccgggttcctcgcggcgatcccgactctcctcccgcggctgcagcagctgccggttgcacacggcctcggcggcggcgcggcgagcgcgggcctgtggagcggcggccgggcgcgcggccccggcgggcacccctcagagggcggccgaggaagctccgggaggaggagcaggaccacgaggaggtgggaggcggcggccgcctggggaccagctccgcgcctcggcctctccgccccctccccagcctttctctcgccctcttctcccacactcccggccggcgcctcggctttgtgcgaggagatggtgtagccccctggccgccgaaggaggagccggacacttgtctcccgtctccgagctgctccccacccctggaggagagacccccccctcggctcggcgccttctgcgtctcccggctggtggggaagcctctgcgccgccggcaccatgaggtgaggggcgcgcggggcgggggccgggcgggccattgtgccgcgggagccgcgacccccgttctcctcggaccccgccttccctctcccggcccggcgcgtctcccctggtctccggtctgttcctcccccctccgccttttgtcccttccaatttctctttctttcttggaaacctccccaacccgtgtggtttgggggtctcgcttcatcgttctctcatttttcctcaaatgctcttctttcacccaggatttcccttcctaaatttaatttgcgcctggctccctcccccaagcctttgcaagcgaaacccgggagatggggaggggttcgagaatcgaagcgtgcgtgttgctgggaaacaggtattttttcgtatatatgtaaaaatttcatgcacttttgcctccgaactctcgtgtttaattaaaaaaggaagaaaagtttgaaaggtctgaaatctctgcgggtaataaagtgcctctggtaggggtaggtgaaggagctgtgaaaggtgaaatttcacgatggtgggggaagggaaagaattgattaggttcacgtggtgggggcagtaaaagactgggataagtaagttggtaggggtgtgtaagcgggggcggggaagggatctgtttggaaaagccttttctcccctttctctgtagcagcctgtgttgcattgcagcagctgctttttccctttgctctgtactcaataaaacaggagctaaattatttttgcggccccgaagaattgaatgtactgtcgtaaaatatttttttaattgatacgatgaaacatatggtatgatatttttctttattgtttctcaaattgtgtaggagaataaaccgtgatgtggtgtgtcattcattggagattttttttccagcctttcctaaacctgttctgtgtccataaccttctcttttcggattggtgcaagacttcgtgtgaaatgggacttggtagactgaaggctgatccattctgcgttatcatccttaaaggccttccttttgggttaaacaattgtggataaagtaaattactccatttctctctcctggaagagatagtcttacagttcatttggatttgaatctcctttgtgttaaagattaatggccaaccgttgctaagacctttataatgtaatacaatgagatttgaatgatataatctacaaattccttcgctttggcaagaaaatgtcatgtcattggaattctttctcaatttcggtagtttccattttaaactttgcttttcattttttttttctatcaaggttaaacgtgtttccattttgcttttatatatatattgtgatatatctttgttgaatttttacttaggcttactgtgaatttgaatttttttttctgattccaagttacctgtatttatgatggccttaaagagtgagtttaatgtggtgtctctaggcgactgaccccttttcccttgatgatttcacacaagttattttcaaatataagcgatgagtttaaatagtaattatagcatacgaaccaaaaaacacaatctttgtaaaatatggcttgaaaactttgagtcgtatgtttgagcatgacttctttttttttaaatcaagttactgatgtccttaaactcaggaactataatatacatactgttatatcttgtaatattatatgttgttggtttctgttttagagatctaatgccgtagggatcttgcagaccagaagttatcagttgtttcaaactttgggtaaacttatcttaacattgagaaatataaaacagggaaagttttttttttttttttttttttttttttttaaatgcagtcttgctctcttgcccaggctggagtgcagtggcgcggtctcggctcactgcaacctccgcctcctgggttcaagcgattctcctgcctcagcctcccaagtagctgggattacaggcgggtatcaccacgcccggctaattttttgtatttttagtagagacggggtttcaccatgttagccaggatggtctccaactccggacctcgtgatccaccagcttcggcctcccaaagtgctgggattacaggcgtgagccacggtgcctggccgaaagtgggttatttttaaataaaaacaggaatagttgtctaattcaaagattgtgaactaaaaaaaagttaccgttttgggtattcagtgaagtttaatcactgtcatgtatagatgtcagtctgtcacaggtaaattatgtcttcacttgaaaattccttttctaataaaaagtaacttctgtttttcaagctcttttcttgctctgttccttatgaagtgtagagagagaggaaccacgctgatgttttccagtaacgtaaatatagaacttggtacacaggtctgaaaagtttatttaagcagtctacagtaattcttcgtaggctaattttgaataagagcaggaaagagggtcagcttttcactttggaaggtactggattatttggcaggtggttaggtagtacttagatttgcttagatacctgtaaaagtgagattggtatgggataaaacgttcttgtgctgcttgcaaaagtctttggaatattctttgggatattttggtgcttaggaagtgcttttcaggttatattaatatatgcttagtcttcatgctttcaagtcctgtgggacgttaatgttagtcttttaagttgagtcctttttggttatattaagaggtagttctgatgtttcaaaggccatccagaaataggaatgcctgaacaggaatttccaattaagtcggtcagaatcctgaacagaggatatgatgaatatattacggtataactattagtggtatctgtcagatgactttaattttaggaatagcatgatcactgtgtataatcttatacagaagagaactgaataatagtttatgttcctgaaacggtcataggcatttgagtaaaatgcagtatatagatttacttgttaatattttgcttaaagatgaatatttaaaaaatgaaaaagcatattacttatacaggacagtggaaaggttgagaccaaaaagctggtacttttagtgtcctgtctgtttagttctattcttatttttcatttatgcaatgtttcaaaagtgtaagatgctttgtgattaaagtgtgcgtgtatgtatgtgaatgcgtttgtatgcatgtacatacagtgtgtgccttttaagtgcatttttaaaattagttggtttgttacttaagatttttttttttttttaactgaaagaggagcttgtctgatctaaaatagttgcatgtagcctggtggctaaggagagctcagaagattttgtatttacattcttggatccgtattaaaatagtccaggcttccactagctactctgactttctcatataaaaaggtatagtagggttatgaggatttgtccaagccatttactagctgggtgaccttgaagtaatcacattatttcactgatgcctttttaaaaaatatgtaaaaatagagataattcttaactgagtagtgaggatcaaatgataatagaaggtactttatacactggtaagccttaaatttatgttactcctcctgtttccaggcctatttctatgttagactatttgggtaaaacttctgggcagtgggctccaccttgcgaccttatttagctcaaggatgtcaaaaagaccacatttttattattttataggtgaggaagctgttcccttcttctgtgtttccttccttagggtctttgaagtatctttatttgtggtaatcataaattttatatacatttcagagtgtggtacaatcaagggtcagaagatccaggttttatatgctgacctgttaattgagtaaactggtaaaaaaaaaaaaaaaaaaggagataatcttatatttcacaggattgttttgtgaagtgtcaagtgagatatccatgaaaggatacaaatagtagtctctttgttcccatgggtcttcatttatactcgtagctgttggatgtgtgactttcccacagaggtttattttaggagcaagagccaaatcttcattttttgaatgtcagtattgtaggaatttactaagtgaataaatcttgaagaagagtgtggattaatagagaaaattcactaaagtttattcagtattcaaggtgttggataccttgttggcccagttggattaagcaaaataactatggaggcaccatttggctggtatagaagaaattacatactgaataggttttggtgatttatcttacagaaggcttaaaacaggtgattgtataacttgtaaaatatctagtctgtatcatgagtgtaagaaagatttgaaaaaatgtgatttcaatttttatatggttgtaggggagtaaaagggtatttaaaccctacttgtgccaacttaaagttgtcttttcctcttttttctcctccttgtttgaaattgatgaatggaattaagtggaagtaaaagttagagaatatgagctgaggctgtacttcagtggatgcttcttcagataagggtttacgaaattttcctgactagaaacaagaaggggactccttgtcagacctgggatatagtccttgacttgcccctaacatgctcccccaacccccttgtcccccactattcctgtgtgttccagtgcactttacatgtttttttgctattgaatttattctgtcttataattatgtggttctttttgtccctcttcattgtaagttccttgaagaggatttttatattcatggtactagcaaaatactagcatttttatattcatggtactagcaaaatacttggcaaatagtgggtggcctgtgtaagtgtttgactttgactgcgttgctcttttatagaatctgttcactagcaaccccatttttggaatacctgtagtgttctagaagctctactggatattgtagggtgtagtgtagtatttggtggatactaaatgttaataacataatttaattaagcaagcaaaaactcacatcctgactccaggaataggtgtagaatttggttttcttttgttcttttttaaattttaatttaatttttattttgtagagatgtggtcttgctatgtggaccaggcaggttttgaactcacctggccagaatttatttcttattctaacacagagcttggaagtggctacaagtgtcaggattgtctaaattctaagccctttggaggataccatgtttacttgactttatgattaaattctgaattactgaaagggccatcaatctgtttttaagtctctttgaccaaagaacttgtaaatattttcaagtaacaagcatatgcatctctattggtttaatttatttttaccccatttagtgcttgctttgttttgattctttttttgtttttgttttttgagatggagtctcactcttgcccaggctggagtgcagtggcatgatctccactcactgcagcttccgcctcctgggttcaagcaattctctagcctcagcctcccgagtagctgagactacaggcgcgtgccaccacgcccagctaattttttgtatttttagtagagatggggtttcaacatgttagccaggatggtcttgatctcctgacctcgtgatgcgcccacctcagcctcccaaagtgctgggattataggcgtgagtcaccgcccccagccctgctttgttttgattcttatcagtgcttcaaataccaatcactgggtagtgtatgatactcttgaagtattagtgtgggctgccataacaaaataccatagactgggtggcttaaacaacagaaaattattttttatttttatttattaatttttttgagacagtctcactgtgtcgcccaggctggattgcagcggctcgatctcaggttactgcaagctctgcctcccgggttcacaccattctcctgcctcagcctcctgagcaggtgggaccacaggcgcctgccaccacgcctggctaatttttttgtattttttagttgagatggggtttcactgtgttagccaggatggtcttgatctcctgacctcgtgggattacaggtgggagccacagcgcccggcctagacatttattttaaggttctggaggctggaagtcagagatcaggttgccagtatggatgggttttggtgagggttctcttcctggcttgcagaagatatccttctctctgtgtcctcacatggtagggtgggtatgggaatcctggggtcggggagatgaggggggatttctctctcctcctcatttcataaggccattaatcctattgaattagggccctgtgcttataacttaatttaacattagttacctcctaaaagccctttttccaaatagagtcacattgagggttagggtattaacatataaattttaggggaacacagttcagtctatagcagaagataactacattttttttttttgtcagtgcatacaactttggaagaaaataatttgtttaatatttaggtgaactttagataagttttgttttaagtaaccagaagttgtttactaaagaagataaattaggggggttgattgatttatacaagatatccgttaaattttctagaaatctctttacactgggaaccttctattttacaatgattaaagtaagttttattaacaggcaacttttccaaagactactttgggtatgaggcaatgtatgtatatctaagtgtagagattgaatggtgtagggtaaagaggacaggctttgaagttaactctgggtttgactctagtttgacatttactaaataatttatttttgagtgggttataaacattttttgggatcgaatatactttgtgaattatagagctgttgagaaaattaaataaaattctggcataacacttggcacacaaaatgagcttgataagagtaaatcccccacttttatgaaagtctgacatctcttaagtttatgttaagaatgtgaaaaaccatgtaagatggtgcagctgctttagaaaacagtttggcagttcctcaaaagttaaacatagagttatcgtatgacccagcaattcctttcctagaaatgaaaacatttgtccacagaaaaacttgtacacaaatgtctatagtatcgttattcataacagccaaaaagcagaaataacccaggtgtgtctgatttcatgaatagatcatcaaaatgtggtatgtccatacaacagaataatatttggccatcaaaaggaatggaattctgatacatgccacagcgtagatggaagcattatgctaagtgaaataagccagacacaaaaggcgatatatgccatgattccatttatatgaaatgcccagaatagacagatctatataataacaccagaagatctcatttgctttttacgtgagttgtttctgacatttttattactttggattaatattttgaattgacatcttcgtgctatttaaagaagagagattgaagatagaaccactggacatttctctgtagggaaacaagcacgtgggaatgctgaggtggaaaccttggtagtggtggctttgaaaggcctgaacaaattttggagctgtatcttcgtgctaaggagacagccagccatctctttggtaggcctgttgtaagtaaggatgactaaagtcaccagtaaaatgtgatgaagcaaatccatcagaatcttcagaaaacttaaatctgggtggtgattttctggggtttgtttacagtagtctcaaataccaaaagttttgtctttggggaatgaggtaatcatgatatttttaaataaactgagcccttttccagtggtaaaggccttatagaacatctggtcttggtaagaatacatctgatgatgtgaaatcaaaatgactacctttaactgtgccttagaggtcctcagtcttctgtcctttttggtatctgttacatttgcaacttggcagcgggggagctttatgaagaaccaagaacttaagtaaaataaaatgaatagctcttgaggtcaaatctcaagggagtccaaattgctccttttacagttcagtgaagggatctttttatgcagtcttaataattattatatactggttatttgaatatctgctttgttctgcagtctttctcctcctcccccaaattctcatgttagactgatattgcaagcaaaattgtgaccgttcagtttttaacaatttaagatttatgtatcttaagttttcatttaaaacttttacttacagtctacttaattgtggtctttgcacaatttttttagaattatttttagaaaaataaatcaattactgttgtccatatgtctggtcagtatttttttaaattacttttttccttccattgtaaagtagtacagattttgaacagattttagaaggtatggaaagtataaaacatttatttatgaaatgttaaatccaagccatctagtattttaatattttaatgtgtagatttctaaactttttgtagtgcatttgcagcattgcagatcattgtgcgtgtgcatatgattatatataaaagtaagattatactatttaaaaatggaattatactatatttgtattgtgtattttgtagcttgtccctttccatatatataatatctatactttttacattttattatttttattttttaaatagggtcttaaactgtcacccaggctggagtgcagtggtgcaatcatagcttactgcagcctcgaactcctgggctcaagcgatcctcccatctcagcctcctgagtagctgagactacagatgtgcgccaccacaccctctaattgttaagatttttgtgcagagacaaggtctcgctatgttgcccaggctggtcttgaactcctggcctcaagtcatcctcccacttcagcctcccaaagcactcggattacaggcatgagctgctgtgtccagccagtaattcttgttcctaactatatagctacataactttaagtgactgcataatattccattgctttggatggatgactttgtctacttaaatcttaaagatggacttttagatttgttccattatttttgttattataaaaaacactgctgtgaacatctttggttatatgtctttgtgtacatatctgatactgttttaggatacattcctagaagtaaaatcaagaagtagtgctgtgttttgtttttttttttattttttgtttctttacctttctgtatccagtctatcattgtcctaccaggtcaccttcacttgcttctgtccatctcactgcctcaagtccaggccactgttatctcttacctgaactattagtgtttcctcatttccattcatgtcccctgttcttcatgcatcactcagaatactcttaaagtggaaatcagatattgttatttcccatgtaaagccttcagcggcatcttagactaaaacccaaatttgtcataaaaccaaaattattaaggtcttgcgtgacctggctctgcattccaagttcccagcacaggcctctgtgagtatgcataagtatttgagtgaataataaacaaaatgactaaagggagttgtatcagtttttgatacacgttaccagataagcaagagtagatgagatttctagttaccccacattctggccagctcaggccattatcggtcttttaatctttgccaatgtgataggtaaaaggtgttacctcattggtttaatttgtatttctttgattacctgtagggtctctttgtttgtttattggacagctttatttttgtgtggatgtctgttcatgtgctttttctgttttcccaatgagatgtgtagtttttcttctaatgatttataataatgaggatattaactcttcatagtgcatatacatatatcgtatccgatattactgctgtttaacaaagcatctcaaagcctagtaaagctgttacccgggctggagtgcagtggtacaatcatagcttactgcaacctcgaactcctgggctcaagtgatcctcccacctcagcttcctgagtagctgagactgcagatgtgctacggattggctgggcagctcttcttacctggactcattcgtgtgttttccttcacttaggttcatctggtgtgtctatcccatccctctgcctcatcgctcacttaacaatagcagcctcctcatgacaacatgccctagtatgaaagctcttaccagacctcagcttgcatcctgtttgcttatgtttctttggccaaaacaagtcatatggtcaagcccaaagtcagtgggggaggtgattacacaaggacagatcaagaggtgcgattcattggtggtcataatgtaaactttactatatgtatcttctttttttttttttttttcctgagatggagtctcactctttctcacccaggctggagtgtgtgcagtcatgcgatttcggctcactgcaacctctgcctcctgggttcaaacagtcctcccatttcagtctcctgagtagctaggattacaggtgtgcgtcaccatgcctggctaatttttttgtatttgttcttatttttatttttgagatggagtcttgctgtgtcccccaggccggagtgcagtggtgcagtcttggctcactgcaacctctgcttcccgggttcaagtgattctcctgcctcagcctcccaagtagctggaattacagatgcacgagaccacgcccaggtaatttttgtatttttagtagagacagggtttcaccatgttggccgggctggtcttgaactcctgacctcaggtgatctgcctgcctcggcctcccaaagtgctgggattacaggtgtgagccacggcgtccagctttttttgtgtttttagtagagatggggtttcatcatgttggccaggctggtctcgaactccggacctcacgtgatctgcccgcctcagcctcctaaagtgctaggattacaaacatgagccaccatgttcagccttgtatcttcggtaatactgagttttccattctttttttcatctgtatattaagatttaaaattttatctttagtgaagtgtgcggcaactcattggttttttttaattaaaaacttttttttttttttttttttagagatggagtcttgctgtgttgctcaagttagtcttcaactcttggccttgagtgatctgtttgccttgacctcccaaagtgctgggattactgaaccacagtgcttggcttagtttctagtttaatgggttcgacatggtacctttaaaaaaacatgtttagaaggaaaatgcataattttttactatatagacatcatataaaagcatatataatatgcttttagctttcttttttatcgttaagtacatttgttctcatttttctttgtcttaattttatttaaaatgtgtgtacttgtatttggccgggcgcggtggctcatgcctgtaatcccagcactttgggaggctgaggcgggtggatcacgaggtcaggatattgagaccatcctggctaacacggtgaaaccctgtctctactaaaaatacaaaaaattagtcaggcgtggtggcgggcgcctgtagtcccagctactcgggaggcggagcttgcagtgagccgagatcgcgccattgcactccagcctgggcaacagaacgagactctgtctcaaaaaaaaaaaaaaaaaaaagtatgtacttgtatttaaaccataaagcttgtgtttttaaaaatgtttttcctttgctaattaacttaatttcagtgttggcatttatattcttcagttttcttagagtttaaaaaaaatgtaatcgctgttattgagtacttactgtatgaaacctttattaactcatttaacactgatagaactgttatctccattttatagatgaggaaattaagccacagagagttaagtgacttgcccagggtcacccagttagtagagagtggaactgggattccatctcaggcagtcaggttccagagcccatggtttttaaccagtaagctctcatacataactgtttgtaatggttaacttttgaactgaagcttatatttgaattttccaaatgttaatgtgtgagtgagtaatttatttttccttgtgatttcattgtttagggggtctttactttctgaaaataattggcgtaagaacaagatcttgtaggatgaattgacctagaacatttcagagataatagtacatagttggggtggggagaaaaggctttatttgggtttaatcttgaaaaatgaaacaaaactatgaaaacattcatgttatggttgcaactatgtgttaaattattagaatgaaagaagaatgaatcaagtgttggttgcttaaaaaattttacataatttttctgagaaaattgtaagatcacatgaaactatccatgttatgatggacttttgcagtatgatcataaagacagtcctttttgccaaaatattcaagggcttcattagttttcctaactttgattttcagattttcttttgacctcctggtaatctcatctttgttagttctccagttattaatttacaatctgttaaaatgctttcagctccaagtaactgtttaagacttaaagtgcttaaatattgagaaaatttatcccatataattagaggtccagaggtaaggtagactccacacatactacagtcagtgggtcactgatgtctttgaggacacgggtacattttgccatctttggtgttcagtcatctttatattggtaacaagtggaccatagggcttccaggattcacattgagacccagtaattcttggaggaagtaggaccatccttcttgtgtgtgtgtgtgtgtgtgtgtgtgtgtgtgtgtgtgtttaatcccgccatagtccattttgtgctgctataacagataccacagactgggtaatttataaaggaaagagatttatgtggttcacagttcggaggctgagaagtccaagatcaaggggttgcatctggtgagggccttcttgctgtctcataacatggtggaaggcatctcagagcaagatggtgtatgctcaaaacagaaaaaaggggttgaattcctgtggtaactaacccactcccatcataatgttattaatcgattgatgggggtggaatgcccatggccgaatcacttcttagtactgttacagttaaatttcaacatgagtttcaagattcaaaccatagcagctctcttaaggtatcatttacatacagctaaatgcataaatcatgtatacatatagcttggtacatttttactatgtatacatacctgtgtagccaccaaccaggtctggatatagaacacacttaggccattaagttccctcatgccccttcccagtcagtatctttccaaatactcatttttttcagttgctttgtaaagagttttcatcattttcagtgacttcataaaggcctacatcttttggaatgtttgcactttcactttgtagatgatatgcattgtgttgctttgtaattgaaataacctgtcaatcattgagagactgacagggcaaaggtgaaatggcctgacatagaggctaatgctgctttgggagggatgtttaatggggactgatattataaatgtttagttcattagcggatatttttgtgttaagaatacttttgcttccctggcaacttctgtgtctgataatgaactttgattttaagacccttgtacctattttgttctgtattacatttttacatatatgtcgttatagattctctaatttattgcattggtctattattcctatgcaatctgttagctgtgagccgttagatctttatgaaatttagatttgatcagctcagccttgagtctgaactacttcagtgccttcccattgctcttggaattaagaccaagctccactaagctcctcctcattatggcctaagtcctgcacaattttactttctcagtgattccaaagtaagtaaaatgacccaataagaaaaatcctcaacaataacttacaaaaaagtaaaaatgtgcataggtatgacccattgccttagacttacagtttagtgggggaggagacattaattttcaagagctggcagagcatagtggctcatgcctataatcccagcagtttgggaggccgaggtgggtggatcagttgagcccaagagttcaagaccagcttaggcaacatggtctatctctacaaaaaatacaaaaaataatattagctgggtgtggtggtgcacacctgtagtcctagctatactcaggagattgaggtaggaggatcacttgagcctggaatgttgaggctgcttttttttcaaggtgtttgcattttggggttagtcaagtttaatagaatcagcattgacttcagagccattctgctatttactggctgtgagaccttgactttcccaaaccttaatttctttttttgcaaaatgggattaataattcattgccttgttttgaaatttgctataatgtagttagagtttttatggattgggcatattctgtttattgttttctttgtattgtaccatgagattaaaacaaaaaataaagttcaagcttctgaatgttgttttgccctttttgcttgcttgctttttcttgttttgagacaaggcctgactgttacacaggctgaaatgcagtggcgcgatcatagctcactgcaacctggaactcctgggctcaagccatccttgcacctcggcttcctaagtagctgggactataggcacctgccatcacacccactgttgccttttttaacttaatatgaaagtttctgttttttaggcactctgaaagcaaatagccagttaaattcttagagtacctgtattttaaaatgatgtttataatttaagatgaatatttaaattaaaaaccagcacccagacatagaatggttatttgcattacttagaactaagttctccccctagatctgtcaccctaccttcccttcataatgtgtggttcccgtgtggtcagccatcctgtctaaactttctcctgaaaaaaaggccatgcacggtggctcacgcctgtaatcccagcactttgggaggctgaggcgggtggatcatttgaggccaggagttctagaccagcctggctaactggtgaaaccccgtctctactaaaaatacaaaaattagctgggcgtgatggcgcatgcctataatcccagctactcgggaggctgaggcatgagaatagttagaacccgggagacagaggttgcagtgagcagagattgcaccacttcactccagcctgggcgacagagtgagaccctgtctcacaaccaagcaacaacaacagaaaacaaaaaaaaaatctactgaagaaaccttcccctgcaccctggagcacacagaagagatgtcttaacttggcattcagggccctcgagaaacagttcagcagtgcctttcaatactccccatgtgaattcacttcagaatggtcgtttattgttttccaaaggtaccagtgaagttgcggtttcattacttttattctgtctgtcttctggaaagctgccttctctgtgctcacctcaatcccattcttgctttagtttcctcttctggtttgtctttagtgattgttccaggctgagtctctctcttttcatagtttttgtcgactagctcttttggtgtgtcatacatacatttttcccttaaaaaaacggagtataaactcatgacacatttctctgaacactttatatcatgctgggttcaatgagacactattaataacttttttgaataaattaaaaaactaaactcatgactattgattgtttttggccttctcattttattctttatttgttgtagagatgagtgtcttgctgtgttgcccaggttggtctcaaattcctggcttctaacgatcctcccacctcagtcttccaaagtgctggaattacggctgtgagccactgcaccctcattttattctttagctaaatcatctgatttttaataaaggtattgggacagtactttaaacaattttatattgtacataggatgttttggtaagtgacaaagtgaaggtgtcatggtataacattttaaccaaaattttcaatatgcacttgaaaatataaagacaagacatcaaatatatttggttttatttttcctgcctggaaatgttatacaaaataagaatcttgtcacccagtcagcagttctgtttccctgtaacatattgactgttagttttttctgagtctgtaaaaagttaactaaaattagaaactaatacagtaagggctttacaaaaactttacataaatttatgcagatcttgggtacacttctgaggtaggcagttaattttttgtgacctccacatctactcttcccctgttttcataaatgctcctatcattattagccagggttctctagagaaacagaaccagtatttgtttatttaaaggaattggcttacatgattatgggagctggtaagtctgaaaattgtaaggccaacaggcaggctggaaactcaggcaagaattgatgttgcatcttgagtctgaaatttgcagagcaagtcagtaagctggaaactcaaaacaggaggatttctgtattacagttttgaggcagaattgctttctctggcttgggtttgctggcagtctttggcattcctgggcttctaggtccatcacttcagtctcatgcttctgcagtcacatggctgtcttttcctgtctgtcttcagttgatgttttcttcctcttataaagacaccagccatattggattaaggggtccactctactctggtgtgacctcatcttaactaattacatctgcaaagaccctgcttgtaaaagaggtcacattgtgatatactgagggttaggacttcaacatcaacttcttgcctgagtttcctctttgagtatggaccacagtggtctcattcatctctctcattagtcagatgaactaattgtctcaggtgacagatacagagggagacatgcatgtacacaataaaaataaatatatgcaaagattccacagtaaagcagctggagctaatgaacgacttcagcaaagttgcagggtacaagatcgtcacacaaaaatcagttatttctatacacctacgataaacaactgaaaaaaattaaaccagtttcaggctaggtgtggtggcttgtgcctataattcccagcaatttgggaggctatgatgggaggatcacttgaggccaggaatttgagaccagcctgggcaacatagactgtttctttaaaaataaattttatataaaaacaatttcacttacagtagcatctaaagaaataaacacctaggaataaatttaaccaaggaagtaaaagacttgtacactgaaactataaaatattgttgaaagaaaagacttcaataaataaaaagactttgtcttcataaatttgatattgacttgataattgttaagatgtgatagttgataagacttgatattgttaaggtgacagtactacttaaattgatatgcagacacaacgtaatccttatcaaaatcccaatggcgttttttgcaaaaataattcatatggaatttcaagggaccccaaatagccaaaataatcttgagaaagaacagagttggaggagacacttcccgatttcaaaacttaactttgcagttacagtaatcaaaacaggtaaaggcatagtaaggcatagtaaggacatacctatagaccagacctacagaccagtgaatagaatagagagcccagtaaaccctcacattcaatagatttttgatgacagtgacaagaactttctcctgagagaagggataatcttttcaaatgacactagggaaatgatattcgcaggtcttttcaaagagagtttagtgtttttttcttaaaacatcagtgcctactttcagagtttctcaacctcaacattattgatgtttggggccagataattccctgttacagggttgtactgtgaattgtgggatgttcagcagtatccctagtttgtacccaccaaataccagtagtacacaccttaacctttctctcccagaagagacaaccagaatgtctctacatactgccagatgtttatgagggctaaaatcactcttggagaacctctttaaattctgtaaaatgtcagcaactactatataagttacacattttaaaaaatatgttcaacatattttaaactcttaaatgctttaagtgagatgaggtggcattcatgccgtttcctacttttattacaaaatgcacatatctgtttggttgcttagactttaatagactagcctagtaccccaaccacaatttataagcagtttcaagaaagaaaatcagtttgtatcctaaaaatcataagctcatttataaattggaactgactaaagaaaaaaaatcagcttttgaattttaacgtaagtgaaatggaaaaaataaaacacttttaaagaagttgaggtacttcattgttaatttattgcaaatacttaaaataaacttatttttaaagattagcttttgagttccaaagacctgatattaaatgtccttactgatccagaggcctcatagctgaatatccaaaacatgcatgccacagggtataagtccttcgccacagaccagagcatctctgaggctaacctttgggtaatgtttgttcacacctggtgcaaattaagtggtctaaccaattatatatgataactttgataaataatattaatagatattatttgttgaatatttaaagataggccaggcaacttcacatggatcatttcatttaatggattcgaataagccatgagattcatgtcgtcattgctgttttacagtgtaggaaaccaaggcttaggatacttaagtgacttggctggagtcatacagtagataaatgacagctgaaattcagatctaagtcctgcgtaactccaaagtccttgctcttaatactttctatagcctcttattttacctttcaatgctgtttctcaaatttcatttttcatccttaagatcacatccaatgctgtctcaagtctcatgttggagtttgtgttggaagcagtaggaaataatggcagttgggctggggtgttaaagactttgagtgacagttggctgggtgcggtggctcacacctgtaatcccagcacttcgggaggcagaggcaggtggatcacgaggtcaggagatcaagaccatcctcgctaacatggtgaaaccccgtctctaataaaaatacaaaaaaaaaaaaaattagccaggtgtggtggcaggtgcctgtagttccagctattcaggaggctgaggcaggagaatggtgtgaacctgggaggtggagcttacagtgagccgagattgcgccactgcacttcagcctgggcactgggcgacagagcaagactccatctcaaaaaaaaaaaaaagactttgagtgacagtttaaggaacagaactaacatgccacatacttcctgtacattatgtcttccagtccgtaagccaccatacagggaacatgtcttcattaatgtcaagcctgcatggttagtaagtagtggcacctagacctgaacccagctttgtctcatttccaagcctatatgcaccttaccctaagtgttttattcaaaataatttgaacttttccactggattaatgacttccagtttgtgagccctggggggcgtctgcgccattcctttaaagaatagttgaacccctaggtatagcaagatttgtctgtaatccaaagatgccagcctttacatgcattatatttcaactatatgtagatgcttttctgataatgtatagattcatttaaaagcttgcaaatataatgtgcttttaaatcacattttttcagtcaacatatacagtattaaaagtagagcaattattcatgaagttaaaaggtcttttcatctttggaaatgttgagaaccactttttttttttttttttgagacggagtctcgctgtgtcacccaggttggagtgccatggcgtgatcttggctctctgcagcctccgcctcctaggttcaagagattctcctgcctcagtctcctgagtagctgagattacaggcgcctgccactatgcccaactaatttttgtattttcagtagagatgggatttctccacttggccaggctggtcttgaattcctgacctcaggtgatctgcccgctttggcctcccaaagtgctgggattacaggtgtgagcccctgcacccagctgagaaccactgttctacatagatgttttctctatttaatctgtttcttaggcggagattggcagccatttaacattctcaaaataaaggaggaaacctctaaacaatgaaagtatttaaagctaccgcaagaataactgcaatcttgttttttgttctctaggtgaagtagaattttgtgaaaaaacaaaaatgttttgtgaattgttactagttacctacaaaggcaatccataaaaatagtacaaacaaattgtgagtaggagaaaaacttaaactgttaagacattatagtcttttcttataaattataatttttagaaaataaactgaagggatcaaatgatgtctttaaaattaggaaacaaaatctgtgggtatgctattacctaggattaaaaaaacaaaacaaaacaaaacaactaactcttgctagatgatgctttcaaaagaaatgtagtccaaaaatgagcactggcactttttgctggtacatggagaaactttgagagtgaaggcatattaatactttcaagttgtaaataggctggaatttgggcttgtgattttatagttttagaatttatatcattagacttttaatattggatattagtttatgccttttttttttttttttttgagagatggtgtcttgctctgtcactcaggctggagtgtagtggtgcgatctcagctcaccgcaacctccgccttccaagttcaagtgattctcttgcctcagcttcccaagtagctgggactacaggcgtgtgccaccacgtccagccaatttttttttttttttatagtagagacagtttcactatatgttggtcaggctggtctcaaactcctgacctcaggtgatccatgcgcctcccaaagtgctgggattacaggcatgagccaaagtccctggcctttgtacagatttgttttgcatacttctcagccttggtggggttaattgtggcttggcaaatcaagaaaaggagttctgtgctgttttcagactgcagaatcttgttgctatgcaacaaaaattgtcagtcagtatagggtatagtaaattggtattctctgtcccttttcaccacatgctcattttgtaatctgagagaagtggtttggggctagtttgcaaggttttattttaaaacaagcatttaaaaaattttgttgctatttgtaattggttatatttaaggtcggtgaagtctttctgtacttactagaagatacaataaaatgctagtgttcaaagggtttatagatctgtttccaagttgtttcaggttagagcagtgtatttttgttttgttgctgtaacaggggtaatattgccaacttccaaagagtaaattttagcttgagaattcaagttgtataatttgaacatcagaagtttattgtaagcacatcatattatttttaaatttatttatgaaaaacatgaacccaaaaaacccttttattgataaagttttttaaataggaaccctaaacttgtatgaagtctcatgtatgataatttattttctgccaggagaaattaaaatgcctttatagcaaatgggtgatggctaatagccttctaaaaattgtgataaaatatatataacacaaaatttacaattttaaccatttcgagtgtttcacatagttgtgcaaatatcaactgttcatctcctggataacaaccttttgcatcccatttagtaacttagtccagactgtcttctaaatcctttaattcgtttaatcttcgtaagaaccctatatgtacgagaagtacttttgttccaaatgagaagagtgaggcacaaaaaggaacacaaaagtagtaattagtggagccggaattcaaacaccaacagtccaactcttctgtgctctcaactattatgctatgttaccctcttttggaattactttcttttttgtttagtggttaagagcattgatttaaaaaaaaaattactttctgtagcttttccaagtaaagttaatacagtttaacagcattttggactgttaacaaatttagtttggctataaatccctgcaatcttctagacattttttttctaaatatttcaaaaggatgcagtttatgttattttatattgtgttatttgtatatgaaattatacatattatggttaattatatagaaaggacttactttcctttttcagtttgtttctggaccatttttcatgccattccttccaatagagaatgcaaatcattttctggtcatttaatgtaaataggaaggtacacttgctgttagagaattttaatatgatgccatccaaagactaaagccagttggcattggatcatccacttagtattctctaaatttatgatcttctttttcacgaataatctggagttaattgtagtattggcagtttagaataaagagcaatagggaggagtaaaaagggagaaaaacattgcaaggagtcattaacttccaattgatgaatagggatgagtttttgcagactctgctttttttctgccatgtaatatctctactaccattcttaagcatccttaaggagcttactttcctttgattttttttccccaccttctacttttttttttttttctgggacagtgtctcactctgttgcccaggctggagtgcagtggcatgatctcggctcactgcaacctccgcttcccagattcaagcaattctcctacctcagcctcccgagtagctgggattacaggtgcactccactaccacctggctgatttttgcatttttagtagaggtggggtttcaccatgttggccaggctggtcacgaattcctgacctcaaatgatccacctgccttggcctcccaaagtgctgggattataggcgtgagccacagcgcccagcctttccctgccttcttttctttcttccgagatggagtcttgctctgtcacccaggctgaagtgcagtggcgtgatctcggctcactgcaacctctgcctcccggattcaagcgattctcctgacccagcttcccaagtagctggtgttacaggcactgtccaccacgcccatctaatttttgtattcttagtagagatggggttttaccatgttggccaggctggtcccgaactcttgacctcgttatctgcccgcctcggcctcccaaagtcctgggattacagttgtaagccactgcgcttggcccatatttctgtcttgctcaaccagacttactctctagtcagtttgcttttcatatctgttcacagttgcaccatcttttttttttttttttgagacggagtttcgctcttgttgcccaggttggagtgcaatgacgcgatctccactcaccacaacctccgcctcccaggttcaagcagttctctgcttcagcctcccgagtagctgggattacaggcatgcaccaccacgcccggctatttttgtatttttagtagagatggggtttttccatgttgaggctggtctcgaactcctgacctcaggtgatctgcccaccttggcctcccaaagtgctgggattccaggcgtgagccactgtgcccggcctagttgcaccatcttttaaaaaaatgttcttcttttatttttgtgcatttatatatgtgtgattatacttgatacattttttgccttgttcatttgatatgttttgcattttctatgttttttaaaaacttagaattttattagttgcatatttcactgtaatttacttacttcctttaaaatggctatttatgtggtttacagggattttgtgtaatgaataatgctttcatgaacccaaaggtttttttcccctcctaattgcagactaattccttaagatggatttccagaaatagtattagatccctgaaggaatagaaacgattttaaaagctcttgaatcttattgccaaaatgctttccaaaagtgttgtaccagttttcatgccagccagcaaatatatggagtgtccatttcacctcagccagcaataggagggaatgttttgatgctgacctttaaatctaagaagaattgatttacagctctgctgagcttctatcctgaattacacccagaattataatcgtggttgagattggattagaaagaaggaaagcctggtttaccagtttctgccccttcagctgcttatattctgttttgcccagttaaggtgaattcttttggaaacatgaagtaactgcccttttctgcttttcagcccccttaattattttgataagttggtgggggacaaaacagtgtatgtttataagttggtaggggacaaaacagtgtatgtttcacatgacatttcccttgagagctggggtaggtttggctctcttctccactccaccactgggcttggtgtgtctggaggcgtctgaaagttacattcagtagccaccttgtccaggggtgctaattagatgtagcctgagtcactgctacttctttagctaggaaatcattaacaactctggaggtaaagtagcttttccctaagaacttgttagataatttagtattaagtatggaaaattttctccctgaatagaaggagggtcaggggacaccattcctactgaaagttgataacagggaggtcttatctggtctcctctggcctcataacagcactcagcacagttgaccattctggcctcgagccactttgcagtgattttaagctcccttggttctctccttatctcattggctgtatcttgttcctttcctcccttttcattttcttctccccatcagtcttcccctcctccacaatgttactccctgggctttacaacctgtgtgctgcttattcctagatttattttttacctggctcttgctcctgagccctagataaataagctggcatcttaattctctttgtataactaataggcactttaaataccacgtgtccaaatcagggtgttgtgatattttcatacaagtttatacttaggtgtttcagtaacatttttcccaaagtttcagacataaaaataacgcagggggctaaattataaataatatcaatttaagacacattgtattaaaactgtctttctcattttgtaaactgtagagcccataatttttcttttgataggccagaagaaagtttacctatttccttcccaatgactgagaacaaaaattctcactagaggattttatttgtgtgtttttctcatatgatatgtacttgtgtcgtgaaataccattcctctttctcagtttagtgtctcatatgtcagctgacaatgatttgaactgtattgcatggtgatacaacttgtccactcagctcattttcactagtatcagtgcctttgtagtgtatttatttgaacgctattgtggttttgcctttataaaaataactagagaatagaagaaaggaaatgttaatgctaacacagttgagataaagatggaagtcacttggttttccaaaagtggtaattctttggtgttgtagtctgttcttgctgctataacacaacatcttagactgggtaatttataaacacaaatttatttctcacagttttggagcctgggaagcccaatattaagttgccaagagattcagtgtttggttgaatgctgctctctgcttcatagatggcgccttgttgctgcattctcacatggtagaaggcacaaaggcaggagggcctagctcttttttaagggcataaatgccattcacgaggttggaggccttgtgacctattcacctcccaaaggccccaccttgcaatatcatcaccttggtgattagtttcaacatagggattttggagagacacatacattcaaactgtagcatttaacctcagtagaacgatacccagtttgtacttaagctgactgtttatcagacaagatttttttgttggcactgatagaaactcaagttagttctcctggtagaggcaaagtgagagttgctggagctagggcagcttgaggacctcaaagatgagaacagagctgaccattttggttaaataggactctttcatatttgcttagctttattttttttccctgcagtctttcttcatggtttttctagattcccattattccagctttcataaatggagagtcaaaggatgtttcctgtaatcttcagggaggaaaatcctgaaaaagactggtaaagtccaacttgcatctttgtcccttcttctttaatgggggatgaggtactgtggtgggcaccaatgggtagaaggaacagagttctaaaatggaagaaggaatgctggcaatggatatctactatgataattcaactaaagaggacaatagcaaaattaagttatatttaaaaaatacaggaggccaggtgtggtggctcatgcctgtaatcccagcactttgggaggccgaggtgggtggatcacctggggtcaggagtttgagaccagtctgaccaacatggtgaaaccctgtctctctaaaaatacaaacaattagccgggcacgttggcacatgcctgtaatcctagctagttgggaggctgagaatcgcttgaacccaggaggtggaggttggggtgagctgagatcatgtcattacactgcagcctgggcaacaagagcgaaattccatctcaaaaaataaacaaaaatacaggaaacgtgttgactgttttagtaatctgttatattgacaggaccatagagtttgtggaggaatgtagcttgcacgacttctttttttaaaaagaagaaaaggcaggagttcaactatgtcttaagatatttcttaaagaaaattggtaagacaacatctcatttcttgcaaagtctctgagcagttttttaaaaattatttttgtctgctaaatattgctttaggtgtgccaagaagactagaatttgagctaagaatttaagaaaattaactttatctgcatttcatatttactttatcttgttttaaatgattgcttataccctagcttttaaaactaaacattcatagcctaaggatttttcatatcttttgactcttggaatgaaaacccattttgaaattaagtctatcgctcagctcttctgctttcacatgcttttcaggaacaggttatgtgtgagaatagggacactggaattccgaacatctgacatccccattgttgaccacagttctccaccatgagctctatctgtcacattaaggggtcagctgtttcacatcccaccaggttaggtgagcacatagtccttagctttcccacttatttggtgatgcagtgatgtagaaaccatgtaagattgtgacctgggaagaatcaaccctgtgacagataacaaaagcagaatcctggggcattttccttttaggggaccttaatctgggcttcttcatccccggtggatagagtccagtgttgagatcacagcatcctttcattgtctaggacaggttgtagctaagattacagacctgcaccaccacacctggggaatttttatttatttttaaaatatttatttatttatttatttatttgttgattgatttagtggcagggtcttactctgtcgcccaggttggaatgcagtggtgcaatctcagctcactgcaacttctgcctcccaggttcaagcgattctccttcctcagcctcccaagtagctggtattacaggcgcctaccaccccacccagctaattcttatagttttagtatagacgcggtttcaccatgttggccaggctggtctcaaacttctgacctcaagtgatctgtctgcctcagcctcccaaaatgctgggattacaggtgtgaggcaccatgcctggccatatttatttttaaaatatttctttgtccttttcttcctctaccagctaatcttaaattttttttttctaaagacagggtcttgctgtgttgcccaggctggtcttgaactcctggccttaagcaattctcctgccttggcctcccaaagtgctggaattatagacatcagccactgtacccaacctatgaagcttttagtatttaaagtttttatgtttttcaagagatttgttgcagccataaaaaagaacaaaatcatgttctttgcagctggaggccgttagcctaagcaaattaatatagaaacaaaaaaccaaataaccgcatgttctcacttataagtaggagctaaacattggttacacacagacacaaagatgggaacaataaacactggggattccaaaagcaggggaggaagtcaagagtgaaaaactacttatcgggtactgactgggcccggtggctcacgcctgtaatcccagcactttgggaggccgatgtaggtggatcacaaggtcaggagagcgagaccatcctggctaacacagtgaaaccacatctctactaaaaatacaagaaaaaaattagccgggcgtggtggcaggcgcctgtaatcccagctactcaggaggctgaggcaggagaatggtgtgaacccaggaggcggagcttgcagtgagccgagattgcaccactgcactccagcctgggcgacagagcaagactccgtctcaaaaaaaaaaaaaaaacccaacaaaaaaacactacttgtcgggtactatgttcacaacttggggggcaggaagcccaaacctcagcatcatgcagtgtacctgtgtaacaaacctgcatacccctgaatctaaaaaaaagaaaaatttgttaatggaagtattatcatatttttgaatatacaagtgaaattatgagtctttgctgataaagacttaatttctttttttcttttctcagtcaccaggttagtactggtgagctcaacaacataaatgagatagcctgtaatctaacagccttagaggaagcatttttaccaatattaagccaaacagaaaaattgggaaatataatttagaaaaacaagggaatgaatttactttgctaattatagacaaaattaaaaccacctttgttttatttttctctaagcctgttttttcagagatctcttaaatccgtagtaagaactctagtgtcttgaaaaattctatctgcctttcttttgcattttagcataatccagaaccttttctgtaataaaaagttcccctacttttaaagccttaacttgcaagtttttctgtttcaagttgagaaggttctgtaaactgggccatggtgggggtgctggagtggaggatttctctttatgtcttatccctgtgcccctcactgcttctagttttttccttttgaaatccatccttcgagttacttcctggtgcaaattactctctgtgatcccctatcccctagctcttataagctgcccttacatgcttaaggcttgtggttatgtcattctgccatagtgctatggtctgaatatgtgtatgctcccaagattcttaggttgaaacctacccccaaggtgatggtattaagagggtaggggctttgagaggtggttaggtcaggggagcttgctccttttgcccttctgccatatgaggacaaatagaaggtgccatccatgaacagcatgccctcaccaaacaccatatctgttggcaatttgatcttggacttccccagcctccagagctgtgagcagtacactcatgtttataaattactcagtctaaggtattttgttgtagcagcaggaacaactaagacacatagcttatcaaatatttaatacaatatataacattttaacagctttaaaaaaatagagatggggtcttgccatattgcccagtctggtctctaactcctgcgctcaaaggatcctcctgcctcagcctcccaaagtgctggattataagcttgagtcacagtgcctggccaacacctttattgaggacatacaataaatgtcacatatttaaggtgtacaatcaagatagcaaacatatccatcactcctaatatataaacatatgaacacaaatttgaagggacatcaccccataagcctaacactcaatatgtataataaccttcagtgttctttttcaatgaacataaccatggacacttttccatgttgttacatggtcttaataatagtatgactttttaaagagttgagcaatggcatgttaaaaacatgttctttacacatctaagatgatagtacatagattgtttcatgttagaagtagaaacattttcagcttcttttgaagtgagagatacgaagagggaggctatgagagaatcaaagagagcacagggagttctcagtggtctcccctcttccaaggcaaatacttctgtctccaaggactgagtagagctttgagaaggaggataggtatgtcacagagagtaactaatttctgattaggtgaaactgaagctgtgtgctgaggtaaatggtaaatttaggagtgactgcttgggatttattcagttagaggtccatgtagcaggtgggaaatgtttgtatttgatgtgtgcggttaacaaaagccaatgaagaatttgggagattgagtgactgggccattatggtgtatatgtaaaataatcttagtggttgattaagagatagatttaggccgggcgcggtggctcacgcctgtaatcccagcactttgggaggccgaggcgggcggatcacgaggtcaggagatcgagaccatcccggctaaaacggtgaaaccccgtctctactaaaaatacaaaaaattagccgggcgtagtggcgggcgcctgtagtcccagctacttgggaggctgaggcaggagaatggcgtgaacccgggaggcggagcttgcagtgagccgagatcccgccactgcactccagcctgggcgacagagcgagactgcgtctcaaaaaaaaaaaaaagagagatagatttaaagaagtaattcccatggccatactgagtcagaagggtgataagtataatgagaatggttggtgtgaaaggtcacaccaaggttctggaatttggtaataggatgatagcattgtcactcttaaaaagatgattaggcaagtggacatgggtgaagattttcccaaggagatttgttttaattcgggacacattttatcaaatgatagtatatcaccataaggaaggaggctttcaaagactacaaaggactatctccacacttttttttctttttttttgatggagtctagctctgttacccaggctggagtgcagtggtgagatggcggctgactgcagtctctgcctcccaggttcaaacgattctcttgcctcagcctcctgagtagctgggaatacaggcgcccgccaccatgcccagctaatttttgtatttttagtagatacggggtttcaccatgttggctaggctggtcttgaactcctgaccttgggtgatccgcccaccttggcctcccaaagtgctgggattacaggtgtgagccactgcacccggccctatctccacatttaaggagcttatgatctgattgaagtgaacataccttcagaaaataagatagatctgatagaaagtagcaggctgagattgaggctccagatttggtaattgtgtgaaaacaagaatgaatcaagtatcccaagttgcatggaaaagtagtgggtttgtattagaggcctgggacatttttgagacagttttgctcttattacccaggctggagtgcagtggccgatcttggctcactgcaacctccgccccctgggtacaagcgatttttcttttctgcctcagcttcccaagtagctgggactacaggcatgtggcaccacgcccagctaatttttgtatttttggtagatacggggtttcaccatgttggccaggctggtctcaatctcctgaccttgtgatctacctgccgcggcctcccaaagtgctgggattacaggtgtgaaccaccgcgcgaggcctggtacttttctagtgacgaagtgttgaaaccgctggtggtcacattgaaaagcattcagagatactagatcacattacatcttaattgcagatagttccagctttcaaatcagatttttggtaggagcttagcacatatctttctgtgggaactgtgttataatgagggctagtacgttctcaagtagtacacacaaggccatttaatgcatcgtatccttgaagtatgtgttacactattaggctaaactgtaagaaattactgtttttggaagtcacagatcaccagatgttggcagtttcacatggttcaatccggtacatttaattatcaccagacatttttttttagcttagtgaatttttaaaatttattatcatttatgtactttttatttcaatacttttagggtacaagtagtttttggtatcaccagacatttgatgtctataatttatttgggaagacactgagactgcagaattgacctgatagctgtgttttaaaagcatttctctgagaccattcagggttttaaattgggatgtctgagactgaaggcccttctgccccagggattctccttaatcccaagtttctgatgggttttctctctatagtcatcctccttcccctgatccccaaaataagactagggaggtgggagtattttagggtggtgtttctcttttctgtttttgagatggggtcttactctgttgcccaggcaggagtgcagtggcaggatctcagctcactgcaacctctgcctctcaggttcaagtgattctcctgcctcagcctcccgagtagctgggactacaggtgcttgccaccatgcccagctaattttagtattttttagtagaaacagggttttaccatgttggccaggctggtctcaaactcctgacctcaagtgatctgcccgccttggcctcccaaagtgctgggattacaggcgtgacccaccgtgattggcaagggtggtgttttgctaactgtaggttagtttttctaactgtaggtttttaacaggatttatcacaaatgaaagacaatagaaaatattcaggaaacattgcacatggtaatggcaagtgtttcatgaaacatttagtgtctgtgcatttgtgtgtgtgtgtgtgtgtactgggttgtatatgcagtgtatttatttatcacaggccttaaacatttgagtaatgctgatttgggagatgaattgatgtaggcttggcatcttggggatagaaggtaagccattgtaggggtcctcggacttctttaaccttttgccctcctattgtgggccagaaagtaggccttctctctctccactggtgccatcaaactcctctgaactctggctcatgtctttcctttacctgcatgtaacgcaatgtaatttagtatagagtagaatcctttggaatttttttaaaggtgattcctggtagttgctggtataaaggtggttaaaaacagaaaacctaaagcacagagatagtgttctcatttaagtgttttaagtagaacatgaaactttctaagttgagtttttgtagagtgatcactgagaattcatctatatttcagaggaaaacaagaaagactggtaggtaggcacttgatagatttgtggaatgggtggagacagttctgagcacctgtctaggatcagtgaactacgtattagtgaatatgaagcagaagttgatagtaggaacagagaggtgattatcttcccctttttttctgtgctgtactatcttggagaggtgaggagaaaaaggttccaaattggccactagatgattgaaagaagtccctgtggccaattttgtatctggatgaccattcttttttaagtgagatgcgtgaacctttcatataaagagctgctggcaggatattgttttattaggttttagggatattggcccatggttcactttttctttctccccagtttttggaaaagttgattgctagtaaggctgattgctttcagggaattgtcattttcctccgggggatgtttggatgagaatggagaccagtttggcaagggcaacagctgttgaacaatctgtttgggattaggtgcaagttggtatgtagtggaaatctgcctcctggttcctgaaattatgttcctttgcctcaaggataaatgttttcctgctcattccagttacattcacttagttctggctggtaatgcttctgactgataactttcctcttttaagagagcttccttgaaagaataattgatagctacgatgaacaattaaaaatgttatgccttcccttaagattttgctcaggatttaatcataggttggtggtaacagaacctttcagttcaaaattagctgtatattatctaaccattttggtaaggggagagacttaaggtgctttctgatggtttagatggcagtatcacatgagatttattcatattgtgtgttggaatgtaaattctaatgacctttggaagcattagtagtaaaatttacttagctggctattcctaagcttactagtgagttggagttgcatgcgtgaatcatacctctgaccagttgtgatgatacaaattaagttgagtttaaggaagagactaaattaattgccatcctgtcaccacactgtccacttagcactgtacagctaagatcctttcagttttttaaaaaatacttttttaataccacagatataagaacctgcaatgggtgcttttaatttgggtttatgctgacctttatgtatcagataatgtgtctaaatcctgagccaggatcctagtaaccccaatttctatctaagcatagtctaaaagctgtcactcagtactagaacgtcttttgtggtatgaaaggataatgtatagggcctggaagtacacttacatatttgcttatttggttaggttgttattttgtgaatagaatttaaattcacttttagaagtaatgtcatagttgtcagtggacatgtatatttcaactaactataaggaagacagatggaaatgtccttttctttttcgtgtctgataatgcatttgcatttgttgatctgaggtcagcacttaagttggacatcttcaaatctttttttttttttaattgagatggagccttgctgtgttgccccggctggagtgcagtggcatgatcttggctcactgcaacctctgcctcccaggttcaagcgattctcctgcctcaacctcccgagtagctgggattacaggtgcctgccaccacctctggctagtttttgtatttttagtagagacaggatttctccacttggccaggctggtcttgaactcctgacctcaggtgatctgcccgcctcagcctcgcaaagtgttgggattacaggcctgagccaccatgcctggtttcaaatcttaatttaatgggtggagttagttttccaatcactagtagaaactcagtaaccataaattttgaatgcttgtattttattggagtctggaattaccacctccagagatatttagattgactttgtagttctgattggtggtatcacttttgatttttgagcatctcaattagcttatcttttcctagaagaatattttatcttcaatttttatatatagatgcaatatataattataaatactatatataacatgtacttgtgaatccgcatttcaaccatacatcaacatagagtagttgtagttaggttcctttttaaatgtattttaatttgaaatttacttgtatgaataaactcattcattaaatttttttctcaacattatttaatattgacatattgtcaccagtgagtctgaaataattctcatgccttaaatgtgactatttcaaagtattactctttttttttttttttaagtatttattgatcattcttgggtgtttctcggaggggggatttggcagggtcataggacaatagtggagggaaggtcagcagataaacatgtgaacagggtctctggttttcctaggcagaggaccctgcggccttccgcagtgtttgtgtccctgggtacttgagattagggagtggtgatgactcttaaccagcatgctgccttcaagcatctgtttaacaaagcacatcttgctccgcccttaatccatttaaccctgagtggacacagcacatgttttagagagctcggggttgggggtaaggttatagattaacagcatcccaaggcagaagaatttttcttagtacagaacaaaatggagtctcctatgtctgcttctttctacacagacacagtaacaatctgatttctctttcttttccgcacatttccccctttttctattcgacaaaaccgccatcgtcatcatggcccgttctcaatgagctgttgggtacacctcccagacggggtggcggccgggcagaggggctcctcacttctcagacggggcggccgggcagagacgctcctcacctcccagacggggtggcggtcgggcagagacactcctcagttcccagacggggtcgcggctgggcagaggcgctcctcacatcccagacggggtggcggggcagaggcgctccccacatctcagacgccgggcggccgggcagagacgctcctcacttcccagacgggctggcagccgggaagaggcgctcctcacttcccagactgggcggccgggaagaggggctcctcacatcccagacaatgggcggccaggcagagacgctcctcacttcccagatggggtggcggccaggcagaggctgcaatctcggcactttgggaggccaaggcaggcggctgggaggtggaggttgtagcgagccgagatcacgccactgcactccagcctgggcaccattgagcactgagtgagggagactccgtctgcaatcccggcacctcgggaggccgaggcaggcagatcactcgcggtcaggagctggagaccagtcgggccaacacggcgaaaccccgtctccaccgaaaaaatacaaaaaccagtcaggcgtggcggcgcgcgcctgcaatcccaggcactccgcaggctgaggcaggagaatcaggcagggaggttgcagtgagccgagatggcggcagcacagtccagcctccgctcggcatcagagggagaccgtggagagagagggagagggagagggagagggagaccggggagagggcatcagagggagaccgtggagggagagggagaccggggagagggagagggagaaaagtattactcttaaggatttgtgtatggagaagggtattgaggttgtggaatagaggtaggattggtgttggaggaagggttacttaccttatggaatcggaaatttgagacaggtttctgagtgaaaataggtaaatgtggtattgtaatataataagaaatacatatttggtctctgttcctggttcctggcacacagctcttaaaacccttggactgaccaaagtactgtaataaatgtctttttgtatgctaatgagatgactggtggctggggctcctggatagcttcagggtgggggagctggttgctaggagaagcaaccaacctatctcctgggaggggaaggggaagagcctgaaggatgagttgataaccagtggccagtgatttaatcagtcatgtctacataatgaagcctctatacaaacccaaaggatagagtctggagagcttccagatggatgagcaagaacacatccaagtgcagcgattgggggtacatcccaggtacaggagatcagaaactcttgctcttaggacccttccagaccttccccatgtgtctcttcgtctggctattcatttgtatcctttaaaatattagtattggctgggcacagtggctcacacctgtaatcccagcactttgggaggccgaggtgggtggatcacctgaggtcaggagttcgagaccatccttgccaacatggggaaaccccgtctctactaaaaatacaaaaattagctgtgcatggtggtgggcgcctgtaatcccagctacttaggaggctgaggcaggagaatcacttgaacccagtaggtggaggttgcagtgagccgagattgtgccattgcactccagcctgggcgacagaatgagactccatctcaaaaaaaaaaaaaaatctttctaataaatgggtaaacataagtaaagtgttttcctgagttctgtgagctgctctagcaaattaaactctggggagagcttatgggaaccctgatttagagctattgggccagaagcacaggtcacaacctggggcatgagattggcattagaagttggggtggtcttctgggactgatcccttaacctatgggatgtgatgttatttccacatagtgtcagaattgagttaaatcataactcacttagtgtctgccagagaatctggtgtcaggagtgtgttgtgtgagagtagaaaaaacactgtttttttccccatctttaataataaaatatgctataaggtgtagtagagcattatcccttattaggaagagtttataattagttatttttgttgttatggctgaaccagacctttgctttgttctcagaaaatatctagcaaagttacacattttctttggttcaataagtgttgtttgttgatctagttgtatatttaaaaatagtgttaaaaataaaatatgtgcttattacacataaaattgacaaactgaaaaagtagaaggaacaagttaatcaacaaatatttattatcttcacaaatatttattattaccaccaggcactgttctctgccctggggaaatggtgttaaacaagtcatgtacccagggggcttacattctggtagctgaatggaggagaaggatgtaccaataagtctgttattctcagtaagtgtgaaaaagataaaatgtgtagtgagaaaagatgggtggtgaaggcaaggcctaacttggttggggtggtcacggaaggcttcttagggagggacgtttgagttgctctgaaagatgaggaggcagtcattggagagcagggaaaagagtactctaagcagaagaggtccaaaggccttgcaatgaaaatgagcttgctttgttcaagggacagaaagtaggaagaaaatagtgtccgtagcaaaaccataggacacatactgagtctttgtagatgtatactttggcttgtatttttagaatttgtattctgctgttttaatatttgcttcataatataaacattcttcatttcataccttagtaaacatttttagtgttgacacaattaattttgtaaatgtatcgtggttgacttacccattccccaatagtttggcatttagatccctcctcccccccttttttttgcattattgtaagtattacagtgagcactttggatataaaacttttttgcttcttacggttggtcctcagaaggcaaaatataaactggggcaaagatatgaattatttagtatttattgccagaatatttggcaaaagctttagtttatgttccaattaccaaagtgtagagagtgtttactgtatcctggccagcattaagtattatttttgttttgaaaattttttttgctgtgggaaaatgcagataacataaaatttaccatggtaaccatttaaaagtgtacaattctgtggcattaaataaatccacagtgttgtgcaaccattgccactatctacttccagaactttttcatcaccctaagtggaaaaccttgtacccaccaagcaatcatttcccaatccctgttccccatcaacccctggcagccatgaatctgctttctgtctccatggatttgcctattctggacattccatgtaaatggaattatatagtacatggctttttgtgtctggcttctgtgactaagcataaagttttcagggttcatccgtgtcatagcagtgtcagtacgtcttccctttttatggctaatattccatcgtttggatataccacattttgattatttattcatctcttgatggacattgggtcatttccaccatttagctcttgtgaatagagctgctatgaagatttatgtataagtatttgaatacctgttttcagttttttcggacatatatctaggagtggaattggccgggttacatgataggtaattttccatttagctcattgaggactggccaaactggtttccccgttggctgtgtgatttcacattctcaccagcagtggatgagggttttaatttctccatatcctcacgaatacattatttttaaattttttgtgttttgttttttatgatagccatcctagtgagtgtgatttttgatttcattgtggttttttattttcatttccctaatgactaaaaatgttcagcatctcttcatgtgcttgttggccgttgagtattatctttttctcactctgtcacctgtgctggagtgcagtggtgtgaacacagctcactgcagccttgacctcctgggctcagctgatcctcccacctcagcctcctgagtagccaggaccaaagatgtgggccaccacacctggctaattaaaaaattttttttttgtctgggcaaggtagctcatgcctgtaatcccagcactttgggaggctcgaggcaggtggatcacccgaggtcagtagttcaagaccagcctggccaacatagtgaaacctcatctctacaaaatatataaaaattagctgggcgtggtgatgcacgcttgtagtcccagctactcaggaggctgagggaggagaatcacttgaatctgggaggcagaggttgcagtgaccagagatcgcgccactgcaccccagcctgggcaacagagcaagactctgtctcaataaataaataaatacgtaaataaataaataaatttttttttttggtagagacaaggttgcccaggctggtctagaactcccaggctcatacagtccttccacctttggctcccaaagtgctgggattacagggactattatcttttttcaacttgaaatttttattgaaatataagatgtacagaaaagggcacatagcaccaactcagtacacatgtgtaaccatcactttatgccctcttctagtcacagtctttcaccaaagagtaaccccacctgacccagaacagcgtcaattagttttgcctgcttttgtactcatgtgaatagaatcacatagaacatattctgtatctgcctttttcggcctaacgttagatctgtgccgttcatctgtatcattcattttattctattgtgtgaaatactagtttattcattctaaggttgatggacatttggattggttgcagtttttggatcttataatgtcgtgaatattctgctatttgttttttcttgagcgtgtatgtgggccaaatacagcttttggagtggttgatcgtactagcgttaaaatgtcgccattggtgtaaataattcctctactttgttggctgtttcttttttttcttttaattttagttctgtttaggcatggagaagttgtaagtggttttcttttgttcatttatttggttagttttaagtttggattgtgaccccttcatccagagttttaaaattggaagtcagctctcttgagtcacataatcttggtatgaagtttaagatgaatgaaatgcaagcatacttgggaaaaaaaagaattttttttactggggacctatcgttcttttcttaccaaatgttaagagtatcccccaatatttttatagtaattataaaatcacaaatttattataaccccacagtaggtcctagagactaactggaacagaaagcaatattgttttaattgtttgatctttgagctctagtaaacttctctatcttttcttattttcttttaaaattacaaaataatgcgtacatattataaaacatttgaaagttacataagaaaatcaaaataatgtcactacttgagagaaaatcacgttagtacatacacttcctgtttgtttttaggcaatgctagttttttttttttattgaacataatgttctataatgtgatttcccctaaatatactgtgaatactttcctctgtaattaaatattattctaaagcatggttttaaaaaattagagcatgatttaaaaatttaatttttatcatgtggtatacatgtacatattaataatttatatagtcatgtagttttacaaggctaataaaaaaagtaggccgggcgcggtggctcatgcctgtaatcccagcactttgggaggctgaggcaggcggatcacttgaggccaggagttcagaccagcctggccaacatagcaaaacgctgtctctactaaaaatataaaaaattagctggggatggtggcgcatgcctgtgctcccagatactcaggaggctgggcatgagaaccacttgaacctgagaggtggatgttgcagtgagccaagatcgtgccactgcattccagcctgggcgacagagagactccatctcaaaaaaaaaaaaaaaaaaaaaaaaaaaatccatttttccctttcctgctagaatccagctctcaagaggaaccactatcaactgacatatttctttggtagtttttaatttccagataacgtgtttaaactaaccttttttgactgtttcaattttagatttatcttttgacttgccatgatggaagatagtggtttagctgttttacattctcctccccacgatgcatactttccatcttctctatatggttatataaccaattttggttaatcaaagtttatataactattcacattggagccatgctgtgtactattttaatatggttactttttttttttgaaacagctttttgttttagctggatttaatgaatctttgtgtttatttgttttccatgcattcatcacttactcagctcagactatactactaaagtttaactctccttttaatataataaacacatcaggtaatctttcagtttcttttttttttattttggatacctctaactttgtgttccagttgaactgattgccttcttggcttgcttcctggagtgggatttttaccattttcatgggaattctttcagccttattctgttgcttttcattgtagctcccttagaaataaagcatgggaagcaaattctttgagacttagaatatttaagaatatctattagagcctactcttgatagataacttggctgtatttacaagtcaaggttggaaattatttttcttcaaaattttgaaggcattactcaagtgacttgtttctagagttgctctgaaaagtctgatgtcattttgattccaagacccccctccttttttttttttttttttttttttttgagacagagtctcgctctgtcgcccaggatggagtgcaatggtgtgatctctgctcactgcaacctccgcctcccgggttcaagcgattttcctgcctcagcctcctgagtggttgggattacaggtgcctgccatcacacctggccaatttttgtattgttagtagagacggggtttcgccatgttgatgaggctggtctcgagctcctgacctcaggtaatctgcccgcctctgccttccaaagtgctcagattacaggcgtgagccacggtgcctggcctccaagacccttataagaaagctgtttttttctttctggaaacctttaggatcttctcttattcctggtgttctgaaattttataatgatatttcttaatgtgagtctttgtttaaaaaaaaaaaaaagtctgttgtgctgtgcccttgatggatctttttattttagaaacatgcccttcaatgcttagaaagttgtttctttggtaatggactctgaaaagggagaactccttgttagggggtttttgggtcttctgaattcttttatctactctttgctgtctgattttgtcttttttttttttttttttctgttttttatattccaactcctttattggatttaaagtttctgctgtctttaatttgaaaagcttttcttttgttttatgaatgtttcttttaatcattcttatttcacggatgcgtatctttttttcgaccctttgaggatattatgattctgttccttgcgttgtttctttttttcccttgctctgttttgattcctatctttcaaattaaaggttttcttaaatgtttgatgttccttgcctatctgttcagacttaagcctgaggcttttaaaaaagtttttatttttaaagcaagttgggaagtctttccatggtatgggcctgtgacatggtcttcctctctgagggatgaactggtgaatctggctttccgtggggaccctcagctgtcagtgtctccaggtctctcttttttaggctgttttgttttcctgtctaagcttgactgccagaattctgtggtgaattggggaaaaggagggtggtgggtgggtggtaagttatcattcagtatttaggcttgcatttaatccccatcatacctccctcagaatgcctttgtttacagtctctcctgtgtaaacttcccagagtaatgggctgagtgtctgatggcattgtttgggttatgatatctgggatttcgatgaatggctccgtatctagaatttcaaccaggtgttttttttttttttttttgccccccaccctgctctggattcctgaacttttctaggctttattcttggtacattccctcagtaattctgctagacagtttctgttttcttcagcctactaagtcagttacctctaatccatctgcttttcggctttcaaaattgtgcttatatctagagcaagcttgtccaacccatggcctgtgggccacatgtggcccaggatggctttgaatgtggctcaacacaaattcgtaaactttcttaaaacatgagatttttgttttgcgatttgttttttttaagctcatcagctgtcgttgttgttagtgtattttacgtgtggcccaagtcacttcttccagtgtggcccagggaagccaaaagattgcacactcctgatctagagtctgctgtagtgtcctcttctgtttgtttgtagtctctgcatttataaattatttattatttagtgttggacttgtaagaaacactctgctccactctgccgaggaaaaggtgagctattgtggtgaggccttcacaggtctgtgtgcctggcactctcagctgcattattcaggaccttgggctgtacgtagttattttattggatttgtgtgagaagggctagttttgtgattggttaagtttattgaaaaaaaattttttttttttttttttttttttttgagacagagtcttgcactgtcgtccaggatggagtgtagtggtgttatgttggctcactgcaatccctgcctcctgggttcaagggattctcctacctcagcctctcaagtagctgggactacaggtgcactccaccacgtccagctagtttctgcatttttagtagagatgaggttttgccatgttgactaaggctggtctcctggcctcaactgatctgcctgccttggcctcccaaagtgttagaattataggcgtgaaccgctgcatctggccaaaagttgacttattttgaatggactacattatagcttaactagattgtacgagtgcttatcaactaatatgttaaaatatggtaattcctttttttttttttttgagatggagtcttgctctgtgttgcccaggctggagtgcagtggtgcgttctcagctcactgcaacctctgcctcctgggttcaagcaattctgcctcagcctcccgagtagctgggattacaggtgcctgccaccacgcatggctaatttttatatttttagtagaaatggggttttgctgtgttggccaggctggtctcgaactcctgaactcagatgatccacctgcctcggccttccaaagtgctgggattacaggcatgagccactgcacctggccaaaatatggtaattctaataggtcacattcaggtgtattttttttaatggtctaatataacattaaaagtatttgtgaaaaattccattttggtattttaagcataatctatccaaaaggaacattaaaaaataataataaaaggggaatgtgaggtttaggtttttaagatgttcagtatttttaggtaagagtgttgtagtagtttgctagggctgccatgacaaaataccacagacccagtggcttaaacagtactttcctcacaattctgaaggctagaaggtcaaggtgttggcagggttggttccttctgaagcctctttcttggcttgcagatggctctccttctctgtccacagtgatcttccctctgtgtgtgtctgtcctaatcttcttataagggcaccattcatattggattagggcccacctgtatactcagtttacctcagttacctctttaaggccctgtcttcaaatacagtcacattctgaggtaatgggggtaaggattttcacatgtgaatttggtgggtgttggaggggcacagctcagcacataacaaatatttttattatctcatgcatttaaaggagtatcatttctgatacacttcagaaaggaatgtattagtgtgatgaagtggaaataactcggacattgtagtcagataggtaggcctggtttgaactctagccttgcctcttaatagttccctaaatttttgtaacttctctgagacttgcttccaaatctatgaactgggagtaactgtacatcacagaatgatggtaagaaattaaggacgatgtatgttaaaagtgcctgacatcgagttgacttctaaatattatgttcttactggtcttttctctcccccactccccaaagtagtgttttgtatccttcccccttatttaatatcagaaggtgtcaatttcgagtgtagatatgtatcattttaaaattgcttagtctttctattcacaagtggttgaatatcagcagtttcttaagattcaatctacaattgtatttacccagtcgcttgtcagaatttccaatcatcatgtagttcagtttaacattttacatgctttaagtgaaacctacagaagtgtaatctgctgagtcagtggatattcacgtttcaaaggttcttgatgcataaggacaagagcctttgcttttttatcagcaaggtatgaggatgcccttttcccactctaacattactgttttctcctaagtatcaaagtctaaaaggatatcttgttttatttaacttgcatttctttactagctagctttaatgtttttcatatctttatcagccctctctaaatcttttatcaattgtcctttttttgtttgtttttgtttgagacagggtcttgctgtgttgcccaggctggagtgcaatggcgcaatctcggcttactgcaacccctgcctcatgggcttaagcgattctcctgcctcagcctcccaagtagctgggactacaggcacccaccaccatgcctggctaattttttttttttttttttttttggtagagacggggttttaccatgttggccaggctggtctcgaactcctgacctcaagtgatctgcccgcctcggcctcctaaagtgctgagattacaggcgtgagccactgcgcctggccacatttgtacaattttaaaatattgtttttttctagtggataaggcacacaatagtagtctccctttgtttaatagctgtctggggcatattttcccacctatttatttacccccatttatattaagccctcattttcctcctttagctctgcctgcctgttctccctcagcaagtcattgacattttccaaagttaagagaaacagtaataacttcactgaataaaaatagtgagagagcctggactttgattatgtccagaatacctcctaagagtgttattttcaaagtcaaagtgataaggaattttggtttttatgtctgccactgaaagtagcttgtttaaatttgagtttaattagtagaatgacagtgttattactcatagtgtgtagtgttattaaagattctttggcatacatgcaagtttttgcttattagaagtttctagttgaaattatagcactcacaaaaagttttgaataaataagatttagaatgagtgacccctgaaaacctggtatgcaaaaggctactgggtaataatttcattaattttataccacatgtgtgatttcaccatactttttttgttccttgtggttgattctaagtgatcagcaatttttattttgaccatttaaacccatagccattagctacttaaatttgtgaaattctttgtagtgatttcagttttacaagtttgtatcttggctgatggtctaattttgaaaactttacatttggtagataccaatgtttttcttaatgtactttttcacagtccttctgattgatttcaaagtgttgtctttgaaaataaacatgactcatagcacttgggtagccagagcatgcctgtaatgaatgcctctgtacattttgaggctgtggtagaataaacatagcagttcctttcctttttgaaatggaagtttgatactagtactgaatttaaagatgaacagagcttagttttggagaaagagaaaagcacggttatatttgcaggtacacttttttctaactttcattgactatttttgagtgttaatgtgtaattattaaattaataaaagtaattttatagaagctgcaaattaccatatttcaatttatttcaggggttattcttttaataatttaggagctttaaagtatgtatctcaagcgctatataataaagagccatcggtgtagttaaacttttgagcttttaagaagttatacatataattctaaatatttgcttaattatttatttttacttagggagaatgactgcttaaaggttgagtcttcacattttggatagccaagaaccattaacaaatttctattgtttttgccattgatttgtgggtaccttttaatcctttattatcatttagttctttgtgtcccagagtaagttctcatttagttctatttgggtatttgtttttgtgctcatatctcttactgttggctatacttcatagtatgttttaatatctggtcaagcaagtttatttttttttttgaggttgatttagctgttggttagcctttattttagcatgaacattgtaggctgtttattgaattctttaaagaatcaaactggcaatttgagattgcattacatttatagattaattttggtggagaaatgttattctatttgtggattgttttggttcttctagatagatgatgatgtcatcagcagcagtgacagttttctctctttcttttcaaatgttacactcttattttttacagtgttggccagtctggcactgtgctagacagcatggtcatatttgttgacatagggaaaggcttttgaagtctctattttatatttgttatacgtttttgatatatatatataacctttgctaaattaaggaaactcccttctattccaggtttgcatagattaaaaaaattattaagtaggttcttcttttgtccagttgttttcctgcttctatcaagataaccacctgagttttttcttttagcctttaataattaacaacaaaaaaacactgttggatttgattagtcagtattttatttaggctgtaactttatagcattgttatctggttttagattcaatactagcctgataaaaatgaccgtagcttttgttctttttaactttctgaaacaacttgtataagataagaatagaatgtttcttaaaagcttagtagaatccacctattaaaaaaaggtctcatcacggagttcgttttgttttactttgttgggagaagagcattgccatttcagttgctttaatcttttgatctgtttttcaacctgttttctttcaatctattcaaatcctctttatttcttctgataattttgtcatttctcttcttttggatcttctttgtctttttcttgatgaatcttactagaattttatctaggctattaatatttaccaagaaacagcttttggttttgttatcttcttaattgttcatttggactagattttcattgatttctgtcctttattatttctttcctttttatttatttggcttttctttgttaggcttttcttttttttcaccttcttatttctggtaaatgtttaaagccatatattttcctcaagttcttccttggctctaacatatattttctaaatgtttcctgatttttattgatttcctttttaacgtaagggttattaagttatattttttttagtttccaaatttgaatatttataaaaattattgattcctgagttcattgtattatatcagaacataatctgtatgcccttgtgcctaccacatggtttagtaatataaatgtttagggtatgtgagaaaaaaaatgtatccccgtccattgggatgtatttctttgacctaaggaagtgtaggtcattgcttttaggactttcttttttaatataagtattttgtaattggaaccttctcttttttttttttttggcggggagatggagtctcactctgtcacccaggctggcgtgcagtggcgccatcttggctcactgcaagccccgcctcccaggttcacgccattctcttgcctcagcctcccaagtagctgggactacatgcgtccgccaccacacccggctaattttttgtatttttagtagacacggggtttcactgttagccaggatggtctcaatctcctgacatcgtgatccgcccacctcggcctcccaaactgctgggattacaggcgtgagccaccgtgcctggccgtaattggaaccttctgtttgtactgttgagaacttgaatttttttgcttatattttgtctgcttgatctatcagtagtctgaacagagttgattaagagtaattgttgatttttctctgacagttctgttaattgttgaatatattttaagacctgtttgaagtgggtagatatattttgctgtcattttcatcactatatagcctcttcttcatgtatttttaaatcccttttaatttgctttttttggggaaaaatttcagacctttaagaatgttgtaagaatgttacaaagaaaattattttgctcatcatatagctttaccaattaatattctttctttttcttttttttagtcttttttatttcctggtaaatgtttaaagctatatattttcctcttaaatctcccaggctgcagtgcagtgttgtgatcacagcttactgcagttttgagcccaaatgatcctcccacctcatttcccccagtagctgggactccgggcgcacaccacatgcctggctaattttttaatttttttgtagaaatagagtctcaccttgttgcccaggctggtcttgaacccttgggctcaagcaatcctcccacctcagcttctcaaagtgctcagatcacaggcatgagctactattctcagccttctctaacttaagaaggaagctcacttaggtcgttgcttttaggcctttgtattaggttggtggaaaagtaattgcgttttttgccattaaatgtggcaaaaccacaattacttctgcaccaacctaacataaggatttaaaactataaatttcccattaaacattactttagctgcatctattttttttcttatttattattattttttagacagagtctgactgttgcccaggctggagtgcaatggcaccaacatggctcactgcaaccttgacctcctgggctcaagtgatcctcccggcctccgtctcccgaatagcggtcttactcattttctacgtgtgtgttgagtgcaccatttgagagtaagtcacagtgttagtccattttgtgttgctctaaagaaatagctgagactaggtaatttataaagagaagaggtttaattggctcatggttctgcaggctttataggaagtgtggtgccagtatctggttggtttcttgtgaggcctcagggagcttttactcatggcagaaagtgaagtgggagtaggcatgtcacatggggagagagaagaggaggacccaggctccgttaaataaccagcattcctagctctcaagtgagctgacagaccaagaacttactttattactacagggagggcgccaagccattcctagggatcctcctcccccatgatccagacaccttccttcaggccccacctccaataaagggggtcactttttttttttttttttttttttttaagacggagtctcggccctgtcgcccaggctggagtgcagtggtgcaatcttggctcacggcaacctctgcctccggggttcaagtgattctcctgcctcagtcttccgagtagctgggattacaggcgcctggctaatttttttgaatttttagtagagacggggtttcaccatgttggtcaggctggtcttgaactcctgacctcaggtgatctccccaccgcagcctcccaaagtgcaaggattacaggtgtgagccaccgcacccagccagcaatcacattttaacttgagatttggaggggacaaacatccaaaccatttaagtcacagcactttactccgcagtgtgaataacacaggcattctcctacataatcacagtacagttatcatactctggaaattgaatatcatctaatatactttccatacccagattttcttagatttcccaatgatatttcttactgtcctccctttagccttcctctttctccattcaggattctaccattacatttcattttcatgtctcttcagtctctctttagctttgtttttctttcttgatgttgccacttttaggaggccaggccagttgttttgtgaaagatctgttctctttgatatgtttcattttggatttgtttcattgtttttgcatgaatggattcaggctaaacatttttgggcaggactgtttattgtattacctagtgatgtgttcttttcagtccatcatctggaggcacctgatggcagttttcccaatattgcgaaattaagtttgattattttgttaaggtagtgtccaccagatctctccattttaaagacatccttttctctaattactcagtggactgtagagtgatgctttgaaactgaataactaacactccctaactcagtgatttagcacccgttgattttttttttttgcctgaatcaaatattattatagtagttttaaatggtgattttccatttctattcttttgttagctgccattcttctataattttgtctttatattttactgggtgttaagattgctattccagctttcctttgtcttttacaccttttcccattcttttatttttttccatccctttttgtcctgttttccaatagatggatagaattttctttctctggtttaaaggttatacatttgtgtgtgtgtgtgtattcttagccatttgcccttaaaacatagagatggttattcctgttgattaaaaaaactcagtaatgttactatcttctctttaataagataggtactttatttcattctgtgttcttgggtgaggtctcccctcacccagtcaagttgatgttaatctagaatttttagttttttaaattatcgatatactttctgtcttttcctttttttttcactctctctgtatttgtgctttccccctttactctctttcccttcattccttctttctcactttcttcttctatttttcactcttgggtagattatcttttagaaaacagcaagatattatataatttactttatattctctttccaaatgattaaagtaataattaaaaatttttgatatgtgtgtatgcaaggataggaatcctcttgtaagtggaagaactctaccacatgcatgagtcattagtgtgttaaacactgggaagtggctttaggtccagctgggtgctctgaagaaggtaggtttcttcagttctttatgttaactgtctccttaccttaaaaaaggagtgaagaatactgactgcagaggttttgtgaggattccggtaacacagaagcatagaactggaaaagaatattaatatttgccaaaaaaaaaaaaagttaagtggagagaaactcttaaaatgtcattgattagaaagtaaggatttaaataaaaagttaaacaggttgatttcagatctagctctcagtagaatatgatgttagaatggaccttcggtaggccttatgcatcatctattaatattttgttccgtttcagtgtagcaaaagaagaaaaatactcttttttgtttttctggcccaggattcaattcacatggcacattgggtttcattgtcacatctctttagcgtctttttttttttttttttttttgagatgctcttgcactgtcgcccaggctggagggcagtggcgcagtcatggctcactgcagcctgtacctccgaggggtcaagtgatcctcctgtctcgggctcctgggtagctgggactacaggtgtgtaccaccatgcccagctaatttttaaatttgtagaaacagagtctttctatgttactcaagctggtcttgaactcctgggcccaagagatcctcctgcctcggcctctcaaggtgttgagattataggtgtgagccaccatgcctggccttctttgtgtcttttaatatagaacaattcctcagtcttaacatagacatttttgatgaataacgactattttgtctaacatctcccactttaggttatattttatttcagtattgaccttgttccaaggcactaccattatgaaacatggagactcatgatttaatatggtattaatgtttaaattcttatattttcctatgggtagaatacttggttcacggcggaatggaaacataaataataggctattttgggtatacgtcctacatgtaggattgatgttcagtatttgacttgaagacttttattgtctttttaaaaagtatgggcaaaagaaggggagaggtgggaaggggatttagaagtcttctatcctagatctcatcagaatgacagaaacagtacacctaacagctgtgaccacttgttcaatttagttgccatttttatcccactggtcagatgttttaattttcatttgaacatttaaagaaaggttgaagtcttaagatgtcagctgtgtgtaagtagtagactgtccaactgcagataaacagtagtttttaacccttcactgcccaagttgtacctgtgttgcctgattatgatgtttttattttgtggctatctgtaaaatcaagttttcaaagtgtatttctagaataaataaaacttcatagaaacattacaatggatttagagcaatgtatatatgctaaatcactcttttcaggcttaataattggagaagaatatttctagtcttttattattgtttcataatttaaatgctatttgaggagtatagttaaacttgaacagagtactttggaagccagtttttttcccttcctccttcttaatcagaagctgtttagttttactatggctatatgtggtcctcctagttttgtaataaggctggtgtaatttcaggaacctttttgtttaagagatcaggacattgaaaaccagagagggctaaactcaacttgagtcctgactctttgctgattaagtgctagttctgactcgtagaaggatcagtcatgtgggtttgcctggcaggcttaccctaagtaaaatataaattcctggttatcactaaggggggaaaatatctgaaaattcggtttttcaatgaagagtactttgtgttagacatagctgtctgtctcactagcaatgggatttccagggtagagtattaaagatatcatgagtcttttgcagctaagcagcttatgaggtcagtcaaggaataaaaaaataagccagcttcagaagagtctttctttgttattagaaaaattgtgagaggctatagaattatgtcaagatgctgagaaaactatagtttctaaatttttaaccaaaagggtatcctctttagtagtaaggaaataataatgagaaaaaatgcttaagttcagttgcagacattgcatatcttgaggaaaaaagaggacacttctaaaattaaaatatagcccataacatttttattttttatgaattggattactcattttgaatgttgccttctgctaagttactcctttagcatgaattaactgtattctttttcagtcatattcctaaatgttagatgaaattcatttaatgttttgaactttatatttttagctatactataaagattacacagctgttgcttggagatgtatgtgaattacttggagcagtaggatcatgatttgggtcctatgccagctgatagtcagctgctacaaatgaagagatcctaacacatgggaataaaaattcttaaagggtatgaatatcatattttaaaatgttctgggtagtgcctgcccttgttttaggcacctaactatttgtcatgacataccacatttcatgattaggagactggctttaggttttctgttggagagctgagagtattctcccctcattttgatagcaattagagtaactgggaccagctactcctgtcaagataaattgcattaccaacttcagcttttgtatttcatttgataattttttttttttttgagacagagtctcgctctgttgcccaggctagagtgcaatggcgtaatctcagctcactgcaacctccgcctcccgtgttcaagcgattctcctgcctcagcctcctgagtagctgggatcacaggtgcgtgccaccatgcctggctaatttttgtatttttagtagagccggggtttcaccatgttggtcaggctggtctcgaactcctgaccttgtgatccacctgccttggcctcccaaagtgctgggattgcaggcttgagccaccgcgcctgggctgattaaaatttacctaaatacttagattcttcatgccatggttgatttagtagtgttaagattgagttgctcccaagctacaattaaatagctctgatactgtctgtgttttctgtatacctattttttcttgattgtattaattctgtgtttattgagagcatatgtagtttctaaccttcattgattatgctcttagcaaagctgtctataaagtattttgtacttatagcaaagatgtcataaagagaaacttcaaatgcagaattgcgtattattttcattgaaagtgatctctactaaagaaagtttaaaaagattaaaatagtggttatccatggttcctgctgggcattatgttccatttactaatttgacattcagcagatgcttgaatatgcttcagatattaatattgtagatagaggtgatgcagttctctacactggtaagtgtatagtctaatcaacaaatcatcgtaatagagtgaggatcatgccgtggtaggagtatccctgcagttctgtggcgcttggagacctccctcctagagggatgtttttggaagaaggcagtctgagtagactacttggatgtgaactgggagatacaattgagcagtaacaattaagaaggtgatggaggaaaggaaggattttcttatttgacaatcaggaatagcatgattaaatgagtgaagagaagagagactgttgccccagtgggaatgataggatttaatagattgttgtaatgatgtaatttcattgaaatttccccaaaactgagactttgcgcagtgtttgaagatgtccttactcaaattagaagtaaaatatattgcatgtgcctgtcactttcacatccatttaagaacagtttgtccttaaactttgaatctagcagtgttccagagaagcaatgtgaatggttctcaagataacaagatcatctctgaatttctagcctcatgccaacatttatggcaggcacactcgtttcaccttcttcctaaggcagattgaaaagggaatttttatagctgaaaatcatgtaagaataccaagtgtaatctcaaggcccatcaatttggttacttcttcagtaggttccagtagtctttgcaagcaactgttgattgttaataactacactttattgatattatcagaaaagcacaacattaaggccttctagtcaagcagctttaaaaaattgtaataattactattctaccttgttttaaccttttgtagaagcacaggacaataagttccagaatcttttgaatgtcatgcggttcgtaattagctgaagacgaatgataaaagtgggctgctgtttttcagattacggccagtaattctctttggttatggctgtgctaaaattactttctgaacacattgccaaagtgtgtgaacaaaacatcatatgctagtgattcccaaatcactcttagctttcatcatatttgttctgttggtagtgtcaactgcgtgacactgcattctatacttacttttccacccctctcaaagcataaagttttggtatttaccttaacattcagtcttcctcttgtcacaaagactctttggtacttctgggttctcatactagggcaccccccacccccccccccccccacacacacacacacaggggcaggctgcagtgtgcaagcatatggagcacactgtagatgacaaaagtggcatatctacctggaagataattctactgaaagatttatggagagaacattatattaagataggcagtgtagtggggtgaattataaaatactcattcaattttaatgtgaactatgaaactcctgagaaatctgtttgctcttcagggtggctagacgtctttagtctgtgtgtggggggaaggtctactatgtgccatctcttatcaatcttttctggcatttttgttatatgatagttatagctatatggtagttatagctagtctagtccttggaactaaactattttgaacttcgtttgatatagcaaatttgtgccaggggtcatctggcatgtcatgtttaggggccgtattcctcatctgtgtggaggaactagatgtggagagagaaagagaaataaatatgtttccccagctgtagtggacaggctgtttttcaggacagaattttacaacttttataaagtagttgtgagcagaagttggcagctggcaaatgttgtatgtatttgccaaactataaatatctggtctgcagccacaaatgtccaagaaaggctcttggaaaattaagggtttccttaggataatagtaaaaccaggctttcctcaagttgttatatttaagcataagaagcagcagttcataattggtttagttatattcatttatgttttatttcaagttgacttttaatccaaatactaaaatataacaaaagacaatttctgaggacttgaaaagtacataaaccttaagtcacatatagtagcagttaacttaaattgaaacaagaagttagaattgtatttcagttcatagagatgtactaaacatcgcggattctcagattgacagataaccactgtagcctagaatacccaccacataaaatgagtatccagggaagagtaaaaatgaagagagcctcattgggatgcacttcataggaagttcaccaggctcacttgctggatagggaattggtcacgttcactccccacatatcagactggcagaatgggaagtttagattcttgtattggtcagaggatggctcgaggcatgtgggtctttgggattgtttgttaacacatcaaatgttaaaggtgtactgtttggtagtgttgagctcacttgtggttctagcagatagctagatttatttatttgcaatctccatttaccaaaatactgttgctgctcacagtaatagtaatgagtaacatcgctgagtacctaacatgtgccagatacttgaatgcttcatgtacatggttttattctcacaacagatccatgaggtattactgttattattatactctagaaatcagggaacagaggcttaatgaggctaaataaaaacttgtttaaggtgacgcaactaggaaatgacagagccagaattgtaattcacttaggtttaacttcagattgcctcctcttaatccccatgctctggtgcttctaaagagaccaacactctgccctgaataatttagtactgatgttaaacatttcagaaagacttttgaagcccttttttttttttttttttttttttttgagacggagtctgtctctgtcgcccaggctggagtgcagtgacgcgatctcggctcactgcagcctccgcctcccgggttcaggcagttctcctgcctcagcctcccaagtagctgggactacaggcgcctgccatcatgcctggctaatttttgtatttttggtagagacagggtttcaccatgttggccaggatggtcttgatctcctgacctcgtgatccgcccaccttggactcccaaagttctgggattccgggcatgagccaccacacccgactgttttttttttttttttaaacgtagtttcgctcttgtcgcccaggctggagtgcaatggcgcagtctcggctcactgcaacctccacctccggggttcaagcgattctcctgcctcagcctcctgagtagctgggattacaggcatcaccaccacgcccttctaatttttgtatttttagtaaagacagggtttcaccatgttagccagactggtctcgaactcctgacctcagatgatccccctgccttggcctcccaaagggctgggattacaggcatgagccaccgcgcctggcctgaagctttgttgaggtatagaatgtgtgagaaaaaaatgtatagtccatgtgccaatgattctgataacacaaaatatgcttagcaacaattctataataaaatcatcattgtcatctggtcttaacttaaaaagtgttatagcattaataagctgtctttaatagttcacctgaaaataagaccaatgaagccaatggaaaagtaaatgtattttataaaagattctaattgaactattcctaactagattctcctttgcagaaattgtaggatattatattttctaggtaatatttagatgcttattcttgctcaggaagtagattatggggcttctaggtggagaggctggcggtagaaaggctgttttggaggctgttgtaatctaggaaagaaagaatgcattaatgtagtggcacagtggaacagagtggaggaggtgttagtagagatgtttgggtggtagaattgacagggctggagactgacatagggatgttggcagaggagtcatctagggcactccagtttctagctcgggccagacagtatggttttggtatccttcatctgggaaagggaatgggggggagaaaaataggttgtattttgaggtatgtatgatatctaagtagaaacacataataggcagctgtttatgtgagtttgttgctcaggagagaagtatggactgtaaatacctatttgccttttttcttttttcttttttctttttttttgagacaggctagagtgcagtggtgcgatctcagctcactggaacctccacctcccgggctcaagtgatttttgagcctcagcctcctgagtaggtgtgcgccatcatgcccgggtaatttttgtattttttagttgagacagcgtctcaccatgttggctgagcaggtgtcgaactcctggcctcaagtgattcggtctcccaaagtgctgggattataggcgtgagccaccacgcctggcccctgtttggcactttttaacaggtattagttgaaatggtgaatttggaatctgtgtttaaaccttggtgctgtgtgtgtgtgtgtgtgtgtgtgtgtgtgtgtgtgtgtgtgtgtgtgttgagtgatgaggggaggcaattagtcaccacagcatctaccaaattttattatcatttatatgttgtttctcaacccatttgatttaaaattcttagaatacttacttgaatgaatatggagaaataaaacatgacattcttttcccctctaatgaagtctgtgcataattagttcttttattagaaaaagctgcacggggagtgcacacatgcttaattttcccttcaacattttattatgaaaaatttcaagaatacagaatggttgaatttttctgttaacatatgtatacccacaatctagagcctactattaatattaacattttactatatttgctttatcacacatctgtctctccatccttctctgtatacagttggccccctatgggtttcatatccacagataaaaaatattaaaaaacaatgcaacaataatacgcataaaaatacaatgcagtataacaactatttacattgtattaggtattataagtaatccagagatttaaagtataccagaggatgtgtataggttatatgtaaatactataccattttatgtaagggacttgagtattagcagattttaatatctgtgggagtcctgcagccagttcctccgaggatactgagggctgactataatttatttatttatttagatgcatttctaaataaaaagtaagttgtagtcagcacactattgcctaagtatgtcagtatttatatcgttacctagggttcaataatgcttatatatattttttccttttgtgatatatatatagcggaatgcacagattattgggaaagttttaacagatgcaaacgtgtaactcaaactcctttcaagattacagaatgttctgggggtgatggcaaaattccctgaagctccttcccatgtcactcctcgctttgcctcccctgctgcccatactgttttgtttctactatagattagcttttttttcctgttccagaattcatctaggaaccgtaaaatatatactcttgtgtaaggctttcttcacagcataatgtttttgcaatttatcatgtcatgtatatcagttgtttgcttttcttgttttctgatgaatctttgggtgaatacaccacaatttattcatcgtcttgtcgatggatacctgggctgtttccagttttgagcaatacctaacattgaaattgacttgtcagagggtaggtgtttgtttaattctgtaagaaactgccaagttttttcctttttttttttttttttttttttgacacagacttgctctattgccaggctggagtgcagtggcacgacctcggctcactgcaacctccgcctcccatgttcaggcgattctgcctcagcctcctgagtagctgggactacaggcatgcgccaccaagcccagctaatttttgtatttttagtcgagacggcgtttcaccgtgttggccaggctggtctcaatctcctgacttcgtgatccgtccaccttggcctcccaaagtgttgggattacaggcgtgagccactatgcccggccccaacttttctttcaaagtttgttgaaccattttatactctcaccattgctgtgtgggagttagggttaaaccatgttttagccatcctgctggttatgtagtggcatcttattgtgattttaactggcgtttccctgatgattaatgatttaacacaaatttactgagcatttatatatcatgttttgtgacatctgttcaacttatttgcccaatgttttattggttgttggagtttcagaaatgttggattcatgtcagatttatgtttcgtagatttttttcttcatctgtgccttgcctatgtatgcattctctcccttttcccctcctccctctctttcttcctgtaacagctttattgagagaaaatttatatactctatgcattttcttaaaagtgtctttttatgggagaaaattttaatttgccttttttccctgtaattattgagaagagcttttgccttcctgtgatgatttttctcctaggtttccttctccaagtttatgggtctagcttttaggtttaaatcgatatatcttgaataatttttttgtatggtgtgaggtatgcattgagattttttttctgcatgcatatccagttgttccagcaccacttattgaaaagattatcttttctccactgacgtctttttaaaaaattagttgtctttatatgtgttgatttctggactctgtcctgtttcattgatatatttgtctatttttgaggccactaccataccctcttaattgctgtagctttgtaatcttgaaatcagatactattagtcttctatcattattctttttttgttgttgttttggatattctgtgctctttgaatttccatatgaatattataattagtttgtcaatttctacaaaaatggcttgatgggattttcattgtgattgcatttaacttgtagattaatttaggagagacttgacatcttaacaatattgaggcttccaatccatgaacattgtatatgtttaagttttttaaaatttctcttaccagtgttttttagttttcagcataaagattttacgcatgatattatgaagattttcttttttgggtgctattgcaaatgcagtttttaaaactttatttttctggtttgttgttgctactatataaaaaatgcaactgattttttaaattaaacttgaatcctgtgaccttgctaaattcacttactaatttgctgctttgtagattccttaggattttccataagcagcaattcgtcatctgcaagtagaggctattttccctttctgtcctttcttttttttccttttctttctttgccttagtgcaaaggctaggaccaccaatacaatgttgaatagaagtggttaatccttgccttctacctgaccttagggggaaggagttcagtatttcaaaattaagtatgatgttctagatattttaatatatgatctatatcacattaggggaaatcacttctcttcctacttttctgagagtttttgtcaagacagatgttgcattttatccctgctttttctgtcccccagccaaccccacccccacctcttttttttttgagatggtcagcctcctgagtagctgggtctacaggcacgtgccaccacgcctggctactttttgtatttttagtagagacagggtttcaccatgttggccaggctggtctcgaactcctgccctcaagtggttcgcctgccttggcttctcacagtgctgggataacgggtgagccaccatgctcggcctttttctgcctcttttgcattacgttgttcttctcctttattctgttacggtgaattaccttgattttcagatgttaaaccaatcttgcattcctggaataaaccctactttgtcatgatgtgttagtattttaatattgccaactttgatactattttgttaagaaattttgtgtattatttaaggataatatgattttctttatttgtaatatctttgtgtggctttcatgttgggatcacgctggtctcatgaatcaagctggaaatgttttcttctttatttttttgagagtttatataatatcagggctgttttttcctgagctatttgacacaattcactagtgaaaccatgtgcctggagttttgtttgtgaggagcttcatatatcaatttctttcttccttttccctctacttttcccttttccttccccctcctctcccctcttttcttccccctccttctcctctttttcttccttttttttttttttttttgagcttgtctcccaggctggagtgcagtggtgcaacctcggctcactgcagcctccgccttccgggttcaaacgattcttatgcctcagccttgagttccttggctcagctgatcctccagcctcatcttcccaagtagctgggactacgggtgcacgcagccatgcctggccaatttttaaaattttttatagagttaagagtctgaccttgttgcccaggctggtctcaagctcctgggctcaaacagttcttccaccttggcctcccaaaatgctgagattacaggcgtgagccgccatgcccattcttttctaacttaagaacgaagctcaagtctttgcttttaggcctttcttttctcatatatgcattcacaactataaatttcccattcgtcactgctttagctgcatctcatgatttttttcttatttatttattattattttttacacagggtctcactctgtctcctaggctggagtgcagtggtacagacatgcttcactgcagcctcagcctcctgggctcaagcaattctcccacctcagctttctgggtagctgggactacaggtgcacaccaccacgcccggctaattttgtatttttttagtagagacaggatttctccatgttggtcaggttggtctcgaactcccgacctcaggtgatccacctgcctcggcctcccaaagtgctgggattataggcatgagccactgcacctgggcaatttattgaatttttttttatggcccagcatatcatctatcttggtgattatagatgtacttgaaaagaatgtgtattctgcagttattatgtatagtgtctttaaaatatcaaatgagtcaaagtggttaataaccttcatttattctatgtgcttgcaaatttttttgtgtacttctgttgtctagttttatcagtttaagggggtgttaaaatttacaactaatactgtgaaaatgtctttttctctttctctggttttttttttttttttttttttttttgagacagggtatcactccgtcgcccagatgggagtgcagtggcatgagctcagcttgctgcaacctctgcctctcaggctcaagcgattctcctgcttcagcctcctgagtagctgggattataggcacacgccactactgcctggctaatttttgtatttttagtagagatatggtttcaccatgttggccaggatggtcttgaactcctgacctcaaatgatccacctgcctcagcctctcaaagtgctgagatttttccctttaattctgtcagtttttgctttatgtatttagagatggtgattaggtggctgtacattcaggattgttacttgtttctgatgaattgaccattttataattttgaaaaattcctctgcttaaaagtctactttatctgatactaatgtgtcaattctgatattactatatgggtactgttttcatgacatataatattttatttactttgttcctttttttatgttactttgaagatcttgttgcttaccaatgtttatttactttgaacctacctgctttctgtatatttaaagtgcatctctgtgggcagcatgtaattgattctttattatctaatgtctgccttttaatgagagtgtttagtcattaacatttcatgtaattatggagaggttggacttcagtctaccattttaatatttgtattctgtttgtcccttctgttttcagtcctttgttattccttttctgcctttttgggggataaattgaatacctttagaattctattttaatttttctactgacttttttgctatacctctttgcattttctctctcctgttagttattgctttcacttttaccatttacttagagttaatgttgtagcactttgcataaaatgtagaaaccttgcaactctctaggtttgttccccccagtttgttttgctgtatttgtctgatatatcctatctgcataatttgaaacttcttaagataacgttacaagttttaccttaaaagaacacagtccaatttatatttatcctgtatttaccttttttgtttttgaaacagagtcttgctctgtcgcccaggcttgtgtgcagtggcacaatcttggctcactgcaacctccatctcccgggttcaagcagtgcttgtgtcttagcctcccaaatagctgggattacaggtgtgcaccaccacacctggctaatttttgtatttttagtggagatggcgtttcaccatgtttgccaggctggtcttgaacccctggcctcaagtgatctgcctgccttggcctcccaaagtgctgggattacaggtgcgagccactgtgcccggcctacatttaccatttttgatgctcttcatttcttttctttctttcttttcttttttttttttgagatggaggtttgctcttgttgcccaggctggagtgcagtggtgcaatctgggctcactgcaacctccacctcccaggtacaagtgattctcctgacttagcctcccaggtagctcagattacaggcatgcgccaccatgcctggctaactttttttgtatttagtagagacagggtttcaccatgttaggctggtcatgaactcctgacctcaggtgatccacccgcctctgcttcccaaaatgctgggattacaggcatgtgccactgcgcccagcctaatgctcttcatttcttacagactatttgagtgtctggtaccattttctttcaacttgaataattctctctctctttttttttttttttttttgatacagggtcttcctctgtcgcccagtctggagtgcaatggcgcgatcttggctcactgcaactccacctcctggttcaagcaattctcccacctcagcctcctgagtagctgggattacaggcacccgccatcatgcctggctagtttttgtatttttgtagagatgaggtttcaccatgttggccaggctagtcttgaacttctgacctcaggtgatctgctcgcctcagcctcccaaagtgctgagattacaggtgtgagccacctcgcctggcctcttttttcttaaaatatctttatttgccttcatttttaaagaatattttccctggatgtggaattctagattggcagctttgtatttgagctctttaaagatgttgttttattgtctctgttctcttttgtttctgcagtacaatatgaagatgtctgtggtcatccaatttattgttcttctttatgtaaagtttcatttttctctagccatttcaagtatcttcgtcttcaactgtgatatacctacttgtggttgtttttagattgaatatgctttgctcttttttgcggagagtggggagttgtcccagactcttacacatattaatatgttagccccaatgatactgtcccacagatctgtataacttggttggactcaaaacagcaaattctgtcttttaggcagtgggtcatattttggttcagctcttttagttacttggaaactgccctacacatgagtagatcagggatcatccagagatttaggcagagtttatatacagaatttggggttccttcctgcccactggctcattttcctcccaggaatttcctctcattttgcagcagctatggattgccctgaactctatccttttatctttaagctagaaagtctgtgggggtttctgttggagttttagctctcccatgtagcacagaccaggaccagttgtcaggctaaaagctgtaaacatcagagaactctccccgtattattcctttcttaaaagagttgactcccttcttctcattctccagtgccttcctgcattagtccgttcttttcactgctataaataaatacctgagcttgggtaatgtataaagaacagaagtttaattggcttacggttccataggctttacaagaatcatgatgctggcttccggggaggcctcaggaaacttacagtcatggcggaaggcaaagggggagctggcacttcctgtggctggagcaggagcaagagagagagagggggggaagacaaccagatctcatgagaacttactatcaaaggaatagcaccaaggggatgttgctaaaccattcagaaaggacgaccctcattatcctgtcaccttgcaccaggccccacccccaacattggggattacagtgacatgacatttgggcagggacacagatccaaaccatacatttcatatagttgttctataaattttatccagagatgaggattgcttgagctcaggagttagagaccagccttggcaagatagggagatcccatctctaccaaaaattaaaaaaaaaaaaaaaattagctgggtgtggtggtgcgtgcctgtggtttgtcccagctacttgggaggctgaggtaggaggattgcttgggcctgggaggtagaggatgcagtgagcaccactgcactccagcctgggtgacggagtgaaaccctgtctcagaaaaaaattctttttaattttaatccagagtttatagttttatctatgggagggtcatttggaaagttggccattacttggccagaagcagaaccctccctgcttacattttgagaaaaatagattgagattctatagtattctgctttagtttttctttcttgatctcatatggtacttgtcttttgctgacactattcattcattgaaattaataaccttgcaaaataaaaatataagaagtcagtgtggctcaccctccaccctccactcccactccatctttcatcccgtttttatttccacgtctgtctaacttggctctgcctggtgcctttatagctaaaattagccacacttgatatttttaactctacggtgcttggaaagtattttgagaggctttgccatataacttcatgaaaataatgtgaggaaaagaagaactacaggaaacaggtgaaataatctattcagttactgagaaaagtttcttattaatgggagaatttattaagatagggaagtatgtgttgccaagtgaagtgttttcccacatttttcttttttttctgtgaccatttctagatgtctgtactttttgtgaactctcatgctgtgaatgacggtttaggtttgctggtgcactgggaattgatctttgaaaattacaagtccagttaaaaaaagatgggtggccagacgaagaatctgagccctgtgtgcctatatgtgtgctaaaagtcacggagcttatgaaatctgaggtaatcttggctttttttttttttttttttggtttttttcttgagacagagtctcgccctgttgcccaggctggagtacagtgatgcgatctcggctcactgcaacttccaccctcccaggcttcagcctcccaagtagctgggattacggcacgagacaccatggctggctaatttttgtatttttaatagagacagggtttcaccatgttggccaggctgttctcgaagtcctgatctcaaatgatccacccaccttggcctcccaaagtgctgggattacaggcgtgaattgcacccggcccaatcttaagtagtttaaggtcttggggtcaggcacgagggagtgaaggggtagtgtgttacttatagccacacaataaattacacaaagttttagtggcttaaaacgtcacatatttattacacagtttctgagggtcaggattctgggtttggcttaggtggttcctctagctcagggtctttcataaatgcagtcaaaatgttggccagggctgcagtctcaactgaagtcatcacggggggaggaggatctgcttctaagctcattcacattaatggattggatttagttgcatgccagctgttagactgagggcctcattttattcctgataattgtctcgtgtgggcctctccataaggtggtggcaagctagatggaagccagagtcacttcgtaaattaaccttggaagtgacattccatatatatatatatgtattttttttcccatattctgttcagtagaggtaagtctctgggcatgaatactaggaggtgtggagattattaatagctatttttttgttgttgatgagttgagggtgtggggaagaagaagaaggtataataaatttttatttcttacagtgtatacttagagtaggaaccagaatcacacagtagggtgagaaattttaaaagcaaagtttaccactaggaagctatgtgatgtcttacataggaagaacagcaaagcatctcaaataaaggaacataacaaaactttaaacattgaaaggttctttttctgtagttttaggttgaagttttatcttaattttctagtcaatatttttctacactgacttggatgaaaatatttataactgaaaatatattatttctttttacctattctttttgaaagatgtaaagacatattcttctaattggctaatagatttcaaagttcatgtgcgtcctgtaatgtgctaaactcatacattgtgtagtaacaaagttggagtagtttaaataaaataatggaacgatagctgctattctattcttcatgtttctgtgtgcatgtctgtgtgaatctctatctgtatctatagtttgatgtctaaaatgtttcccacagattttgtctttcatgtaattctttgaagaaagttgagattctatttgaaggaaactttccctggagtattaattttatgaataagtttcttcctactgccttaaaaaaatctgatattctagacatgtttttgttataggttaacattgtatcttcagtaatgaaacctttaaaataaaccttggttatttctaaaaagaacataaatttcagcaaataaattctttcctcttagcttcaaattaaatataacatgaagtataatgtggaaataatagaaaatatgtgaagaggtaattttgtggaactaatatagtttatagtcagaatctttctttttttagtagagtggttgcaagtccagacctggaagcagactggctgctttaagtcccatttctgcctctccctacagtatgtctttagtcaagttaattcacttcttgtgtctccatttcctatctgtaaaatggggatattaacggtacctaccacataaggttgttgaagaaataagcgaattaataaaggcaaagcacatagaaccatatatggcacttagtaagtactatatacatatccttattttttactattattagtagtattattagtatcaacactggctcagtaactgcttatgtcacttaattgtctctgggatttaggtctttcataacataaaccaagagatttggattctttataactgactaactggggagctgttagtctctattagatagtaattcactgataagatttttcctcattgataggattttttgtgcctacagttaaacaatactctgaaatatttatagacagttgtagagtgcattcttctgaaactgttggttttaatttttccaagtaacgtttgctttatctttgttaattagtctttcatattacaagaaagagcattgcttgaattttttctgtgctgcttagcagcaggctgtctttgtcattatgtggccagctagagttgcacacacagagcaggttcccaccctagataatctcagtcttactagtttgttaatatttctttcttttcttccttttttaagagagagtgtctcgctctgtcgcccaagctggaatgcagtggctcagtaatagctcactgtaaccttgcactcctgggctgaagtggtccttctacctcagcctcccaagtaggtgggactacaggtgcacaccattgtgcctggctaatttattttatttttcatatcttgtggagacagagtctcactttgttttgtccaggctgatctctaactcctgggctcaagtgatcttcctgccttggcttctcagagtgctgggattgcaggttagagccactgtatccagcctgttaatgtttctttttatttttttcggtctccagagcttttgtaagttttacaagtttctctgtctctcttatggttctaagaatatggaaattgtgcattctaattgtctttattattctctgtctccaggtatgttgcagatagggacaggttctttttaccgcctgagtcacatttattgaattttgcagattctatacttaagtaagaggaattcatgattgaagtcaaatagtaccataagaattattgagaaaagattactccctaaaaagattactccctattgaaaaaaagattactcctaagcacacatgactacatgtggtaggtacattctctaaagtactttttctacatactattgtatttaacctttaacgttttcccctattttaagagattttttcatcctgcagaatgacccaatagatttgctgaaatgttttcttttaaatcatgccatcttgcttttgatggtcatttagactgaccattttctttggtgaatctggatcagttatactagactgcatttgtactttgcacatgaatataggtgttgtaggacaaagagtttaatagtgccatattgatgtttttaccttttatttattattctatttctcagaaagatgaatgaaacataagtgtggtctttagaggaagttttgcctttctgcatatttggtgctgctgcattccagatggttttcttgccttgcagaaaataactttgtaggctgccgttatttgcatctgctgtttgtcagtggcattcacagtgtttttgttgtattcctcaatctctcagccattgtggcagaaccgaattgtaactagcaagcaaattttttctcctgattcttagcaagattttttctttctttttttaatggaatggcaaaggagataagtttctaatttggtctactggtgatagtggttagttagttgaaatcaagtttggtatccttaaaaatgacatataactttaaatatttatttttcatttatttttggaagcttaaacagatttttaagttttttaaaaagttttttgagatggggtcttaactctgtcacccaggttggagtgcagtggcacaatcttggcccaaggctccagtaatcctcccacctcagcctcctgaatagctgggaccacacgtgcctgccaccctgcccagctaagttttgcactttttgtagaggtggggttttgttatgttgcccaggctggtcttgaactcctgggctccagcaatccacctgcctcagcctcccaaagtgctgggattacaggtgtgagccactgtgcctggcccagaaatttactttctcacagctctgaaaagtctgagcttgatgtgctggcagggctggtgctggtttcctctgaggcctgtctccttggcttgcagatggccgccctcttgctgcctcttcatatggatgttcctctgtgtgcttgctcctgtggtgcctctcactctttaaatactctagtctctgttatatgtgttaattctctagtcttttgctgtaaagctttttctttagtgttagtctggtgatgagaactctatattgtttttcttcctaaagcatgccccagcagataatgacgtttcagctttggtttctttgaagtggagagagaacttagacatatgcaaagcattctgaatacagaattctgttagacttgtatgatctttttagtgacctaccttgataaagacttttcaaaacatttaacttaatttttatagtatttctgtatactcacatatcaatttatataatatttagattgcagacttacaagtacaattataatgaatacatttggtcacagacagctgattctttttgttttttgggtttttttttttttttttgagacagagtctcactctgtcatgcaggctggagtgcagtgacatgatcatgactcactgtggcctcgaactcctggctcaagtgatcctcccacctcagcctcccaagtacttaagactacaggcatgtgccattgtgcccagctgatttttaagttttttcatttctgtagaggtgggggtcttgctatgttgcccaggctgcacagctgattctcagcctctgggagcagaacagtgcagagtgatgagttgaggagctctgagcatttagagtgctagtggtatggtttgtggatgggaaggggaggagtggagagattgtccatttgggcattggaggtcagaaaaggaagctttcactgtcgtatttcagggctcttactccaagtttacagatgtttactttttatacttagtatctctcaccacttttcaggccacttctctcacaaatctttaattgggagagagacagtgccagtccttcctgggtttaacatctgatattggtagagatgatatgcacaatatattgtgagagcacaggaaataagttcttgttttgggggagtgtaaagctttcaagaagaggtgagtttctgaattctcaaggacagatcagaattagaaggtatctgggaagatgaaaatggggcagataggtcaggaagaggggaaggcgtgttattgctgtagttttagactattttgaacaccagtgtgctcccagcactaggatggtagaataatgtctggcacacattacatgcttaataagtattttaaagaaaaaataaatgttgaggaagacagaggcccaattatagtggaccctgtacgtgatgctgtgaagccagagtttatcctgaaatgagtctttgaggtatcttaaccagaagagtggcatgatcagattttatttataaaaatatccctctggaagcattgagagggaagaataagattgcagtgagagatacaggtaaggagatttttgaaataagccagttgaggaactagggagggcccaaattaaagcttttgagcattgagcattgtgaacaaagggtactgatgcattgtaggagtcttttggaaatagaattgacagggcttggtgactgtgtgtgtggagcagtgagggtcacggaggattctggagtgaaccctacatttgtaggatgttgtgatttcagagtggtggtgttggtgctatggactaggaaaaagctcgtctagtgcttaacacagtatatagcacatgctatttattgttcactttcctatttgagaaaatatgtttattattcgtatctgaatgcacaatctttttttttttttttatatattttggagacagagtctcactttgtcacccaggctggagtgcagtggcgtactgttggctcacggcaacctctgcctcccaggttcaagcgaatctcatgtctcagcctcccaagtagctgggactacaggcacgaggcaccatgcctggctaatttttggtatttttagtagagatgggattttgccatgttggccaggctggtctcgaactcctgacctcaggtgatccactcacctcagcctctcaatgtgctgggattacaggtgtgagccaccgcgcctggcccacaatcttatataactgagctggtctcgcccacttttactatatgccaggacctgtgttataaatgtgaacaatatttgtggaatcgagttgaaacctaacacaattgtgtttactctgagcctctttaatctttgaaatgtcataatattgtagacatagcccaataaattgatatcagagaataagatggaaatcctgaatttaaaattccaaagtttttagtgttatttcttagtattttatcttctgaataaatgacatcttagttcatagaatgactcagtatcataacagacgtgatgctaattctctttctttaggatatattctcttaagaggctgatagtatagtagaggttattgtgcacatgttgataactcactacagactaggctctgtgctgcacataggggattcaagaagggatgacatattttccattttcaaagatgatgaagacatgtttctgaataagtgagttgggccatgactttcagtggtggtacattttaatactttacagcatatcacatactaactgggagtatcattaaaatgctaggtgcatccataatttttttcctccttttgattgcctcctcttttgcatcctatctatctacagatcctttcttctgtacttgcaacatacatccccagtgctttcctctccctcctttttttctcgtctggtatttgtgcttctgttcttgattttgctgccactttcttgaattttttctctacatagtagctacagttatctttaaaatgtaggccgtgttctgcttaaagcccttcagtggcttcccagtatacacttggagtaaaactcaagtctttcccatggcttaaatattgcctcctcagagagtcttgtttgttgagagattaatgaatactctgagaactcggaggaaggagcaattagttctggctttgggaaccacagagagaattaataagaggaatagtatttgatccaggtcttgatgagtaggattttgttagattacagtaagtgctgaaaaagcatttaaagagtgcctactgtgtgctacatattgtcatattcatgctttctttgacaagtaatgattaataagtgatatctttgaaaagaaattgatatttgttaacaacttggttttactgcaatctcaataaatagtatatacaagactagcctagcaatccttagtctgcttaaataccaggaagcgcttcattcactggtacctgtgagaatagaacttggcaagcgttctcatcacatatacctgctcagtcaatttgacaatattcagaaatgaactacctgacaaaactacaaaattgtaatttggtgtcttggtttttagaccttttttcccttcttttaaaccagctatctctagccttttaatgccatattttattttaaaataccaaaattaacatcagaagatgaagtataattaactatatataccaattgcactgggtcataaaaatgaagtttttgtttataactaatttagtgcctgatcttcacaaaagtacagcttggtaatttactaatttaatcttttgcgtagtcgcttcactgactcagaatcttgaagactttgactgggcattcattttgaggcttgtcatgatgcagataggatggtagtaaaatgatgcattgctctagtatttgttcaccagtgtccatgcagcaatactgtctcttgtggctgaggccagccatattttaaagcaggcccttggctaagcatttcactggaccagggagaaacggggagaaaacaaaatctgcagataatagagggaattgtctagaaagctcaagttattgcatttaatgatttgtctttgttttgaaatattcctatttttagattccagaaatatcattttaaataagttatgtttgtccccaccaccgccccatcgcatacctgtcaagtagggcaaaatattggcagccagttctgtattgatttatctagtctgcttttgatgttcatggctccatgaagtctaaaactgcttaccaccaatttattttgtgcatcacacctgtaatcggagttagtatgtgagtagcttttttccttacttcaacagtctcttctcgagatttcaccagctgggtgtccaataattcagttcactctgacactgtgcagagttaatgtagaccccataggttaagcgctcagttccataaggctgctcctacttcagataccagctgcaaatggagtgcccaggctacccacatctgcttagccaactgcaaatactgaggttcctgaaaccacccaacccacatttgataatttgctagaatgattcccaaaactcaggaaagcgcttcactattacccatttattataaaggatataatttaggaatagccaaatggaagagaggcatagggtaaggtgtgagggtgcgggggttgagtcttttcctgccctttccaagtgcgactctcccagcaccttcatatgttgatcaacctggaagccctctgaccctgtcattcagggtttttatggaagtttcattacataagcatgatcgatgaaatcattggccattgtgattgaactcgatctctagtccgtctcccttccccagttgttggcggggggcagtaatgaggtgggaagtgtgggcctgagttccagccttccagtcatgccatgatatttccggccacttggccccatctgaagccatctagaagccccttcagccaagaatcatctcattagtataccaaagacactttgaggagccctgtacccaggaccccaggccaaatacagttgacccttgaacagtagagttataaaaggtgagtagaggggtggaggaggttagggactctggcccccaagtgcaacttttcttttgtttttctttcttttttttctttttttttgagacagagtctcactctgtcgcccaggctggagtgtagtggcatgatctcggctcactgcaacctccatctcctgggttcaagcgattcttgtgcttcagccactcgagtagctgggaccacaggtgcacgtcaccatgcctggctaatttttgtatctttagtagagatgcagtttcactatgttggccaggctggtctcctgacctcaaatgatctgcctgccttggcctcccaaagtgctgagtttacaggcacgagccactgtgcctggcccaagtgcaacttttgaatcccccataacttaactaataatagtttactgttgagtagaagctttatagatatccataaacagttgatcaacacgttttgttatgttatgtgtattttataccatattctttttgagacggagtttcgctcttcttgcctaggctggagtgtcatggcgcgatctcagctcaccataacctctgcctcccaggttcaagcgattctcctacctcagcctcccgagtagctgggattacaggtgctcgccaccagacctggctaatttttttttgcatttttagtagagacagggtttctccatgttggtcaggctggtctcccaactcctcaccttaggtgatctgcccgcctcggcctcccaaagtgctaggattacaggtgtgagccaccacgcctggcccatattcttaatctagagaaaagaaaatgttatttaaaaaaacattaaaaaatcacaagaaggagaaaatatatttactattcatgaaatggacatggatcattatagagatcttcatccttgtcttcatgttgagcaggctgaggaggggcaggaaagaggagggcttggccttgctgtcttaggaagggtaaggtgggagaggagaaggaggtggaaggggaggcaggcacagtttttccagtgtaacactggaaaaaatactgaaaaacactggaaaaaaaaaatccatgtataagtggacctgcgcagttcccatgttgttcaatggtcagcgtacatggcaggatgtctctagtgagaagaggtcctcagatgctgtggaaaggaataagaggactgagttgcatttgtcgctaaaccctagcaggcagtgccatcctttcctggctgggccttgatgggggcttctctgagtgcctaatgtatttttttttttttttttgagatggagcattgctctgtcacccaggctggagtccatggtgtgagtatgattctcctgcttcagcttcccaagtagctggggttacaggtgcctgccaccacacccagctaatttttgtatttttagtagagatagggtttccccatgttggccaggctggtctcgaattcctaaactcaggtgatccacctgccttggcctcccaaagtgctgggattacaggtgtgagccactgcgccccaccagtgcctgatatcttctagggctacacagttatttgggtttagctaatcccttcacagtgtgccacatacccacatggcaattactacctctccaataacacctcagctcttacccatagcttattttttcttctctttattctcagctttgtttagaattggaaatgtttaacatttcattttgaagatttcttttcatcttcagaaaaccagttaattttttgcatttttgacttttcttggctacttggatatgttcatttggagaaaaaaagtagaggaaaactttggggccattaaagctaactttccttgttttagatttcttatacttaaaagaaaaaaatttttttgaggcatgaagtgacctgtttacaaaatgaggtgttgctttagcttatatgatcttactgacacttcttaaagggacatgattttattttatttatttattatttaagttctagggtacatgtgcacaacgtgcaggtttgttacataggtatacgtgtgccatgttggtttgctgcacccatcaactcgtcatttacattaggttatttctcctaacgctgtccctcccccagctccccacaccccaagacattatctcttgaatcttgggaatcttagaaacaatgtagctgcaaaaatattatttgaaaactggaaactactatcctgtattattctagatttgtttattgaattatttacatttagcagtaaatttgttgcttgaattgtaagctgtaagaggcactttgccttggcttgtttcatgtaatctttccatagggttatgtaaatgtcatcacatgcaaaatatttctgttgtgaatgatggagagatttttcaactgctactgacacgtgccctttaatctatcttttaaaactaattcaagttttagtcattggcttgttttcattcccagaagtattttaccaaaaatgtcagtgcagcataaaaatgtagacattaccattgggtttgctgcacaaatattgttacaagttagtttttgtaaacatttttctaatggaaaattacaaataattataaccctgttgttctgaagcaattttattactcagtgctgtgacctttttaggccttcagtgatcctctgtcatcaaggacaagaataaaacacatgccatctcctgcaaagttgcatttcattatccctcttggatgggttaagaggtggggcagatgcacgagcaagaggggagagtgtgagggtgactttctgtttgagaatttttaggaaagaaccgacatgatttattgtttaaaatttttgagataaaattgatagaataagaagtgcttttgtgaaggatgtggttgcacgagctacttcagaggatttccattaatgactgttaagtctcaggagtatcagaaggcttgtctattgaggttgagttattttaattgggttaatagcatagagttgatgtgcctattctaatatcctagaatatttgaaagatgaacccattgcttaagatgaaattgagattatctttatattttattttaaatatagagacggggtcttgatatattgcccaggctggtcttgaactcctggcctcaggttattctcccaccttggcttcccaaagtgctggggttacaggcattgagccatcgtgcctggcgtctctattttatttatttgtgtatctcagtctcacttggtaacaaataattgagttagatgaagctaatgtttaaagattctatgacagaattggccttttcccctttaatatttatctttggaggctagaatttaaaatctagtggggtctttagaaattacctcattttacattttcatttttaaatgaagaaatttgaagcacaagatgttatcttgcccaaggcgaatgaggaatttagttacactgccatccattggttgttagcggccactccatgtctcaaggggcagatggttgattatcagacttagttacagactttagggcaagcctgaggataaaagtaattttctcagtaaagaaggtgttatcacagacaggtcatcagtatactaaacatgtatgcaattaagcaaataatgattaatttacacttgtattaggttggtgcaaaagtaattgcagtttttgccattaaaatagcaaaaagtgcaattacttttgaaccaacataatagttgtattcagtttagtgaatgaattagatactcaaatttagaagaaaccatttcttgtgttgcttatctaagtgttcttcgtggatcctgctctccttttggtcttttaattatactttattttttttggtttgtcttcaccattagactgtacacataaagacaggaagcctctgtcttgtccattattgtttccagcacccaataacagcactgatcgttgactgactcctaggtttgtgtggctatgtggaacacttagcatattttaaatattgcaagtttgaatattttattttattttttacagtgaacagagtatctgtcaggcaagagctgctgtgatggtttatgatgatgccaataagaagtgggtgccagctggtggctcaactggattcagcagagttcatatctatcaccatacaggcaacaacacattcagagtggtgggcaggaagattcaggaccatcaggtaaggctttactacaattgttgttaaaaatgatttagtattacaaaaggacttggcatattccgtaaaataaagtagttttaaaactgtaatcaaaatagtctctctctgggaaaaactgaatataaaattgtctctccaccctttctaccttttatgaagcctgaacttaaacgaagatttagaacaagttgtacaaaaatagaaatacaagttcttttatgatgaattttcattagattttctggccttcaattagtttttgaaatctaaagcaaattaaggacaaacaaacaaaactctacttaagtggcagattgtatgtttatggaattaatttcctgccaatgtttgggatatggggttagaggagggagttgaaagtatagatagtttcagaaaatactgttaaattcacatgtgatagaaaaatagtaggtattgaggttgctggaatagtttggcttttgcagttcatgtctggggcgacagctaagcttttactaattcctcgctctggatttcttagaaagtagctggattatctgattacttgatttcttgggccttaacagatcaacagcagtagatagaggaaaaggcagataagctcttactagcattaactatatactaatagtaagaacttttataaagagtagatttacaaaatactttgggaaaaaatatttaccaaagatgttggaatcaactgactttaaaaatcatcctgctacacatgcggaaagaatgtaacaaattttcttcttcattgcccagctgagctcttatgaagaaaggtaagttcctaggtttcccctacattgtgtggtagtgtggtgtaaacagatgctgcattagccctgggttttaggatggtgattatggattggtaagatttgtcatgtatgcatataggggctgtgggcctacgagaggttgggctgtgaaactggtattttggcaaaacaaacaaacaaacaaaaaaacacacaaaaaaactagcaatcttagaggggctacaccccgtagaaagaagacaagagaaatccttctatcagcacagggaagcaaaggagtgtgttgctttcttagctggcttagaagctcccccgagaaatgagaaactccttcacttaagcaacttaagccaagaaattaggaaacactggttgtagagcactgaaactgttggggcacgtggtaaaaacaaatgtggtgcctgcgtggagatgaactttcacagctctgagtcaatctgtggaaagagcaattctctgaatttaccagatttatccatttatacagacggtttcggcctgcctctctttctgccctctctggctcccttctgtctgtctctcccctgtgccccgccctcttcttttccctccttagtcttcctgcgttttcctctaggctccagtttccttgttgtgttgcacagcctttttctggtctcccaggctttttaccaagagccccctttgtcccatttgtagtccaggttctggggagcactgtctcatctttgtctttgttccagcagcgacttagtccagagataaatcaaatacaccccaagatgttattatggggaaaaaaaaagaaaactggacaattaaaattttgtagaaattgttgaaccttcttaatacaacattccaaactaatagctgtaaagaaactacgtttttggtaaatttagtgaattggttatttgaaagtactgatgaacaatcctacatttagagaaacaaaaaagaatatttgaagataatcagaaagaaattctttttttttttattatttgagacagagttttgctcttgtcgcccagggtggagtgcaatggcgtgattgtggctcactgcaacctctccttcccgggttcaagcgattctcctgcctcagcctccagagtagctgggattacaggcatgtgccaccatgcctggctaattttgtatttttagtagagatggggtttctctatgttggtcaggctggttttgaactcctggcctcaggtgatccacctgcctcagcctcccaaagtgcaaggattataggcgtgagccaccgcgccaggctcggaaagaaatttaagctaggaaatttgcatatgaaataccaaaatttttatttctaggagaagtaaactatcctatgacttagattttggaaaatagaatgtttcttaaaacatttaaaaatttaaaactgtgcttctaaattgtgacattaagaggaaattattatgtatattaaaaaatatttagaaaataagaaaacactgagacctgagtgatattacatatagaaacctgtaggacatctaagctgtccttagatggacaagtcttaattgtatgtagtaggaaaaaaagggaaactaaaaaataatgagcttaacccaaagaaaacagaagaaaatattaaaaagatattaattaaatgaaaataaatagtatttgttaatacaaaagctgcttcattgaaaagataaactagctggcgtggtggctcacacctgtaatcccagctttttgggacgccaaggcaggaagattgcttgcccaagagttcaagaccagcctggtcaacataatgagactctgtctctacaaaactattttttaaaacccaaacaggccaggcgtggtggtgcttgtctgtaatcccagcactttgggaggccaaggtgggtggatcacctgaggtctggagttcgcaaccagcctgactaacatggtgaaaccccgtctctactaaaaaaaaaaaaaaaaaaaaatagtcgggcatggtggtgcatgcctgtaattcgagctacttgggaggctgaggcaggagaatcgcttgtacctgggagcggaggttgcggtgagccgagattgcgccattgcactccagcctgggcaacaagagcgaaacaccatctcaaaaaaaaacaaaaaaccccaaacaactagccaggtgtgatgtgtgtgcctgtagtcccagctactcgagaggctgaggtggaagaatcacttaaacctggaaggtggagactgtagtaagtgtgattgtgccactgcactccaacctgggagacagaacaagaccatgtctcaaaaaaacaaacaaaaaaaacttgcagaatcaaacaaaaaaaaggaacagtacaaataaccaattttaggaatgaaaaaaagaataccactatagttactgaaggaaataaaatattataaaaaactttatgccagtaagtgggccattttgtagaaaaacgtaactttctaaaactgaagagtaggaaaacgtgatagacctacaatcatgaaataaataaatagtaaataatctgccccccaaattttaaaaagctgcaggagagtacagagcatttacaaatgaaatctaaaatgtcatgatattttctgttttatgcaaccattgtagagaatgatattttataaggcttgtataattttgatatccaaaacacagaacacgtttgggagaggagccagtcttcagttatgaatatatacctagatataatagtcctcaataagatattagcagaccaaatgtagtaatgagtaaaaaacaaaacaaaagcacttcttgatcaaatagggcttatcattgtttgccttagtaatataaggatggttaacattagataacttactaatgttatttcccaggagaaaacctacaaaagcaagaggttctggaaaaagcatttgataaaatttgaatcaatacataacagttctcatcacattaggcataaaattaatcttgttaagctgatatgggtagataatagaagcatacagcaggtatcttacaggattgtacagtgtcaagagcattcccgttaaacttgtgaataaattgagcatttcagctctaatcactttcatttagtgatacagaggaggtactagataacctagccatacaaagtttaagaaatagaagcagtaagaattgataagaaagaaacagctggttactcaccaatgatgtaattgtctgcataaaaatctcccaggagtatctgcagataaactattagaactaacaagattttcagtgaggttgctggttacgtgatcagtatataaaagccactcgcatttttgtataagcaataaacgattagaaaatataattttattaatataatgatacttaaggaaacaccatccctaagaataaatctaataaataattggttttctgtctttcattcttgcatttcgggttttttttttttgacacagagttttgctctgttgcccaggctggaatgcagtggtgtgaccatagctcactgcagccttgacctcctgggctcaagtgatccttctgcctcagtctcctgagtagctgagattataggcatgagccactgtggctggccatcattcttacatatcttaatggttatcagtctgttctaagtgggcacatgttgttataatttactaaatatctaaactttctatagtaagagctgttaaaaccacccaccatttacttacaaaattgaatatgtacaattatataaatatgttatataaaaaaatacttcattttccagcctaacatttattaagtgcttatgggtactatgcttgggtgtgttttttttttttttttttttttttttttgagacgcagtctcgctctgtcgcccaggctggagtgcagtggctcgatctcagctcactgcaagctctgccttccgggttcatgccattctcctgcctcagcctcccgagcagctgggactacaggcgcctgtcaccacgcccggttaatttnnnnnnnnnnnnnnnnnnnnnnnnnnnnnnnnnnnnnnnnnnnnnnnnnnnnnnnnnnnnnnnnnnnnnnnnnnnnnnnnnnnnnnnnnnnnnnnnnnnnnnnnnnnnnnnnnnnnnnnnnnnnnnnnnnnnnnnnnnnnnnnnnnnnnnnnnnnnnnnnnnnnnnnnnnnnnnnnnnnnnnnnnnnnnnnnnnnnnnnnnnnnnnnnnnnnnnnnnnnnnnnnnnnnnnnnnnnnnnnnnnnnnnnnnnnnnnnnnnnnnnnnnnnnnnnnnnnnnnnnnnnnnnnnnnnnnnnnnnnnnnnnnnnnnnnnnnnnnnnnnnnnnnnnnnnnnnnnnnnnnnnnnnnnnnnnnnnnnnnnnnnnnnnnnnnnnnnnnnnnnnnnnnnnnnnnnnnnnnnnnnnnnnnnnnnnnnnnnnnnnnnnnnnnnnnnnnnnnnnnnnnnnnnnnnnnnnnnnnnnnnnnnnnnnnnnnnnnnnnnnnnnnnnnnnnnnnnnnnnnnnnnnnnnnnnnnnnnnnnnnnnnnnnnnnnnnnnnnnnnnnnnnnnnnnnnnnnnnnnnnnnnnnnnnnnnnnnnnnnnnnnntttattttattttattttattttattttattttattttaagacggaatctcactctgtcgccaggctggagtgcagtggcgccatctcaactcactgcaaccttcaactccctggttcaagtgattctcctgcctcagcctcccaagcagctgggattacaggcatgtgccaccacacctggctaatttttatatttttagtagagacagggtttcaccatgttggccaggttggtttcgatctcctgacctcatgatctgcttgcctccgcctcccaaagtgctgggattacaggcgtaagccactgcacccagcctgaaaatatttaattttaatacttttaaagattatttgcagtactgtctatcctcaatggttagatgagtgaaagaattaattcagattaaaaaaaatttgtttttgtttttgagacggagtctcactgtcgccaggctggcgtgcagtggtgcgatctctgttcgctgcagcctgacttccctggttcaagcttttctcctgcctcagcctcccgagtagcagggattacaggcacgcaccaccaagcccagctaatttttgtattttcagtagagacagggtttcaccatgttggccaggatggtctcaatctcctgacatcgtgatctgcccgccttggcctcccaaagtgctgggattacaggcatgagccactgtgcccaaccccagatttcaaatttttatattggaaaaaggaaacagtagtttatgtaattttgatcctagtaatattttccacaactttttctagcattctgttatgaacaattgaaaaagtaaatgtaacacatcttttctcttgtttgccattttaagctgtttgccaagcagggatattgatttgccttaaaatgggtcttctaattttctgataatgttaaaatttagtagctttgggtttctagtgtcttctaaggaattgtgacacccccaccccaatatttataaaaaccacatcaggagggtgggcacagtggcttgtgcctatagtcccagctatttgggaggctgaggcaggataactgcctagggccaggagttcaagactgtcgtgtcccatgattgtgcctgtgaatagccactgcactccagccttatggtaaaatgtgcataacatttaatctttttttttttttgtctcactctgtcacccaggctgcagtgcactggcatgatctcggctcactgcaaccttagcctcccgggttcaagtgattctcctgcctcagtctcccaagtagctggattacaggcatgtgccaccatgcctggctaatttttgtatttttagtagagacagggttttgccatgttggccaggctggtctcgaactcctgacctcaagtgatctacctgcctcagcctcccaaagtgctggaattaccatgagctacctccagccttggggggcacaggaagcccttgtctcaggaaaaaaaaaaaaaagttcagatttgcctaggttctagtaaacagagtgctacccatcccaaattgaggaagtcccaatggggatgtcctggtagtgtgggaaggctggctatggtgctgctgaacagccactttgactcggtgtctcctttggccaagttacagagcagactttctgggctagtcctgcttccccactttggctgttctcagggatatttctcccttctggcactcccaatgcttcccatggtttgagatgacagatgagtcttttgccgtgaacccaggatggtggagaagtttgttgtttaccttgatctcactttttccagtgtagaaggcgtgagttgggggagattttctgcgtgcttggtgccaacaggctgtggggagggccattgtggatatggaggtctgattctcttactgtctgctgagagcttttttatttctctgtgtctccaggaactgtctcctactcctatttgagttgtgggatattgctggtgctgtatacttgattttgttttgttggggtgcagggagagtagggaactattaggttggtgcaaaagtaatggtggtttttgccatagcttgcttctgcgctgccattttggaaccagatatttcacagttcctcttgttctggttacaaatttatgagtcacagcaggagactttaacttacttctgttagtaactgatggaacaggcagtcagaaaaaaaggtctgtaagaatgtatagaaggtttgaacaatacaattacctccctagcctaattgacatatataccacatacctttgaaatgtacgtcacaatttcaaaattgtatatatgcttggccctaaagaaagtgtcaacaaatttcaaaggattaaaatcatacaaagtgtatggtcacagcagaattaatctagaaataagataatagagaatcccataggtgtaggtgttaagaaatacctttctgaatagtccatgagtccgagaagaaatcacgatgaaataagaaaaattggttgagctgaataatgatgaacatgccacatattaacactaatagaatgcaactaaacttgtgattaaaatgaaatttagaggctaaaatgtttatcttgaaaaagaagtattgttgacttttcagccagaactcaggatgcatctcaagaaattaaataataggccattaaagccatatagaatattaatagaaagagggtaacaataaagataagagcagaaacaggccaggcgcagtggcttacgcctgtaatcccagcactttgggaggccgaggtgggcagatcacgaggtcaggagatcaagaccatcctggctaacatggtgaaactctgtctctactaaaaatacaaaaaattagccgggtgtgttggcgggcgcctgtagtcccagctactcgggaggctgaggcaggagaatggcgtgaacctgggaggcggagtttgcagtgagccgagatcgcgccactgcactccagcctgggcgacagagcgagactccatctcaaaaaaaaaaaaaaaaaaaaaaaaaggcagaaattaatgcagtagaaagcaaacacactaaggaggagaggtttgtctctaaagtccttgtgagggacagctcttgaaaaaaaaaatggtttaaccattatgaagaaagaagggacatcactgtgaatcttacagacatttaagtgattaaggagatattttgagctactttattttagtaattttgaaaatgtagatgtagaaattcctacgaaaacactttaaagaaattaagactatcattaaaagaagtaaaaggaagaaaactttgtttagctggctctactggtggtgttcttttcaaccaatcctttaaagaacaccagtattacgtacttttttccagagaatacaaaaagaggatgcctatctttttgtcaactctacagtgccaattcattttaagtccagcattactttggtatcaaaacctggtatgaatacaatagagaggaaattacaggttaatctcactcataaaagtacatgtaaaaatttcaaacagagcaatatcaaacaaaaatctagagatttataaaaattgatatatgaggaccaagattgtttatcctaggaatgtaaggttggtttaatactagaaaatcatcagtgtaacttactgcataaaaacagaaaaaccagtcacctcaagagatgttggggaggacttgataaaatgcagtattcaatcatgatggaaacccttagctgtcaagtagtagggtttttccccagataaaagatatcaataaaattattacatgaaaggtcatttatttatttatatatttatttattttttgagacagagtgtcactctgttgcccaggctggagtgcagtggcagagtctcagctcactgcaacctctgcttcctgggttcaagtgattcttctgcctcagcctcccaagtagctgggattacaggcacatgccaccacgcctggctaagttttgtatttttagtagagacggggtttcaccatgttggccaggctggtcttgaactcctgacgtcaagtgatccacctgccttggcctcccaaagtgctggaattacaggcatgatccacctgcctggtgtgaaagatcatacttttaacggtttaattgagaaagctttccttctaaaatcagaaaataaagatacttgttatgaacactttttttcagcattgtattgttatttctagccagtgtatggagataaatacattgtgaatggattggaaaggaagaaataaagctgtccattgccgatcacatgattgtgtatttagaggaaaaaaccttaatgtaaattattaggaatattagaagattctaatacttagaactcgattaataatagaaaataataaatctaatgaaagatcctcaagacccctataaagatacttaagagcctcctcagattgatatgttagctttcatgcaacctcaaagtccccaaaatttctttggtagaaactgataatcagaatgtaaaactagctgcacacaaaggactgagaagagccaaagcaattttgaagaatgaaacaggaagacacactctaatggtcatctagatttcgtataaagctacaacagttaagacattgtagagttggcaaaaaggcatattgatctgtaggtgaaaatagagccttatagacacttgatttatgtgctgcaggcaaacctgcagcacagtgatagtgctggatcatttggacagccatattgaaacaaatagcaaacttgatccctacctcacaccataggcacagatcaattccagttggattggggatagaaatatgaaaggtaaaataataaagcttctacaagataatatgggacaatattttcatgaccttgtgattgagaaacatttgttaaacagggcactaaagcagtaactataaaggaaaagattgctaatttgaacagaatcaaagtgaagaacttacatccatcaagacaccgttaagagtgaaaaggcaattcatagaatggcataagatatatgcatcacagataaccaacaatgatatcatatctagaatatataaagggcttagaaatcaaagaagaaaaaagttgacaactcaggagaaaaatggacaagagacttaattcaagcagatattcacaaaaagagacatctagatacctaataaaaatcagggaaatgcaaactaaaactgcagtgataaagcattcatacccaccagaattgctaaaataaagactgacagtaccagttgtaatgttgcatagtatgtagaagtagcacaagctcttgtatactcttgtggaaatgtaaattactagaaccaatttggaaagctacttggaattttctactagagctgaacatacacatgtcctgtgatatttccactcctgggtatatgcccaacaaaaatgaatgcttgtttgtaccaaaagacatgcagtagaaagttcataacatcgcaatttttaatagcccaaactgcaaataatccaattgttcattaatgggagaatggttaaataaatatgatttatacaaacgactaccatagagcagtgaaaatgaacaaaccacagctgcatgcaacaagtggatggctcttacaattttgaggataagagagcagatacgtttaatacatgttgtataactccatttatataaaatccaaaaacctacaaaactcgattaataataggaaataaatctaatgaaagatacttaagacccctatatagatactcaagaccctcctcagaatgatatgttagtttttggatttcatataaatgtagtaatttatgatgttagaagtgtggctagtaccttttgggaggtgggaggagttaagaagaggggcttctggtgttgctgtttgatttcttaatcagggtactgacttcatgtgaacattcagagagatacactcttaggttgtgtatacttttttgtatttgtaaaacttcagcaaacaagttaaaatatatttaatgaggaaaatttttttttgttttgctgatatactttttttttttttgagacagagtctcgctctatcgcccaggctggagtgcagtggtgtgatcttggctccctgctaactctgcctcctggattcacgccattttcttgcctcagcctcccgagtagctgggactacaggcacccgccactgcgcctggctaattttttgtatttttagtagagatggggtttcaccgtgttagccaggatggtctcaatctcctgacctcatgatctgcctgcctcgagccctcccaaagtgctgggattacaggcgtgagccaccgtgcccggctgatttactgttttatggcagacctttgtaatcagcgaaaagcttaacttctatcagactgatatttgtgtagattttacccagataattgtttaagcaatttttgccaaggtctgttaggaacacatttgaatgaatatatacaatcagcatttgttgacatccttgattttgccaattattggtttgactttataaagaattattattttttaggtcgtgataaactgtgccattcctaaagggttgaagtacaatcaagctacacagaccttccaccagtggcgagatgctagacaggtgtatggtctcaactttggcagcaaagaggatgccaatgtcttcgcaagtgccatgatgcatgccttagaagtgttaaattcacaggaaacaggtaaggtgcccatggtttatttgtattttctttctttttccagagacaaagcaaaactgaagatttacttgtattcttgaactgaagtgccatgtgtatgttaaaacaaatgtttgttaacttttagatcttgtatatatttgaagtagtttttgaatttttattttctatagaaatgtgaactttttattgatgataaatgtataatctagaaagataatcctgtgagtttagttctttttaattctgtaacccttttatttgaagtatttagatgggtttcatcctgctttagaaacacttccgttgcaagtacatgaagcccagagaatatgcagtggataggaattatgcttatttatcatctttgtgtaaagaaacacatgttttctgaaagacatttttcaaagcatggacttgaagtaggactgggtctccttcccagtaggtaaaaatgtgattctcggtttttttaaagattttaggagtgccctcaggtggtatcagtcatgaattgcatctcctctgatagtgcatattggttagaaatatatatagaaatcactttttaaaaaaatctcaatttttaaaaactgtacatatgtcaaggataagctcagttttgtcttggtttaaaaaatagaaaaatgtaccagtgtgtggttatttctttgaagagagagattttataatcaggaaataattgttatacatgaaaacacaaatatgattactcttgcctatattgtatatttagtaatgattttaatgatataaatgtactgtaaacaatatatattttaagaggaaagagttgcagtcagatgaaaatttgatactttgttgaaagtgtagaatatcaaaatctgttcaaaatctgttataaatacattaaacaatgtatatgttgccttatactaaaaagggttgaagcatctagctggtgtgttagtctgtcaaatactaatttcagagcaagaagacattttgggatcttgcagaaacttaaagttgttatgcctttagatgttttgtatcagatcttcttttgaggaaattaatatcaatacataacttatacataggttgcatattttgtctagtttgagaaaataaaccactagaacttggcctggtgtgtctctaagtccagaaaatagcataggaaagtctgtatagtcttgtatgtaggtcatttctctaagtctctgtacttctctcctaggtgtcagtattttattggcatgctatcataggtatagaattgcttttcatttactgtagttttaccatagggaagaagctagaattgtgattctttttttttttttcttaatatcttgttggataggtcagttatgtgataaataattaaggtaccaaagtttggagagtagacatttgactatcccgtgttttagaacaaactagcattatttttatttctaaactttcaaaagtgtatccgttgatattagaaactaaatgttactgatattaggaacttatattggaaactaaatgttccttttttaaaagtagttaaaattttattattcctcttgtcattgacttttgatttttagtttttagccaaatggaaaggattgtttctctcaatgagtagtcatatggtttgatttcaaaatgcaaatttatttatttattttttgagacggagcctagctctgttgcccaggctggagtgcagtgacgcgatcttggctcactgcaacctctgcctcccgggttcgagtgattctccctccttagcctcccaggtagctgggattaccggtgctcaccaccacacccagctaatttttgtatttttaatagagatggcgtttcaccatattggccaggctggtctcaaacttctgacctcaagtgatctgcccacctcggcctcccaaagtgctgggattacaggcatgagccaccgtgcacagcctttttttaaatcttgatcttttcaaattaatgaatcttaatgtggagagactcaattacattctctattgtaaggtaataagcattaagaaacaatgttccacattatagaaagtttggcaaataggaaaatcggccatcattttacaagctacacaagcattttagtgtgggaaaaaggcttcttgttagatgattttgatactttattctcagtcacaatctcaaccactcatactaggggctgaggaaagagagataatggtggaagaaatgagtccatcacagctgcctcctggtattgtggatcagtcactggcaaggaagcttttagttctgtagtttttcatcatggaaaaaaaaccatatagaatggctaagttctaaatagtctgatttacttagaaaatgactgttttcataaattactgtagttaaatactatttcttatttttgatggccttaattagtgtggaagtagaagcatgggagagagtaagatgttaagaatcagggccgggcacggtggctcacgcctgtaatcccagcactttgggaggctgaggcgggtggatcacgaggtcaggagattgagaccatcctggctaacatggtgaaaccctgtctctactaaaaaatacaaaaaaattagccgggcgtggtggcgggcgcctgtagtcccagctactcgggaggctgaggcaggagaatggtgtgaacccgggaggcggagcttgcagtgagctgagatcgtgccactgctctccagcctgggcgactgagcaagactctgtctcaaaaaaaaaaaaaaaaaaaaagaatcaggagtgttcttgggaatagatataatttcttacgcagattctccagtgtagaaaaggtatgtaccctaccccaacattatatgggccacctcccctttatctaaacaaacatacccaataatgtcacctctcagtttgatcataccctgccaaaaatctttgctttggattcacagccaattggctgctgaaatcatctactgtctttcttccaaaaccaagttgaaaaagcttaacttacatctcccttccctttacaaactgtagcctgataaaactgatgagaagcagaacaaacttattgataaagcaactacaaatattagtcttgcctgtttcttaatgttttaccacttgttaaaacatttttccatattaaacatttctgtttgtatttttatttattaggtgctaatatcaatattatccactgttgtcatcggctaatccttctcagtgattttcagactttaaaaagttatggacatttttgtgcaaatgagatctttggtagttcagtgtataaatggacagaaaatatggagcttctctgattgatatagggttccggatccgcaaccactgagatgcctccatggttctctagaactgaatttgaaaattactagctcacgttttgtgctaaaaccaataatcacataattttcctttcctcttcttccgtgtcccctacgtcctcaaattttttaaatttataaaaaacagctttctggggggctagtcataccaacctttacaaggtgctctgtgtgtttgtgtgatatttcctttttttaatgaaaatggtgggtggcagaaatgttttcctttattttgtttttaacttggtatgcaattatctaatatactggaaagtacagaaggtgctaaatacagtgagttatatttggaagttaaaaaaacacaaatcacatgttctaacatttttgaaaaagagctgaattagtgctcttccttttataccaaatgctacagtgtattttttcctttctccatggaaatggattcaattttaaatgggtgtattacctaaagtgatatttttgatttctctattatttatccagtacatttatagatttttataggtaatagttatggattatataaactacaaagttaatttttgtgataattggtggaggcaaatttgcccaacttttattttcttaaaaggtttaaatcatttgaaaataggaaataatttttaaatccaaaaaaaagaaaattatatgcataaccagtaagattatcccactgcttttgttctcagccaagatgaagcatgccttttcaaaaagaacaccccaaaataagtattttaccattatctaaaagactacttttgctgggttttattttttaatctattgaacatgagaacatggtcaaaagtcataccttccttatggttgaaattttctagaggttttataatattgagatttcattttttaatgataatttggcctgacataccttccagtatgtacatttgtatgagttttatcacagcatttaaaaatctctttatgtttggaattaataggattaaaaaaatctcagtagtttctagaaatactttatagtgacagttttgttttttagtcttccagattgttgatattaatgcaaacaatattaagcttatatcacaaaaatattttcagtaaagcgtattttttataaactgtgttaggcactgggaataatacaaaaatgataaataaagcctgtcccttgcctgatgtcacagtcgggctacagctgccagaaacaaggccagcaaaattaggatacagcttgcgaatgtagtgtgaagaaaggccttcggaataccaaagaaaattctagggtcagggaaagctttgaagagaaggtgatgtttcagctatgtttgaagaatggggagggctcatcagtgatagaacattctagataggtttggaagcatgagagcatggagcaattgggaaataacaaatatgccatgatgtggcttggacatgagaatttatgtggtgggggtcaggagcagggcatcccaagagataaggttgggaagggcctagtgctgacgagtgtgcatgttatcatggaggtggtgaagagtcattgaaggatgctaaataaaggattgatatgatcaagtttgtgctttaggacaagtgtggtgaacatgcaagtttacaagcatgaagatcaattcaggacactgttgtaataataccggtgagaaagatgaggcctgaactgacaaagtagagagaggagaggagcagaatgaagaggaggtgaccagctttcatttagtgctggctatacctgccacggcagtgttctagctttctacctttgtcctcacatagaaattaaagccattctgaggcaggaataatgatctatttattggtcaccttctgtgtgcttggtcttaatctggcgtatacataaccaatcatctttataacaatcctacaaggttggtggtattatccttgttttagaaatgagattggcacttacagaaggtcactactgtagtgatgcgaggacccacagctagacagtggcattagtggcttttgtaccgaggtcttagaactcaacctcttttctctttgtcagtaagatgtaatgggcaggccgggaaggagagaacagtgttttaaaatgatgaccaggtgtgtcagtttgggcccccggtaaagatggtcctgttaaccagagacagagtgaaagaggatggaagaggaaatactgtgctgcagataacacatttggttctggatatactccatttgcggttctttattaatgctttcatgaaatcttaaaaatttggacctgaaaagaatcccaaagataaccctggacaaagttttttagtttagctttccgaaacaactaatcttattggagaattaacattttgaaccctataaaacctatctgtttggccaggtgcggtggcatacacctgtaatcccagcacttagggaggccgaggcgggtgcatcacttgagaccaggagttcgagaccagcctggctgatatggtgaaacctcatctctactaaaaacgcaaaaattagctgggcgtggtggcgggcacctgtagtcccaattactcgggaggccgatgcaggagaattgcttgaacccgggaggcggaggttgcagtgagctgagatcgtgccactgcactccagcctgggtgacaagagtaaaaactctgcctcaaaaaaaaaaaaaaaaaaatctgttcactaagtattaagtgagtaacaggtttggggattgggtaggtggggacagtcttttcgtaggtctgcctgctctactttcttctcatacttacctctcacagtcctcccttttgtgaatcacagtaatgtgaggttaatatgtctgttgtcactcccaatttccaattagaaaggttgacatggagagctgggatttccccaggctgtccatacctagaaagggaggcacaaaggggattgggttttcgagccttcaggccatttatttttactgcgtttgtctggccttcagttcaagatcttcaaagcatttttaaaaacgcctttgagggaagtcagtttagagtgagaaattaggaaagcaaaaatttgaatttacttttagttttgtgtttttaagtaaactgttaaggtctttattgtgatttagtagaaagaacttgagtttagagtcaaaagactctagttctgtctctccctctggtgctttctctaaagctatttcctaatttataaaatgtgagtcatgagaatatttatgtcaggatatcatgggaattaaacaaggcaaaggcatagtattaaactagaaaatgttattttgaatgctaatgtccaaaaaaaaaaaaagaaaatgaaaattctatatggattaacttagaggaaaaaaaaaaagtaggctttcaaattttctccaacatctgctttgtcttaactgcccggtaaagacatatcttttgggtgttttctttttttctatagacaaattaattcatccatcatttgagtgcatctgtatgccagcgcaaattagacacaagtcttgtcctcacagatcttctttctcctcttacaggggaggtaaggcacaaccataacacacaagagaaaccctgtctgaggacagataacatactgtattgggtgtgtgaaggggacgagccgccttctcactggagcagccgggaacatattagtgacaagctgactttcaggtctggattttgaaagttggacatactgtaggcatgggaagatgagggggaaagacatatcaggcctgaggaatagcatacctgtacaaaaagtgggaagaatgagctgtgtttgtagagcagggaattgtttggcctggtgggaataaattcagaaaggtaggtgatcaagaagggcgtttgagacctttgggtgatagagattcagtgtaagttttcaagcaagagtgataatgtgagtaaagctgtactccagaaagctagctgtggtttgaaaagggagctactggaggctgtaagtcaagcattcagttcctgagtggaggcagaaatagagaagaaaattcaaacagtggtagaatgaggtgaatttaaacaggaaaccaatgtggttctgattgtacttcacttaggtaactttttcattaagaaagaattctggctacctattctcatatgttaataatagaggtcttggccgggtgcagtggctaacatctgtaatcccagcactttgggaggctgaggtgggtggatcacgaggtcaggagttcgagaccagcctgaccaacatggtgaaaccccatctctactaaaaatacgaaaataagctgggcatggtggtgcgcacctgtaatcccagctactcaagaggctgaggcaggagaatcacttgaatccaggaggcggaggttgcaatgagccgagattgcaccactgcactccagcctgggcgacagagtgagactccgtctcaaaaaaaaaaacaaaacaaaaacaacaacaacaacaaataatagatgtctccgggaaagtatcatatatgtttgaatataatgtgtgtgacacctaaaattatttctactgtatgaagaaaatcagtactttgggagaaacaggtaaaaatgaaaatgtaattcagcatcagtttgagtttcactgtgagcctcagtccaggttttagaaagaaaggtacgtagacacaattctggctttaaatagttcacaatgtggcaaaagaaacttcattaatttcttaagattaatgataaatacagtttctttgggcagattgactctaaatattgagttcaagggggttaattacagtataaaagggtttctagctgttgaaaaggttgggagctactgaattaggcctccagatcctgtggcctacctgttatacctcaaagcctcaattttcagccgcttccttagcctttctcaaccagggctgtgagacagttaagctctaaggaaaattgtttgagtaactaatatcagttctcccaaggactgtatttaggtattctttacctaccatggatgtgttagggccagactctcttggaaggatgcttctcttctgttctcttcccttgccctctccctctctttatgcttctgttttgtgatcccccatttacacacaggaacaacctcaaagttctgggttggaattgggaccagaaaatgactatagctttatcttctaatatttgtgttgattaatgcttgaaattatatctaataattcatagtcactaaaaagaaaatttgagtgaatatttgatagtagcttatcctcttaaagtttacagacctcaggccaggctgattctcattagggccaggcatgctggctcaggcctgtaatctcagtgctttgggaagatctcttgaggtcaggagtttcagaccagcctgggcaacatagtgagagcctgtctttaaaaatacatatattaaaaattaggtgggcatgatggcgtacatctatagccctagcttcttgggaggctgaggcaggaggatcacttgagcctgggagtttgagtttacagtgagctatgatcacgccactgcaccactccagcctgggctacagtgaggccctgtgtctttaaaaaaaaaaaaaaaaaaaaaaagtttacagatgtcctaatcattagagctaataaggcctaaattactatgtacttgctggttctccatgttttaattttcctttgggctaaatcaggtgtaaaattgggaatcttgaatttaaacctctaactcagggattcaaaaagtgtggtccatggcaactcttgagggtccccttctggaccgtttcaaggatcttcttcattatacttcagccagaacagcatgccacagcacactgaatacaaaagcaattgaaataatctagctgtctggattattatttaatatttagtgttaaatgctaaagagatttgtaaaaccatggcattctaatcacttaatatttttgttctgagaaatagttatttttcattaaaatgttattttaaatataactgctttttagttgttttaaaagtgaattcctaaaagttaaaacatgtaatttagttatttagtacagtaaataatgatagatgtaacccacataagcaaaagctctttagggtctttaataattgttaggaatataagtggatcctaggaacaagatctttgaaaactactgccataacttaggagggacagctgttcactaagaatgggatttctatagtctttttatcttttccaaacagcctagcaaagcaaaaaaatcttaaaggccgtgtgtcagatgggcttgattattccatattttctgtctcttcaatgtagatggacatgcctagctttgcctgtaacagagaactctttcttcctgtctttttcctttctgtatttcatcttctctcctcccccatgaggacattatggagggctggccagaagtgggactttgcaagtcacagaagtggcaaaaattattcctaattgctgttatcatctgtcaatgaaagggaaaatgtaggtctgatggcctttttgatgcttaatatataaaaattgcccagcaattagctttgtaaccaccatctatttaatagcagtaactgttgttactagctgtttctagctctgtctcagtcagtacatttgtgatttttctttttgtgattttttttgtgattttttcataattatatctgaattacatattcatatatgtggatttataaattgttcatactaaattacaataaatacattttaatatattaacttctatgacttttaagttcttgttcactaactgtctgggaaagctgctttagcttatgaagcctcatttttcatgagcgcagcttttagtcttacgttgtgggacttaagacatcttgtcctgccccaaggtgggaatgattaaatggctaaaaagaggcagatactatttttgtgataaatatgggtttcatgtctcatagcaagtaattttagcctggagtttgttgtcatacagacactatattctgtctgcctttcattcccttttctctacttccttgtttctctggcagttaggcaccttataatctattgtctgatgcatgtccagctagtgacttcagttcttccaggcttattttacaataggcttgatctttattcagtggtgctacaatgacctgaggatgtcatctgtgattatttgcatgctttcttacatgaggatagtaatttgcatgtaattactttatctttattcatgaatttttatcctttattgctcataaattgaagaagcattttgctggatgttaaatagtcaaaaattgtgatacctctgtgtggaacattttcctcttaaaacaagaataaagagaggctttaatagtctgtcttgttttccactgatgataagagatgaattgcaggaaccacttccactctgatgagaccattcacaacacacagcagcagccaaacctgttccacgatttttacagcttaatctcggctgtgctttcgtgcatttggaagcgtgatggtgccctgtcaggtcgcccatgtgcatattttggggcattgcctctgagttaacattgggcattcctgttttcataatctaggtaaggtagaaaaattctaaggagtcttttgaagatggtgttgaatagcagtatctttgaagttagttggtatttcatatatgaaaaatattgtgacattatttcattaatacataaaaaattcctaaggggtagatgctgttctaatctaagagaagaaatgctgtagttaactggaattatttgtattcctgttaaggtactatgttacatgagatgagagaaacaaataattcaaaatttttggtcttaaggaggctgttaattgtgtagatagtataagtcatggtcaaaaatatccacaaggcagtgtaagtaacatgaatggtgcagaatggtagttaggaaacaaatatagaatgctactcatgtaaaggtaccaaaaataattcttacaaggtagacctgctatttatgtgagcttttgtaatttctgaaatgattcacatgagaaaacaaatgacttctgtgttctggaaaatttcaagagtatttggctattacattgtcattcatgtaggaagaaatacattttttatgaaggagtttattttgcaaatattatcctgctctttgctgtggtaatattgtaacaaagagaattccttttcctattcagaaatactcactggtttcccattgatttaaagttttcctcaagccttgaaatcagtcccactttgaagactggatgaatgatatgggtgcctaggaaatgtgtctccagtctcttctgcagataactaatggaattagccttatattgctaggaagatggtagagtgggtttttgcataactattgtagtatgcagcaataaccctgcaatggcttcctatcaatcttagaataaagtacagaacttttttttttttttttaagagagagtcttgctctgttgcccaatctggagtgcagtggtgcgatcataactcactgtaacctcgaattcctgcactcaaaggatcctcctgcctcagcctcctgagtagctgggactacaggtgcatgccaccacacccagctcatttttaatttttttgtagagatgaggccttgctactacattgctcaggctgctcttgaactcctggcctcaatgtcctgcctcagtctcccaaagtgttgggattacaggcatgagccactgctcctggccatctttaattctatttagtaaatcccatgtgagacaaacccagtttatttaatttttatgtattcaaccaaactattttaatagaattttacatatttttgaatttcaaaaagtaaatgtggacaattttgtcatttaaatattagctgtcttgtgttgttttagatagaggttgcttcttggtaagcagcttcttgaaataccaggaattgtcacgcagagagatagagaaggcaagggcaataggattcccatggaaaagggagacagctgtctttgtttaactaggacagtcctggtttttgatgaaccatcctgaatggatatgtactgagagagtcatgacctaaaaaatgcctttgggtttgattcctcctggaaagtagtgtgatggcagaacagccactgtatgccttctctcaaccagctctggtgtttggaaaagggtattcaggtcctggctttgcagtctttccaaacatttggggtcatgttggcgttattcatagagtcacttcattctttatgtccagttctcttgttagaaactagagctaggctaggcgcagtggctcatgcctgtaatcccagcagttcaggaggccaaggtgaaaggatcacttgaggtcaagattttaagaccagcttgggcaacatagtgaggccttgtctcttccaaaaaattaaaaagttagctggttgtggtggtatgcacctgtagtcccagatactcaagagactgaggtgggagggtcacttgagcctgggagtttgaggttccacttcactggaactcaccattgcacttcagtctgggcaatcaaagtaagaccctgcctcaaaacaaaacaaaaaacaaactagagccagttagagctctgtccatctagaaccactcttgttaacagaactgtaatttccacagcattttgtttttcaagtgagaataagttcttctgatgataaagtcgtgtgctatttataaaaatttaagcagtataggaagcatgaagaagaaaataaaaataccgaaaattccaccaatcacctctaatacttttcaaaatggaaaaagcagtaggcattgggatatttttaaactttgtgttataaacaattgtgagatgaagaacagatgcacagcatggcacttgttattttccgtaacagctttatcgagctttacttcacataccatacggtttacccatttaaagggtacaattcagtggttttagtatattcacagggttgtgcaacctttgccacaattttagaacattttgggttttttttttgtttttgagactgagtctcactctgtcgcccgggctggagtacagtggcgcgatcttggctcactgcaacctccgcctcccgggttcaagcaattctcctgcctcagcctcctgagtagctgggattacaggcacatgccaccacgcctggctaattttttgtatttttagtagagacggagtttcaccgtgttagccaggatggtcttgatctcctgaccacgtgatccgcacgccttggcctcccaaagtgctgggattacaggcatgagccaccgtgcccggccaattttagaacatttttaaccacaccagaaagaaaccctctacccttaagtcattgtccctttaccccaattcctccatacctcccagcatctggcaactactaacataatttctatcactgaagatttgccagttcttgacgttttatataaatggaatcataaaatatgtggggttttttttgtgactggctttcaattagtgtactgttttcagggctcatacatcttgtagcatttatcatgcatggcattttgaaaagcaaatcttagttaaaaaacatgtatttatgtatctaggcatgctttcttagttttagttactggctcttattttaattgtgtgagtgtggtgtatagtgaaaagtaatggctaaatcttaagaatttttaaagcaaagattaaaatcaaagcaagaagccttcctcagattctttagtttttttttttttttttaaataaacgttttaaaacttggtaaattatgtaaaggagaactgtgtagcattttcaatgccagattgaatgtaaacagggatgaattcttgaccaaattgtggaaatgtctgaggtttattctcttggtccaggctcagttttcttgcccagaattgccctatcttcactgccttcattttttccccacccctaagtatgttactgtagttatcagaaacctcatgcctttgtatttctcttaattctttttttctcctataaaagtgggagaaaacagacatggtctttgaaagtctttttaaattacttataaagagtaaaaacacctatcttggttaaaggagattcagttttttacatgtggataagagagtgaaattgtgtttccttaaaatgatgtgaggtatcctcttatcttgaacgctatggaattgggtgcctttatcattttcccctgaaacttccagcttttaggctattccaggtttattttctctctgttgcccactcgcatccagagtgaaagaaacgaaaacaaaccctctttcttttgtacccaaatataagtttgaacctttttgcttaattttaatatcattctaaaacttttctcccgagagtctttagacagatttctcatatttcctaggaaatctgatattatctaattttatatttatacttctctcctttcaaatctcttgaagtggctaatcagaaaaaagcatatacaataaaacctgaagtaggaagtgagattccaagtgaaagaagaactaattattttagttttctgagggctaatagtaactctgagtgttgactgccagaaagttctagttggtacaaaaagaggcacgccagttgagcaagagaataatattagaagtagaaggcacatgcatgtttcagaaaggctctgcagaggaaaggtgatacagcatatttgagaaattgagagaccggtgtacctagagcctagagagcaatagagtaggaattggatgagatacgtggcaatcacatcatggggggcaagcactggattttggtatttatcttaagagcagtgggcagcaattgaagagcttttactaagagcgatgatttgggttaattattaaagtatcactggctactgtggggaaggggacagataccacgattggaatgggcaacttaattagatgatgctaatgtaattgtctaggttggtggtctctcagtttttgagcttatcccctcatacatgtgtgtttatcatttatatatatgtactttgttgttgacaagttgagtacattataagacgttaaaaaacagtaaaatggatgagaaaaattaatgaatggaagtgctactatttttttccctgccccaactgatgtatgttaagcttctgggatacttgttgccccaccctgaacatgactaagcaagggatcatggaacaagaacagtggcaatggagagagtttggagagagaaattaggaggttgcattaacaggacttgaaaattggttaaataggagtaaaagaaaaggtagtggatttctggtttgtgtaactgaatagataagagctctgattaaagagtcaaccaacactctgatagatgctaattgtgttaaagtagcattctgccagaatgtggtggtttctctgagcatatactcaataatgcccttagtaacaaatggtaggagggcatttgatgggcaagtcttgatctgtgttcaggaggaggaagcagagcaatgaacctgaggacacaggttactcttgcctttggaggcattagggtatgacagcattggtaaatgataggcccctcaacttccagttgcctcttcaagtgtctttagctagaggcagggccattcatttcacgactaaaaataaacggcttacaaaacatggtggactgaggaacatattaagactattgccagtgcagacaaataatttttcagcaagttatcaactgatagaagtgattttcatattggcttagaagggaataaaatgcattcgggtcataagttgggagaggattgcaagaaataaaggatgggaaaaaaaacccaatcatatatacagttttgccttaaggttgagtgaaaaaaaaaaggcgggggggaagatgtttatgatggtacattttcatgtgtagctatatatgcacgatgctccatttcctgagatatagaaaagtttttttatcacattttaaaacaaaatttgaaataatatttttgaaaatgtttcaaaatgccactttaaaaatgcattgctttgaataaaatttactgtttgtaatccttatgcctcctagcacagtgccctgcaatgtggtaacttttttttttaatgcagcaactgtaccactgcagtatctgcctcccttctattctagatacctttgagcaaacgtaaactcatttgctttcattctgtctcaaaaatgtattgcgtagaactttgcaatcatgagagaaatacctggggacattactgatggtccgaagtgtgaacaccactaatttagatgctgatgttgtgatcactcacccagtcaactgaccagccttccagagaatgcaaatcagattcaagccagtctttaagcaaacatctcatttaatcgtaagaaacaatgctgagatgggtcatatccacattatcaattgccttgggactaattgctaataggagaaactgctggttgtgaaaatcatgaatgcagagtctactgtagtaattatatacagtaataaaatacagtcatgccaatcaaatctaaacagcctgtcgttttccactactgctaacttacccagcgtttctacatttccctgcttgtacaaaacgcctaatggtaaagtatgttaaaggcaggggtaagcctgaaggatggctgtttgacaactgcattagcgataaagggacagccatgaaaaaaaaaaaaagtcaataggcctaacttaaagagaaatgtcctttcataggtaaaacgtaaggtttatgtaacatcagtgctagtgttaaaaagtatgctgaaaacatcgtattactgaatttactcaacctggacaataagtgttctttcccttattctgctctgttgccctgactgaatgaagaaagagttaatggtatcagtattaagcaggaagttctgttaggcttatgcatatgatggcatgaataatttagcatcttcaggaaatgcaaactgcagtagaatttaagcaacctatcagaatttagatcaatattttacatgatagtatgaaattaaagtcagtggaaagaagatgcttaaagataccaagtgaagaatgttaatagtttaaactgtgagaaagactgggaattttttattggaaatgttttgtcttacgaagcaataatggtttacctgcattctgacacttgtcagatgactttttgccaacatgattggtaatgggatgtggcagtatctttgctgtcaaagaagagataatttctcaggtttttcttgtaagttttaaaaattgtccttatgggtttttttttctctttaaatatggaataaaggaactgaagggtaaaacctgaagactagtcatgtttctttaataaaggttttatagaagtagccatttgcaaacgtcggtaagacagatttttaaaaaaacagtttaaacttataattattgaaaatattctaaattgtttatctcctgtggaatgatctcattagcttggtagacattttatgtgtacgcctgtggtctttctatatcttatgtcattactgtaaataaatattgtgcatgcaactttaatagattgggtggttggaagtacttagcaaaggtgacatttatcaatcttattttgtgtttgcaaaaaaaatacagtgtatgtaatattttcaaagcaagacaattggattatgttaaataatttctaaaaatgatgaaaaattctcttttatttaagacattaccatttttagatgtgtgttatttaattataaattggtttggttctgatttttctaaaacttttagttagcatgagttgtatgttttaaataataacagtcttaggggagatctaaaacactgtcttgtttgcctttatgtgggctttcctaagccccagtgcattttaaccactaattgtttcttggttaataccaacggaaaaagaaaatctttcccatgctgaaaataatttcttcaggattttacagaaaattattgatgtaaagttttggatgtcactaaagtaacagtaaaaaaaaaaatttacttttgtttgtctcatctcaattttgagtgtcactttgatttcatataaacccttccccttttcatagatcatcaccttctcattgagttttttctcctaaagagaatttacttcattgacacttaagctaaaatttaatgtaaatagcctaaataaatggctgtttgatctggccacacatttttaataagacattttgtcaagtatgtatatatatattgagaaaaaaaatagtaacatgtggcttggtaaaaaatgaatagctgacttttagcaaaccaaagatattcttattttgtatcagtgaatataaaactctttattgcagtgtgccgtttataatggctttggtctctttccaactagtaggaatgagttaatcttaagcacttccaagcttaaatttttttcagattcaattctcctaaatgagaatatagatcttgtgaaattaacactaatagccacagatcttggcttcctctaccttatcttcattgactttaaaaatatataaccctaaaatgctggttgcactctttgaccgtataacttaggaaataactaagttataagtgcatcatttgatctatggctgcttacagggtttttccaccaaaaaacgattgcataaatttttttaagagcctatgttaaagaggatgcgtttttattaaattacagagcttccaggatgaggatctagataggacgtatgtataaatacattttgaacatttcaaagcaccttttagtttatgtgaagttcttcagatggccccgttgtccttcgaagcttctaacaccaaggtgtctgttgcagcccagagcaaggttactgctacccaggacagcactaatttgcgatgtattttctgtggtaagcaacattatgtttacattactttttcaagctgtggtacatgctacttgcgcatttccataacttttgttttcttaggccatagtctggtttgtgatatttgggatatatagcaagctattgtttttatgttgtgatatttgttgtggttcatgtaggtgatttggtcagctttgagttggcttgttagcgagcattagaattagttagaattaggatcttaaaacacttcttgtccacctcttccaacacaaatgagaggggtttttgtttgtttgtacttttttgtttttaattattttgtttgggagcaaatttttgatttagaatttaaggaaaaaatttatgtccatcttaatatgatttgaggaacgtaaatgtgccttgtgcaaaggaaacttttgcttaacttgaattaattttaggtgtgcatgttgtgaggcagatgtaagctattacttgctttaataggttgatttctgattgacagcctcctttattcagtaggttagaaatctgtgacttaagagtgaatttaggcttattgagtgttttctttcactctcactctcatatacacatgtgtgcacatatatgtattgtttgcatggacaaaccaggtatgtcacttagccaccccaaattagagagaataagatatatatctaaggatacgtatctatctataaacacagatagatacatatccttgtctaaattctttttatttccatttgtttctgaaactttgttttaaaaacccaagttccaaagagttacttttaattacttgagctttgaaaagaaacctcatatatgcctttttgattcatgtgtaccttgctagccagattattttatgagagagataaagttattaaatgatatacagtattgctccaattttacataaagtgttcagctctgtgtatgtactttatgtgactcagaatttttaatgtgactcctcaatactaatgatactgtttttttttacctatgaagagaattattttaaaatgtatgtactttctggtttaggcaaagaagtacgtgttgcaaatttctttaaaataaaaaaaagaaaaaaggaaagaaaagaaaaggctaatgtatttgttagtcacttaaagttatattttaggattgttccagaggacacagttacagcagtgagcctattgtgtggctgttcataaatccctcctctccctcccagatcccacaatgaaacactgcagattaagtgtgtaatcagtaactttttctcctcatttttctgcctcctcctgggggtttttccgggctatcttttgaactagtcatgagtgattattgatatttgtgttattaggactctctttagctcattttgaaaacccatccaatgttgtatgcctttctatttaatatgttgaggtccatacgcagaataatggatactttacccaattgcagagaaaatattgatttgacctaagtgaaggtgaatctttaaagttgtaaaataatgtgttaaaaagtagatttccccccattattacctttaatttaactgtgtgcaaacaatataattaacacgttgctaagtttaaacttgattgtattgtgtatataataacaccgatttgtcttttagtcctgtgtttttaaatagtctgtggctaattgtgaaaatagatttgtgaaaattaaaatgtgacagtaagtggaatgtgctttaaccaaaactcaatattgaaggcaagactgacatacagttcctattatagagtctcctgatctgattttaatcatttatagggtactgtatcagtgacattgccacatttctctgttacaaacagtaactcacagactttgctatataccttcttcttgtagccaggacaaattaagatcagccactatctttggctgtgagggagagaacaaactctcaaacagctgctattctttatgataacatagaaagagcaaagcaggttcactagtttcttaaccttggttgttcttccctctttttcccctccccaaagggctgttaaccaccacatgatgctcataaaatattgtcattttcccactgaaatggttatgaaagtacctattttgcattttatgagaacacactcatttaggaatgtgacctgtgtaaagtaatgtttatattcctgaacatacagcggcagctgacagactttgcctgatcctagttgctgcttcatgtcatgtggggtgcctttggtattacttaccaattttatagcccattagaatgtttgacaagaaggaaaaatgtaattgtgtaccttaaatttatatttacctggaacttttaatgtttatagtatgtttgtattaatttttaaatgcacataaatttcaatgtgctagttactgcaacctgacaatttgaagaagaaacaaacagaacaaccagattaaatgtagatgtgaaaaagtgccaaggggagtgattccatgcacggacacacacacacacccaatttaaaggatgtctggaaagacaaaaagcccaaaaatccattatcatcacaaagaaccatgtagaaaagaattgttaagagttgttctaggatcaaaattctccccattttaaaaggaacttccttgaagcttttcatctcagctgcaggaataaactgtagtaaattttttttataattatgataacagccacaaaatattacccacattttaaaaatctcctttctgaacagatttgcttagtaagcttttaaaaagctttaaaaaaatattccaaagcaggttctgtaaattgctaaaagattttcttttctcagcttttgtgagttacattaaacttgtgttagttttttaaaaacctgttaaataaaataaataggattgagttgaaattttgacgtcttttttgaatctatatatttgaattaaaactgagattttaattggcaaatttaatccattaatattacctttgatatataacacctgtcctaggtgtgtgactggtataattgcattcttctttgaggtagatgccaaacaggtctaacctactcacattcagctgtttcattatttaagcagcctgaggctttcaacttaaatactcaagtaaacattattttaaaaaatagttaaaacataatggtcttgtgagttgcccatgctaaatgctcacatttagtactttggatatataaagtacattccctaaataatttcatgctacctcagatttacccgcccctccccacacttgtgtgtccccagaagagaggtcttttctctgtaaagtattaaacatttgtgtatagcctaataggagagtctgtttttacatcattattttaatttcccaagaaaagaattctagtctgtttactagacagcaatcatgtattttcatttatacaaacatttacgtgtgtatttaatttcaaaagttttgtttttttttgttattgattacatgggattaatttttttttataatatttatttggttctcaaaatagcagactcttaggaaatctaatgaaatatatcactgcagttgtcatcaatttgtctttagaggacaaataaagtgattaatctaaaaacatttgtaaagaggtgagaaaaaaagttagtaggtaagttcagatcaaattaattctgtttttccacacttgggatacaccagtactgcattacatcctaataaatctttacttccggttgtgaaatctactccactagtataaaatactttgcacaattagcccatagattacaagaatttagtgcacagaagcatttatttcgtaacttattttcctacgttgtctacaaatctttcagaatatctgttaggagcatttgctggtacactagaattcacaaatatatgtagtgtgtcattactcatatattcttctccaagagtggaagataactactgtttctttactttcttgtttactggattagactttaagattgttctattttaaccctaggtattatatattaggtccagtatttatctcattttgtgacagatttgatttttatatccaatgacattaagatgtcccataattcagtggcattctatctaagatgcaaaaaacaggtctgcattgtacatgatatgtgggaatggatggtcattagtgtctcatgacagaaccatgttgtatgaatgcaagtttttttttcttcttaccctaaatgaaaacttaaaattacctgttacattaaaaattcagttcagtaggttaattactatatggaagtttagcaaatgtttgttttcaccagtgctggaaatgctaggctattagacaaaaatggcagcttaaattgggcaaatttgataaatgctttagcatactggagtctagtaataaggttctcatgctctctctctctcctgtttttcatttccagtgttctatttaggtgagtttttgaattctgatttttcatttaagttctccctctccacttcatgaataattaccccaaagagaatgtctcattgtcttagaaactgtcaagcttaggtgcctcttcagatgctcatcgaacacttgttttactcaagctcttcatatataaatgtttctttttccttattgttgatgttttccatttgtttcaagtaagccttctggagatgatgacagtattatgttgcagtctttcatttgctctgtgttatgtaaagcttatattttattttgctagacaaaaagaagacacgtttgtaaatatgtgatggttttatgttattctcatgattttatctcctctgtccagctagatatgaaaataatgttcatctgtaatgttttctccctctgtagggccaacattgcctagacaaaactcacaactacctgctcaagttcaaaatggcccatcccaagaagaattggaaattcaaagaaggtaaattttcaagttattgtttgtactttttctttatgcttcagaagacaaaactgaacatcctgtgtttaaagtagattatgtcttatcagctgtttaagagtcacaacttttattcttacattagtaagttttgtgactgtcattagtaagttaccagatacttgttatgctggacatgagatgttataaaatttcatatgtgtttttttttgtaaaaattatacttaaggtatgtttaaaatattgtaaatacgcttaacagaattcaaaatcttcttatggttcaagaagtcttacttttgtaattataaagtgatctgtgagtactatgattttcatgtgacaaatttaactaaaaagttgaaatattgttggctgtttctgtaacacattgatcttcagatattactatagggtttagtagtagaatacaaaatcattctctactgggcagcattcttccatgactaggagttctctgaaagtggtcagagtacgtaggctgacaggctaacctttggagtaccaggatggtgagcaggcaggcctcagaaccgcacaaacgctgagctactaaaagttccactggaagccccaactcatctgaggcagcttgttcagtttctttagagaacagtcttctgtggtaaatgccattccatccattgagctggggttggggaggacaggggaggagctggtacagctgttcttcagacagtgtatatacttattaatcagcttgattattgtggcactgctcattcccgttctctctacctgctgacctcaggttagatctttcccagattcctcttcccatgtctgctttgaccgtcttcagtatgtgttctgggttatggatgcctccactgctccatttatttatgtcacaggcattttttgttctaagtacttatattgggaagggtggggagagtggagggaacaaaaagcctgaaactcatcagacaataaacatgacatggtatagtagaagatggtaagtgctatggggaaaaatgcaacagagtaaggaggattatatgttgtgaaggggcagagggaagtgctggttgtaattttattttatttttccgtccattacttatcagtctcagtacttgtgagtttaaatagagtggtcagggtagatctcattgagatgaaaagaaggaattaaccaagcagatacctatgtaagtgcattctgtgcagaggccttaaggaaggatgatgcttgtgtgtacatgggaaaacaaggaggccgtggaggctggagcacaagagagtattaggagtagaggtcagatcatgcaggaccttgcaggctactgtgaagaatttaacctttactctgagagaaaggagaaccattgtacagttttgaacataggcatgatctgacttaaaattttagcagaatcagtcagtctgctctgttgagcctacactattgagagacgacttgaggcaggtgcagtgttgtgacagcagctcaacaagaaagccagttaagaggctgttgcagtgaactaggcaggagataatggtggcttcccccaggtgatagaagtggttgttgagaagtcagatccttatatgtcttggtggattgtatggtggggatgagggaaggagaggggttgaggtttttaggctaagctagtgggaaggatggagttgccatcaatagttgtgaaagactgcgtagagcaggtcttgttgggggatgtcaaaaatgaattttgaggatgtttggttgagatttttactggacatgtaagtagagatgttgaatattagtctctaggagactaaggaagaattctaaacatataactcctaccctttctgtcttccggaaatctcatgataaatttgccctactaatgaccaccaccttcagttttctacttggtcatgggtttatttatatgcattttaatgatgtttctggaattttagtagaattttggggaagattacaggactcctcaatctaccaacctgaataagagtccagacactcctgtcttgtcatctccctgctcagcattccttatggctgcctctcctcacatcagtttacttctttggcctggcatttaggaactcaccccatgtttgtgtttcaccccctcatgactgtctctgtgtacaccatactcatctttcgctctgtgtttgtgtgtagcattcacctcttctgacatgtccttctcatatcctttctacgttgtcattttctgtagactcttctccaggcacactgatgttcttgttttctgaattcctgtaacttaatcacacagtgttttgtattttcttcctacgtgtttattttacatttgagtattacctccacagtgaacattatgggctaatttgagagtagaaacctcaataaaatttctaataaaaagttaagaagtttctggtactgaattaatttatatgcaggttttggggtataagacagaaagtatatatttgacctttaatgtggtaattttcttcacttttgcctatgggtttagaggagaaattactgatgtttagctggtaaatggccttttagagacttcccaggtgctagggaagacattacctaggaaggttgttgagttgattaagataacacactcttttcttgctgcctaggattttctgtgttttttgggagttggtgggaggttcacggaggaggtgctctttgagctgtgcctaaagaggcaataaagtaggagtttccagtcatagaagggaaaagcattccaggaagaaagagtaggtgtgtaaaggcaaggcgatgcaaacacacgtgcaatgtgagtacgcttcctccttccccctccaggaccagtggtatggttagatgaggttgtgtccaccttgtaagggccttatatacaattataaaagagatatttgtcatttttctttgacatatatcccgtacaatctgtttttgcctgtggttaaaccatacttggaaaaagatactacaaaactctaaaatatctactaaatatttatatagacacttagtactggttttcactttctctcagctgacagtagtgcatggctggatctggttgtgtaggctagcaaacgggaaggatgtatagcacagtctagtgtgaagtttggttcccagtagaaattatatttccaaaatttatttcatgtggttatttatataaaaatcattttttaaaacttgatttaatcttcagaggcacaataaaataccctcaggccaactttttacttcataagttgagtgaaattgtcctgttaactttggctgtttaactggcctttttctatactattactggaacgtgtagtgaaaaacattatcagtttgcattataaattcacagctgtgaggatgtgggtgaggtgccaaatgaaaagagggattaggtgaaagttggccaacttggcttctttcccttgctcagctcctagacactggcagccagacctgtagagcccagcaagaaactaagattcctctgtgggaaaattgccatggccaagagaagacagagatgttgacactcgtccttgccagtgaagctcatttacttaagggcctctgatcaactttggtgctgcttataaatatgaacagacagccaaggatcatcaaacctttcaggccaacttctataaaagaaggaccaaaacaaagagttgaaattgtatgaaatagatgcaatgcagggagcggaagaaaacctaaaaatatactgcaatagcttcagagaactaggagaatatatttcattgatgaaataaaaatgggtagttattttaaatggatcattcagagaacaagaaagtaaacttggaaactttttttaaaaaccacctcactgtttttttccccgccgagaaatagaagggcgtgtgctgtggcttacataatcccagcactttgggaggctgaggtgggcagatcacgaggttaggagttaaagaccagcctggccaatatggtgaaacccggtctctactaaaaatgcaaaaattagccaggcctggtggcatgcacctgtagttccagctacttgagaggctgaggcagaagaatcgcttgaacccgggaggccaaggtcgcaatgagctgagatcgtgccattgcaccccagcctggcgacagagcaagattctgtctcaaaagaaaaaaaaaaaaaagagagagagagaaagaaagaaatagaagttttgagaactaaggttgaggaatttattctctgaaaatagtcctaaaacaaagaggtggcatatgagaaagaaagtaaagtaagaagatcagattagaaggttcagcatccaaataatagaagttctgggggagtgggaaggagaacaaaaacgtgaagaaattgaatttgcaaataaataacaagaaaatttgctggaactcattgatcgtctagatcaaaggtccgcaaactttttctgggaagggccatctgtgtcatttgctagactcttcctttgtagctcgccatagacaaaacggaaataaatggttgtagccagatttggccctagggctgtatacagtttgctagcttctggtttaggtcaaaaaagctcaccaaaagtccagcccagtaagtggggaaaaaaacaaagacctcccaccaagacctctcactatggtattttagaatgttgtcctagaataagtaagatttcaaatgcttggtaaggggtggtgggagtgacaaggtgggggagcttcaaaatcctaagagaatctctttccagtctaaaatctcctcttctgcacaacttcctaagaagctattggaagatgtgttctgttaagatgagggagtaaagcaagaatgatgaacccatgacagcatccaggagacaaggaatccaacttaggaaagagataggtaattcccgcacgactaaggtcaaagcaaaacctagggaatagcccatccggttgggggcgctgggagggctgaaggctcccgacgggtagtttctgagggaaagcaaaacaaaagaatagaaaaacctgaccgtggttctgctatgttggaccatgttgatagggattacagttctaatggagagtttggggtgaagtagggacaggtatatagaaaaagaatcaaatttttaaaagtactactttttagcaccaaagtaagaaaaaaattgttctagaaagtaaatgtgatcagcagtgaattatgtgatatgtgaatattggtgtatccaaagtggtggtatgagtttattgggaaaatggagaagaaaaagttttggggagctagagatataggaattaaatcatttgtatagtaggaagtcagtagataacatctaaatatgaaaagtctagaagtaatagttctaaatgaattactgtatttagaaacatgtgataagtaccagagtattgaaaataattgcttctggggagcaaaatcagaagtggtgagcgttagtaagaggattactgttctaagtcttataatataatttggctttttaagttatttattactactgttatgtttaattttttatttttaataaatgtagagtcaatagagcacatgtctaagtgttcattcttattagtccaataccctttattattatatcatttattaaatagtttttggttcctactcatataattaatatttggcttggccatgatgaggaaacatattctaagaaacatgagtcagtcctatgttagtctccacatagaaccttaatatagttaatatctataaatagttcgcaaatcaccagtactatctgaaagttataaaaggggaataataattgcggcacagaactgagcagttggaacaatgagagtgtatagccctcctattggccttcggaggccggatggaccaaaagttgaccgccttctcttgtgagtatcaactcttgcctcagcggctttgtaatattaaaacttagctgtcttattacattttatccattttttatttgtttactgatagtgaagtgaaatgctcatgttatacaatcaaactgtatctgtgtagttttattttctgagaaatgtcaataataacagtgttactaaatattaccaactcagaacatttttcctagactgttcctacttcattttgttaaaattgaaatcattcttatttacctagtaacactattcattataggtaaagctgggtgaaatgtattttgaactgatgttacttaacattttacttgcttcaagaaatgtctttgagtcaacataaactaaataatgaatatatatttaaaaagctattaatctcaatgtgggctgatgctttgtgcatctatttacatttggggatagctgttttggagagaaataggtatttgggtggtggaggaactgtgtctgatattttttaaatgcttaaaaaataatattggtgatttgcactataattgtttctgaaaaaaatttatattctcagaaactttcaaattattgtagaatatatatgcctagcttaaaagaaaaattaaagtagtccgtcaggatttttcatggttcagaattaaggcactctttctttgaaaaaagtcctcagacgattctattaatgactgaagaaaacagttggagagagaactctaggaagaggagccatgtgcatttccagtatgtgaattggcagcgataattctgaggaaaagcaaagtttataaatttggaaactcctcctagaaagctacacaaatgtcttgctttagaggtcaaaacatgagagtcaaatttataaaccatccaatttaggtgggaattattcatgccacacaagattcggaagccagagattttctgcttgaatcactattttgggaaatccgtttagatgggcatcttttcagcaagcaagctaaaaattagcttaaagtgttcaacactttcttttcttaccttcagaacaagaaaatagtaagaatctcctgcagctatatgaattgcctgcttgaatcatctgtctgtgaacttagaaatattttccagcattgtgtccttttcctatatcagtagacactccttatcttttatagcctgaaaaccctggaatatgatgacatgtggaacaaacttcttaagtcaatacaacctagctgtaaatgctgttaccaataattctttcagattcacctcacccatgcctggccttctgcttgtgacttaagcttactttttgtgtgttaaaagcattgtattgcttagagaaacagccattaacttggtggttaaaaaaaaacccaactactaagaacttgaatgagaaatgaaatgtagtcatagaatactatttggttcagctgtgagcagtatttacattatcatgttaataatgtaagctgtgaatattgattttccatattgggagaagcatgagtgtagtgagggagttgtagaaggcatcttcctgttagaaagtagatagcaaaagctaaaatgtaagaaacagctgcaagagtaggaaacgggtgggagggttgaggcagtgaactactgatttttgttataaactttaaaaactatatatttatgttgttttggtaaaatagaagaagtaacaaatgctcaaagatctaaaaacttagatcttttcatcatagatttcttgggacagctactgtgctcttaaatgtttctctttagcttctgtatttaaatttgttctaattagaataatatgggtgtatcttttgccctttgggcccaacagattgcttagagcattatatgtaaaatggcccatattttttgatgtaggttgaattatctgaaatttaatacaggctccagctgagtttattaactgcaggttactggagaaacaacaacaaccaaccctgactttcctctgtttattattaaaaacattcttttgaatacatctaatttcttcccctcatccctgcagataaagttattgttatccctcaaaaactttggcagctagtgatttatcaaatagcataatgaagtccgtactagatcctgaaaatctgattttattagtagtcagtatctcaaacaactactcataaataaataactactcataaataaagtcagtttcttgtgtttttctcttgcagtcattgttaagtgtgatggtatgtccaggagagggtgtgtgttttatgagagcagtggggttgatgtatttgtcaaatgggccttttcttttgttgtatagccagcttaggaaacatgaaggagagagatttttggaaagatcttactggtgtgttggtaccgctggaaggaacaaagggatagcatgcatgtgctgtcatttagctttgtctctaactagacccacccagtttattagccagtccagaaagtcccaatttgaaatttccaaataataactattgttgggccgggcgcggtggctcacacctgtaatcccagcactttgggaggccaaggcgggtggatcatgaggtcaggagatcgagaccatcctggctaacactgtgaaaccccgtctctactaaaaatacaaaaaattagccgggcatggtggcgggcacctgtagtcccagctactcgggaggctgaggcaagagaatggtgtgaacctgggaggtggagcttgcagtgagccaagattgcatggctgtactccagcctgggcgacagagcaagactctgtctcggggaagaaaaaacaaaacaaaacaaaaaaactatcgttatagcccacattgaacgttcttatgtttcaagtacttcttaaagagcttttaggtattacttcatttaatcttccccacagtgctatgaaatacgtatgtgtaagataaagatacttttttttttttttttttggagacagggtcttactctgtcacccaggctggggtacaggggcatagtctcagctcacagccacctccattccccgggttcaagtgatcctcctgcctcagcctcccaagtagctgggattacaggcgcacaccaccacgcccagctaatttttgtaattttagtagagacagggttccaccatgttggccaagctagtctcaaactcctgacctcggcctcccaaagtgctgggattacaggcatgagccaccgtgcctggcaaagataactttttttttagggaaggttaattgacacaacttttcctaaagacaatttggaaccatgtatcaaaaatcttaaattcataccttttcacctagcaaaatttatgtccttattgatcctatagaaacagaaaaagattcaaagatgaagacaaatgttattgcagtattgccaatagtgttaggataacttaatatcctactgtaggagactgcttagactgtggacagcaaaataatcgaatattattatgcactcatggaaaataaagatgctgaactaagtgccttaggataactctgtgtgtgtgtgcgcgcgcgtgcgtgtgtccatccagagttgtacacacaggcaggttctcatcccagatatcctcagttttactaacttatgtctccctccctccctccctccctcccttcctcccttccttcccttctttttcttccttccccgcttcctcctttcttttctttcattgtttttggagacaaggtgtcattctgttgcctgggctgatgtgtgatgatgcaatcttatcttactgtagcctcagactcctaggcccaagcaatccttctccctcagcctcccaagtagctgggaatacaggtgcatggcaccatgcctggctgattttaaaattttttgtagagatgggtcttgctttgttgtgcaggcccatcttgaactcttgggttcagacaatcctcccactcagcctcccaaagtgctaggattacagctgagccactgctcccagaccaactttcacaatatattaagtgagagaaaggaaagcagatttcacagtagcgggaaatggttacattttattttgtttttaaagtttatatgtgtatttttacacaaggggaagtctagaggtatataggggtgcgtgtgtgcgcgtatgtgtatatatagatgtgtgtctttatatacatatgttgatgatagttgcctctggatatgagatttcaatcatttaaagtttatttcttctttcttgactcttcttcattcagtaaactttttttttttttttgaggtggagtcttgctctgtcacccaggctggagtgcagtggcacgatctcggctcactgcagcctctgcctcccaggttcaagcgattctcctgcctcagcctcccaagtagctgggattataggcgcacgctaccatgcccggctaattttttatatttttggtagagatggggtttcaccatgttggccaggccagtctcgaactcctgacctcaagtgatgcacctgcctcggcctcccaaagtgctgggattacaggtgtgagtcactacacctggcccattcagtaaatatttattgagctattgctgtggccagtcattgtattttctgaaatattatttgtacaattaaatttgatattaaggatattacaattacaaatgttttcactaaataattaaaataatgacttggttattaaagtggtatgttatttggaaaattcatttacttgcaacactactcatgaaaagtacagaataaaatgaaatgttagtgcaatgtgctgaagcattcagccaatatgatgctaataggagaaatgattttcatttgtatgaaacagtctctatccaaggtagccttcatgtgggaggagagatgtttgcatgctctacattgcttttatttgactcagaaatagtttacataggtgaaaagaatcgctttttcatgatgagtagccatagatgcatgtttttacttttttttttttttttccagacaactacaagaacagcaacggcaaaaggagctggagcgggaaaggctggagcgagaaagaatggaaagagaaaggttggagagagagaggttagaaagggaaaggctggagagggagcgactggaacaagaacagctggagagagagagacaagaacgggaacggcaggaacgcctggagcggcaggaacgcctggagcggcaggaacgcctggatcgggagaggcaagaaagacaagaacgagagaggctggagagactggaacgggagaggcaagaaagggagcgacaagagcagttagaaagggaacagctggaatgggagagagagcgcagaatatcaagtgctggtaagaagtttacaaactcttctgtgttcttgtatctgagcttggatgatgtctcttgtgcagtcatgtgttaaaatatttcacatttgagatgtttgggattaagccatacaatttgaaattatgaataaatatgcagcaattactactttaacattttctttttatttctctctgtattgcttttattgcttggagacttaaagaaagctcttggaaatttttattctgccattctaattcttctaacaccctataaaatggctataaagtgtaagtgtgtttttatgggaaattttttatactggatgaacttcaaatatatttccctcatgagatcacttaaattgtctcaaatactatagtactgtagtaccattcagcaagaaatttgcttgattgcattctaaagattttggaggaagaattattttagagaaatattctctaagactagttatttaaatatgctttctagtattatgaaaaattagtgaaaattatggaatctggaatttactgaaagacataagggttaatatatggctgaaagtttgagatattttaacgtttattaaaattaacattcattataggatttaagaatattccttatggcctaattaaaaagtcttaatgtggtttgattaaacagtggttggttggttggtttattaagttaatttatgtatttttagctacctaattattttctggagttatggccaacaaaacaaaacttttccacaagttagcattgaataggagcattgaacccttcatattaaatgttttgccagctttactagttttgctatttgttgtttttaaaaaaacaactaaatttattcttctgtttatggtcctattcatgtgattttaatgtcctttttcttgtagactaaataaaaattaagactaatactagctttttcttgtaaaagaaattagtcaattaaatttattaatccacttattagataaaaggaaacttatttcatccccttctgaatctcaaaatgtatttacaagttaaaatattcttgggtgaaaatagttatttgcgtttgtgcctaattctctgatactaactgtagtctacatttatacattgtgtctgaatgctggttttgtggcttcactagctccctttttctctctccttttttatcctgtcttttgctgctgctttccaccttctgtccagctccatcttcagacagctccctgtataacgctccacttcctgagtattccagttgccagcctccttcagcacctcctccatcatacgctaaagtcatctcagctccagtgtcagatgccactcctgattatgctgtagtgactgctttgccacctacttccacaccccctacaccaccactgcgacactcagcgacacgttttgcaacatctttaggttcagccttccaccctgttcttccccattacgctacagttcctcgtcctctgaacaaaaactctcgaccttcttctcctgtgaacacaccctcttctcagcctccagctacgaagccctgtgcctggtctacttccaatttttcgcccctccctccatctcctccaataatgattagcagccccccaggcaaagctactggtccaaggcctgtcctccctgtttgtgtttcttctcctgtgccccaaatgcctccatcaccgacagcacccaatgggctggttgactctgtaacatatccagtgtctccaccgcctacctcagggccagcagctcctccgccgccgcctccactgccttccctcgcatcactctcacactgtggatctcaagcttctcctcctccaagcacccctattgcctcaactccctcatccaagcctagtgttctcccttctccctctgcagctgcccctgcctctgttgagactcctctaaactctgtgctgggagactcttctgcttctgagccaggcttgcaggcagcctctcagccggccgagactccatcccaacagggtaaggctttcattattgctactaacagctaatcacttgaaaatgttatatagcagtgactttaattgcctgaatggatgggtaggatggttttgatccttgaacatttatatgccataatgccatgctttttttttttttaattaaaaaaattaaagtagaaaaatgtttttcctgttggattaattgcatttggaggaatttccttattgaactaggttttgatatcttttatagtatcgcagttaaagatgttttctagtatttaagagcccctcataatacatttctttatttttttcttttttttttttgtttttttgagacagagtcttgctgtgttgcccaggctggagtagagtggcacgatctcagctcactgcaacctccacctcccgggttccagcaattctcctgccttagccagctgagtagcaggagttacaggcacatgccaccacgcctggctaatttttgtatttttagtagagacagggttttgtcatgttggccaggctggtcttgaactcctgacctcatgtgatctgccccttcggcctcccaaagttgctaggattacaagtgtgagcaccgcacccagctaatacatttctttcactgggaaaactttgcttgacacgttgatctaccacacaataaatacatgatctaaattgttttccttcatttttctgggagacttagagagatatatttagtgcccaactgtagtcattagatacgtcatcccagagtttcctttggaacagttctgatcttgggccctgtttccttcttgcctttcctatattagatgccccatgttggacttccaggataggtgtcaccctaacccttggagcattatgactttgcaggaggagtagagaggatggcagggttcatatatgccctaaagggttccaaggtccaaaattacaataagtagtggcttgaaggggtaatcaagagagaatagcatcctctgtagttattctccccgtccctaccttattgttatggtaacagggaaggcaggatgtaatctctaagtggattatttgtaagtagaaaaggacctggttctgtaagtaaataagaagatgcttggcaaccctagtttttaaaatatgatttaaggaggactacagaaagaaaactgaaaacaaatttgtacttaaacattgcaaggcttgttattgctgtatatgtatatattttgttgttgttgacttacaaatttgcttaaaaggttagtcagaattctaagacgttcagtttggtttcaccatgacagttatactgtacaaaatgggcacagtcagcctgacaaagtgacctgctgtaccctcagaactcttaacaacccctacagaagggacagactatttctagatgcttcttttaacaatcgatgttttctgcttgtgtaactgctcaagctgaaaaagttagcaattaccacccagtgtgcaaaatagcattttattcgttctgaaaacacccctcttaaaccttaactaaaagagcacctactgtttcaggattctgttattaaataaattcttgttcactccctttgtgattttataacatttgaacatttctcttcttgccccccattttgtgggataaaaacaactctacttcaaatcctatggtatttaattatttccgagcgttattttgaggttttactttgtactagtaaattcctttacttcagtgattctcagccttggctatccattgaatttaaatgtgaagtattttttaaaatgctgaagctgggacttactcctccttcatgtttttaatacagccactttgactgtaaacaattaaatgtatgtgttcactgttactgaatttactgtctcaacacttaaggttaatgtggattattttgggtctgatatttcaagtagtactaactgccatcctatatactagtttgttttttcagggacgcttacctctcttccaaattttataagtatttattttgcttatttaccaaatccccatgaaaaaaaaaagtcttaattagatgatctgttgcatagttctattactaaagctctaacctaaagtaagtagttatatatacttggaccttacatttcagtatctttcaaaaactgatctagacttttacaactatgataaattggactcattaagtaaatacatgagtcagtttaatttagcatggcattctgcgtaccttcccacataaaataatatcactcagctctattgttgatggtcttacttaacatttctctctctcaggcattgtcttgggaccacttgcacctccacctcctccaccactcccaccagggcctgcacaggcttcagtagccctccctcctcccccagggccccctccacctcctccactcccatccaccgggcctccaccgccccctcctccnnnnnnnnnnnnnnnnnnnnnnnnnnnnnnnnnnnnnnnnnnnnnnnnnnnnnnnnnnnnnnnnnnnnnnnnnnnnnnnnnnnnnnnnnnnnnnnnnnnnnnnnnnnnnnnnnnnnnnnnnnnnnnnnnnnnnnnnnnnnnnnnnnnnnnnnnnnnnnnnnnnnnnnnnnnnnnnnnnnnnnnnnnnnnnnnnnnnnnnnnnnnnnnnnnnnnnnnnnnnnnnnnnnnnnnnnnnnnnnnnnnnnnnnnnnnnnnnnnnnnnnnnnnnnnnnnnnnnnnnnnnnnnnnnnnnnnnnnnnnnnnnnnnnnnnnnnnnnnnnnnnnnnnnnnnnnnnnnnnnnnnnnnnnnnnnnnnnnnnnnnnnnnnnnnnnnnnnnnnnnnnnnnnnnnnnnnnnnnnnnnnnnnnnnnnnnnnnnnnnnnnnnnnnnnnnnnnnnnnnnnnnnnnnnnnnnnnnnnnnnnnnnnnnnnnnnnnnnnnnnnnnnnnnnnnnnnnnnnnnnnnnnnnnnnnnnnnnnnnnnnnnnnnnnnnnnnnnnnnnnnnnnnnnnnnnnnnnnnnnnnnnnnnnnnnnnnnnnnnnnnnnnnnnnnnnnnnnnnnnnnnnnnnnnnnnnnnnnnnnnnnnnnnnnnnnnnnnnnnnnnnnnnnnnnnnnnnnnnnnnnnnnnnnnnnnnnnnnnnnnnnnnnnnnnnnnnnnnnnnnnnnnnnnnnnnnnnnnnnnnnnnnnnnnnnnnnnnnnnnnnnnnnnnnnnnnnnnnnnnnnnnnnnnnnnnnnnnnnnnnnnnnnnnnnnnnnnnnnattacaggcacccaccaccatgcttagctaatttttgtatttttagtagagatagggtttcgcgatgttgaccagactggtcttgaaatcctgacctcaggtgatccacccgcctcagcctcccacagtgccgggattacaggtgtgagccatcgcacccggcctacacatgcacttttgtttgaatgatttgagagtaactcagagacacaagcttctattttcctaagtacctcagtgtgaattttataagaacaaggacatttacctgcataaccagtaatataattatcaaaatcaggaaagttaacatgatagaatactgtaatctacaaatgtattattcaaatttcatctatagtccaatgacatctttagtgacagtttttttcctagtgcaagatcatttattgcatttagttataatgtctctttgatatactttatgacagttcctcaatctttcataatactggcatttttgaagactgtaggacaattattttgcctgttatccttcactttggcttatctgatttttcctcaagattagattctagttatgcaggggttgttttagcaggaatattatcagagcaaagtcatgcccttttcatggcagcacaggaagagatacatgatactgtttcattgcattcttggtgatagtagttttgataaactcttgttgatatataaagtcatgctaagaatctattggttcttaaagcttaaaaaataatatttaggttttttaaaattaatgctgatgtttccttctgttttagatgtaatatattaataaaaatatggttgtctaacataggagttgattatgtctgtatattctcattaagatggaggatacctctttcccaagtggagggaatgctattggtgtgaactccgcctcatctaaaacagatacaggccgtggaaatggaccccttcctttagggggtagtggtttaatggaagaaatgagtgccctgctggccaggaggtaaggaatttcattataatggacatgcccagaattgagaggattttaattgtattccaaatacaactaactagatgcacttctttcctcgtagagaagtggtttttatactgaatcagataatatttttaaaaatcggatttgccttctttgtaggagaagaattgctgaaaagggatcaacaatagaaacagaacaaaaagaggacaaaggtgtaagttaataaagatagtctaccataccttaaaatatggaattcaggcacagctcattcaggaaatagtgtcagcatttatttaatttgggcttaattagtttgaacttatatttgctaatttttaactatgcatgtgaagtggcttgttttgactgttatttataaatttttaatggcagtcttagtaaagtgagttgaatatgtgaaattatgggaaaagcattgaagttcaaacctgtggagtttaattctgttccttaaatgagtgaatgacatttcactacttttttcatctcttagaatctcagttcccttgcattaatttaaaaggaaggaattcgcctaaattcatatgtttcccttaggagcttgatggttattggctgtgccccttcagagtgtaaccttcatgccctcctccctgattcagctgggcaaactctgctttgtctgtgctgtatattggtgtgcaacaaataatatgttccccctgctccatctggccaccttagatgccattcctcaaatctgtctctcgtgtctggctttgtagcattggctagtgaaagttctcaaggagaacacatgaggaaaggagctgtggggagggttgaagggaagatggttgaagacaggagaagaaagtctaagctgaaatgaaagggagagaagaccgatgaaagagaaagtggggagtggcagaaagaatattagaagtgttcgtgtaaaacactaaatgtatatagcaacaggggactggtagatgtgatattaatatatatctgtatatttaggaagattcagagcctgtaacttctaaggcctcttcaacaagtacacctggtaagttcaagataaatattttaacctttataaactttctctaaatattaatactccccagttaaaaattccccctttccccatatttggaccaagtgactggacactaaaatgccagagttctttgttcccacctgaaagcattcacttttttcctcctggaagctgctgttactttcttgaggttacttactaaaacaaggaaaatattaatgtactattagatgacaagagtatttttcataattgtttttctagaggtaaaaataaagtgagcatgttagttagtactacagtctgcttcagaacattctcaaattgagaaggatgtcctagccattcatttgggtgatattgataattaagggaataaagtttctgatttgtaaacttaaaaagtctccttaaaattttggggaagtgttcttgaattcagtgaaatttctgacattgagaattcttgagcatctgataaatcacctagaatattaacaaaagtatatttcactagaagtacttgatgagtactgtatccaagatgagaatacgaactcattacatattcacatgttatttcttcatatttgattaaagactaagggctggactatctattgaactccttatctattctggaatgaaatgacataaataaacttgatgagttaatatctagagtggtccataagaaaccattatagagaaatgcttatattcctacagttttgatttaaagacaaccagctgcatctacagttccctttttaattttcatttttttaatttttttgagatggggtcttgctctgttgcccaggctggagtgcagtggtgcagtcttggctcaccgcaacccccacctcctgggctcaagtgatcctcccaccttagccccccagccccctaagtagctggggccacaggcacatggcaccactcctggctaattgtttggatttttggtagagacagggtttcaccatgttgcccaggctggtctcaaactcctgagctcaagtgatccacctgtctcagtcttccaaagtgctaggattacaggcgtgagccacagtgcaccacctagaattcctttttttttttttttttttttaagtacctctgaagtttttgtttttgtgattgtaatccatcttttcaccactccccccattcctcattcttattattaaatggtgactcttcagtaggttgattgctataccataattaacatcatggctttgttttccctctgaataggactcagtttgttattttcattaaaaattcactggtttgtgacccacttattttagctttatccttctttctgtaagccaaaattaattgtatgtactctcattagtaccgcatagatgttgtaaatccgaaccatattttgggctcacagaacctttagaatatgatgagagctatagatcctctttccagggaggaaaattgtatttttattcagatttgttcataatttcagaatattcatgaatttcttgaaggttatccatggactccaagttaaaaattccttatctaatatataatcccttatataaaatatgaaaaactaaggcacaggttttgtgtgtgtgtcatatatataaaatcaaaaagggcagggcctgttttctcacttgtttcattccgtttttaaactgacattgtgtcaggcacctgaagtgaaaggtacaggtcctaagcccaaaaaaactcatggtacagctgggaagatgagacacacaggtgtgaagttaacctttttacaaccacttgttgaatactaagtagtgtgtcacagagggaggaaatgacacatacgagtcacctgagtcaactttgtagggaaaagtgacatcttagtattccttgaagagtatttagtttggctgaaagtgaggggaaggtgtgatatttcaggatgtaagtatagcatgagcaaggtatggagttggagatgagcaagaagagattaggaaataggaaatagactagaacggggaattctttttgaggaatattgtagggaaaaggttgaaaatatgagttagaaacaaaaatgttgagagccttttataaaattatcaagagtttagactttatcctgcaagtactgagttcagtggacatttaatccactgaaactgtttgaggcacattaaaatggcacttgtgattttcccattgaaactagggaggattaagataggcagaccaattaggaagctctatacgcatgccagtaaagatcctctgaagggaacccagccttgcccctcctgaaacacacccgagctccttagagagaagaggcccttgcttctcagcttccacagggccagctgaaccagatgagcccttttaagactaaaagatagttctggtttggctgattgagaaaggacctcagccagctgttaaaaggtagcacttgctacatcttaaccactttggaattactccctcatccttccacccgcctcctctttagtgacagtgtccgatgaccgttcccttccctgtcccggtgtccctcagtttcattcaggacttcccttttttcacctgcttgggctggtgtcacttggatatgtttctgattcggcctgtcccaaaccccatccgattatttgatcttcctggtcaagtgtggaacttgacaccactgtggcggtcattgagaggctgtgttagctgttagaatacaaaagaaggaatataaaaaagaaggaatttagttgatgaggagtaaagcaagatcaataatgactttaaggtttcacatctaatgccttcatgcaacaagaaatccagaaccaaaagcagggcttcatggaagagtgtgagtttatttttgcgttaagtgtactttgaagagacggtaagctacctgagaatgtgcaaaagccagctgaggagctgcattggaactcagagcagttttagttaaaactatacaatgagatcacaattcatgaatagacttcattctcctgtggcccaaattctttcctccatgagaagattccacttctgattttacccagtcatgtagtgaggccagtgacagcatcagtgagtcagcccagattagaaaaacaattcaagcacaatagacagccaactagtgagtcactgactacatagtgtcttttgtaataagagcttagagcgagcttgtttatatttaactggaataatcggctaaggcccaagaattaattgtttaagaatcaaggaagtacaatagaatttcaggattctgatatttattttgagttgttcctatttttttccccaagagggactatttggatttagattaaatgttgaaatacatgaacatattataagttatacttactgtttttatcattggcactaaaaaataatttaaaacagtgtcggtaatactattccattttaattaattgaactatcctaattttaaaattatcctactttattcttactgtcctttctttgttagagaaactccttactatcctaaggttatagaatcataatattttagacttaacaatgtaagttttccttggaaacttactgtactagcttataatttcttctcattttaaggtctggcattgtgcaaattagagtccttacagatttcaattaaagtttagaatttaaatttttatttatattactactatgtaaacaggtataatgagatttagtattttgttatttgttttataataactctggaagcatttatttatttaatagcttttgttttttatttttaaagaaccaacaagaaaaccttgggaaagaacaaatacaatgaatggcagcaagtcacctgttatctccaggtatcaatttttttctctaagttttatattttatttgtataaaaaaaaattaatgcattcttagtgtagaaaaaaattgaatggtaagaaattatacagaggagcccataaaactctcgtgatcctcctagtattggacaaccaccaagcctcattatatattactcatctacattactagtgattgataaattctaccctacatttattaaccagatgatctgagattttaagatagctttctttttcccaatttgtattttgaaaaattcaaaactacagaaaaattaaaaggatagtacagtgaatatgcgtatacccatttcctaggtttaacagttgtcaacattttgccccacttgtcttaaatatctacctatccacacttttttcccctctgattagtttgaaagcaattcacaaataagaactgtttcaccctaaatacttcagtgttttttggaagaaccaggacatctgctgtgtaaccacaataccattattactctcaagaaatttaacattaagcaataatattatctactatagtatatagtcacatttccccattagttccaatgacatagattttatgtatatatatttatgtatatatataatttttggagccttttttaaacctgaatatcagctggagagaaaagagagcaaaataaaacatacatctttgaatttgtaaagtagaaacatgtatttccctatctcatttgaaacttgtaagtgtaatcaagttagaaaagatagtatccagaaacaaggctagttaatacttgtttctacaagtacatgtgggcatatttaggcaaatttgttcttcctttagctaggcatactttattttcatgactaaatttatatcacagctcctgaacatagatgaaaccttttcttggtttatgagacagtttaaaggacttgtatttttcccagaaaaaaaaaaagtatgtatttagaaactaaaaggtattttgtcttttctttctgagctatttgccttatttttgtctcgtaaaaagcaacttgactctaattatagaaacctaataaagataagtacagggatagactttatattatcacagacctgttctgtgttagtctaagtctgaatttggatttggcttcctatgtggttctttctgctagtaggaaagaagatttggtagtgacacaattgtttaagctccacaaagaaactaggccttttggaatgtataaaagcttttagtttctaagtgattgaaagatgatcatattttactttagaagaaagggggaattgcttttggtggacatgtgttttcagtagagtagaaaaattgcacatttatgtttctcagactcctaactgagatggccttctaacacatctctactagttacggattttcttcagtagcacattatgaagtgctgatttattaagcccataacaaggagctggctaggcgtggtggctcatgcctgtaatcccagcactttgggaggctaaggtgggtagatcacttgaggtcacgaatttgagaccagcttggctaacatgatgaaaccccatctctactaaaaatacaaaaattagctgggcatggtggcgcacacctgcgatgccagctacttgggaggctgagacacaagaatcacttgaacctgggagacggaggttgcagtgagctgatatcgcgctattgcactccagtctgcagacctgtcatgtgtcatttgtcctttctcttcatcatgcttcattgatctgcatttcacagtgaactaaaagctaagcctacgttgatggcagaagtcatgtcttagaagggacatggacgaggttctccaaatggaatacattctttgatgtatttggtccatttagtaaaggaaaagttgttctttgaaagatttttttatttttcctaattccagggtagggaaaaaaagatttttttttcagacttggaaatttaataagtgctctaaaggtcaccattttgaaaataattttatatagatgagttgaatcttgattcttaatatccagtagtgcaccataatcatgttccaattctgttaggtggttttccttccctttcccaaaatagaaattctggaactcctgattatttcctgaccactcatatatcttttgatagatttgatccaactactgatatataggttttaaaatttcaccaaaagctgttttaaaccataaaggatttttaaaatatgtttaaaagagtaagaactatattgcttttcttcctaagttatctctcctgttccttcggaaagcaagtgtattaagtatgtcttatccttgcattgtagtgaaggtccccatttctctttggaatagctttgtcaaaattacgttagtggtaagatggattaatgtcccataatatgcatgagatattgcatattgctgtatttgttaagtgaatatgtcagagtaaaagcaagactgtttggttaaaaatgctttaaactatgactggattataacgtttgggaagttggtgcattcatctgtggttattaagaccttacagatcttgtattcaagatgggaaaactagtcctttacatgcctcctgagaagagttaattttgtatacttttatatacttactgtgcctacaacctatataaaaagtagccattgtgtaatgatttttaaaattttctgtaactggtatcttcacataactaaaagtaatcttaaaatatcttttattggggaaaaattggttattttaaggttaatagactcaattcttgttttgtttgctattaacaacctataaaacagtaacataatgagaattattttttaaagttctattgtgtatccctttcaatggttttccccttcatagacgggattctccaaggaaaaatcagattgtttttgacaacaggtcctatgattcattacacaggtatcatcctgctgtgacgttgtgatttgagacttttaaataacatgttcaggatagggctgagctttttctacctggattggtaatcaccacaagggagatttttttttctttattttgaataccttttaaaaattctgccatcacttcacagttggattcaaggataaatacaaatggtaaacatattagaaatactagactgggaatctaaggccacatgtattatctaggccatttgtagcttaagcgttttcttttaaaggctgttcgccttatgattataagacaaggtttcaaaaaagttgaatagaagatccttttccatctgttactggaacatggactaatattaaagccatggttgtggataattgattatttgaggaaaatctctgtttcctagatactttgtagtaaattatcttggacagtttaacatctaacaccctgagtagattgttttctaggatgagccctattataccattttttaattaagaagacttaagaactagttttttcttaattaaaaaaattgacagctaaaaataatcctgcaatgcttttcagttacttacacaattaatttgacagaatagggacttaaatatagtagtacagtcattttataggcagatgtttaaaggcaacgctctcatcataaaaaaataaaaactgacccagcacctggtggttcacacctatagtttcagcaccttgggaggccaaggctggaggatcatttggggcccggagttcaagaccagcctgggaaacatagcgagaccccatctttacaaaaaataaaaaaaaattagctgggcctggtggcttgtgcctatagtctcagctactcaggaggctaagacaggaggatatcttgtgcataggagttagaggctgcagtgagccatgataacaccactgcaccctagcctgggtgacagagtgagaccctcttttaggaaaaaaaaaaaaaagtgaaataaaaacctgagaaaccctcattttgtgatcaattatgatgaaaacccataggttagaaataactgaaatatatttatgttattttacacatctattttttaaaaaaatatacatcaagttcactgggaatatgaattaagtggtgttcatagtggatgtctattgcagtgagttgggagttctgtaagcagactctggccaaattcttacttgctaaaattatttttatgctattaatgatcaaaatacttgacaagttaattttgtcagccagttaaatcttcacaaaatgtttatattccagtagtgaaatagttttgtgtttttttttttttttttttttttgaggtggtttgttttggccaaaagatttctttagaaaatttgctagtacatagaaaagtagcatttaacaatgagatttttaaggctgggtgccatggctcatgcctataatcccagcactttgggaggccgaggcaggaggatcacttgagtccaggagtttgagactagcctaggcaatgtggttaaaccctgtctctacaaaacatacaaaaattagctgggcatggttgcatgtgcctgtgggaggctgaggtgggaagaagacttgaggccaggaggtcaaggctgcggtgagctgagatcatgcacactgcagcctgggtgacagaatgagaccctgtgtccaaaaatacatatattttttaaatgtagtaaatctgctcagttatcttgctgctttcacacatagtaccccctgggataatgttattgataaacttttttggtaaaagttaagaaaaaaagtggtgattacatctttccttcagtatgaaaagttcccccctttagttaattatcatggtggtggtggtggtgatggattgcatgttagcatgaattaaatttttaaaaatttgcatgtttccacaattgtttattacataacaataatttttgcattgcctagtaaatatggatatattcataacatacttgcccaattaaatagcaggctgtagttcatgtgaatttcagaggtattcattatataacttgagaaaataactagctaaatgggccacttaaatgggaaatgtaaaagaaaagcagagtatgaattatagtttaattctagagaacaggaataggtagcatgagtgaatatatgaaataacatcctaaactttaagaatatttgccagaagtgactctgcattttatggatctaagtaaatcttaagtgaccttggaatttagtagtcttccctagcaaagtaagaaggtgtagcctcacaagaggaaaggaaatatttcatataaatattattccctacagtgcctagctcagtgcttattgaatgaaattttctggaagttatttttccccctattcatataagcagatacctaataaagtaaaattggacgacttgcttcctaacagtcttttaagcagtaatacgttttgatagtaaagcagattaacaggctgggcgtggtggctcacacctacacccagcaatttgggaggctgaagtgggcaaatcatgaagtcaggagtttgagaccagcctggctaacatggtgaaaccccgtctctactcagaatacaaaaaaattagccaggcattgtggtgcacctgtaatcccagctactccagaggctgaggcaggaaaatcacttgaaccggggaggcggaggttgcagtgagccaagatcgcaccactgcactccagcctgggagacacagcaagactgcatctcataaacagcagcaacaacaacaacaaaaagcagattaactcagtgtttaatcttcaggaaccatgcctatgggtttaaagtattttatgtcttataagaattataaattataactttgaaaaatttattatgccttttgggtcttgcttcagattgctaacattggtactctgcaaaattgggaatatatgatttgcctgatggttttaaattgcatttatttgtggctcataaaggagggcatttactagactaaaccagaacccagaggagtgcccatttaaaactctaggttttccactggggactcttttattgccggacttggagagggcgccatgactggtttatttggtgttgaaacttgtttaaaatatacctaatcattgacttattaagaattataatagaaactaaacttttgaaagtgcaataataattgacaatctgcttctgtctggcatatcctttttatttaataaaataaatttatggaagtagttagcctgaaacacaccattcaaatgacgtctccataaaaatttcacaaggaaatagtcacatagtctaatctaataaacatttttaaaacattttttattttgatgcttgaaatggaataatatgtataaagcaaatcatgctcactaaaaatgttttcttcctgcaatccaaggcatcagctttgtaagctgatttatgttagtgtaaaacattcaagtctttatgtttctcctttcactggtttgtccaggtatttaagtagataatgtaaaagttcaaaagaaagacaaaacaagattgtgttatttgagcctcagatgtttcagctggcctcttcatcactgttttggtcaacgtgccacgttacctggttacctcatgcccaaagaatactgtcttctactcttttctgaagaagtctcaccatcttgtcacctttttctagttcctttataaataagaaatactgagaaaagtgaaaaaatgttgttttatgttctaatcagccctacaattttgataattttttaagaaaatggcttttttaaagaaatgtatttaaatctggtgttgggttggtaaatttgcaattatttatgaactcattaagtattaagaatgttgtttacctgtcctggaaatctcatttatacagaccaaaatccacacccttatcacagcccagtgccaatggagtccagacggaaggacttgactatgacaggctgaagcaggtgggtgctcagtggcagctttcctttatttgtacttgtttctttttaaaaaatatcccatatgcatatctttgacatggatcctgaatgtacttagaaagacgatagagctattgttatacaaattaaacagtggcattagtagtactgcatttttgcaaatctacacttccggttcattgagtttgcatgaaggtccagaggtagtggagggtggggttgtggttcagtgataacagcataaggtgtaaatgtaagtgcatggtacgcagttgtaaagaaaacaatgggcttttacttttcagtgactgtcttggcaaaattgaacccaacaaatctgattttggcaagagtgcaaggaaacaggcactcttctatacttctgctttctaaaaagcagtttggaaaaacagaatcaaaagcctgaaaaataaatgtcttaccttgaattctgtgatatgaattccaggaatttatttaaagaaaatattatggaagtatacaaatgtatagtgggtggagtagaggctctgtaggcttcaagggatcataatttagtatgcttaatagtaaattgtgaacagttgcctgtgttaggtaacaaaacaaatgtgtacagttatctcaattttataaaaaagaaaaagatactgtccacgtttggattcatatgccttatagttaatacctatgtactcaggaaaaagtagtaagtgataagattgtgatttaaaataccttattcacagaagaggtgaagtacattttttagataaactgaattttcatactgcaaagctattggaaaagttaaattgagttataaaattttaaaggggagcacgtggccattgaaaatcaagccttgttttgccgtgtactgaatatggctttcttgaaaaatattttaaaatagagcacttccacacgcttcaaaacatggtcagttcttggtcatatgaagaattggaggataacaggaatagatttgatttgggggatgagatgtaaagagtaatttggatcagggcatctgtgagtctatttaataacttctgtgtctcagtcttttccattgttaaaatgaagacaaactaattgatagttttattttaaacatgagaagcttttcaaaaggtaaactttaacagagcaatttaatttttcctggggtattcagtgttaaagtcacacaattcaaaactaattcttccaaaggacagctgttacttttcacccattaaaattgtgtcactttgtcatgggacctctgatcttgaatctgcagggggtttttttatttctttgttttttgtttttgagacagagtctcactctgctacccaggctggagtgcagtagtgcaatctcaggtcgctgcagcctccacctcccgggttcaagcgattctcctgcctcagcctcctgagtagctgggattacaggtgtgcactaccacgcccggctaacttttgtagtttttgtagagacagggtttcaccatgttggccaggctggtctcaaattcccagcctcaagtgatctgcctgccttggcctcccaaagtgctgagattacaggtgtgagccaccacacctggccaaatctgcagttcttgaaggagggcccagagcaccacagttaaatagaagtataatgtgggctacgtatatattttaaaatttttctagtagctgcattatttatttatttattttttttttgagacagagtctcgctttgtcgccgaggctggagtgcagtggcgtgagccaccgtgcctggctgtagctgcattttaaaaatacaaaacaaaaggacattaattttaaaacttaattatttaaagtatgttttaatatgtagtcaatttttataaattactaacgagttattttacattattttcatcatactaaatctttggaatctggtgtgtgttttgcacttcacagcacatctcatttcagattagcctcatttcaggggctcagcagctgcatatgattcgtgcctgccgtattggacagcatgggtcaaccagggcctcatccaccttcctgcctacccattagggcaatccctgaggtcccttcagggaaatcctagactccttgaaatatggtttggcagctatggtgattcctgagaaatctccatacatacttcagacaaaaggacagatttgccaagagccagtttttcagtttactgtaatatcttcctcctctaaacttcctttgcatcacctctcagactgttcccagaggactagattaaaagcacagctgttatcatttctagaaactatctgactcatacgtttcactggatgacagagtaattatcttaattttaggaagcattctatttcacatattgctaggctagaataagccaggattgggaagggcagaatattaaaacaaaattcaccaaggctagtcttccaagaaatagaattgtggctctggaaacaaaaaaaactacacatcatatttcatgacattcttaaaattttatgagtaagaatctctttagtggtaattttgttctgtatttctggtatttttctctaatattttaggacattttagatgaaatgagaaaagaattaacaaagctaaaagaagagctcattgatggtaagtgtctggacaaatttactattcctataaaacaatgtttaagattgaccatttttaagaaaatgcaaataaggaaatacccagctgattagttgagggcaatgacttccatagtcctgcccttttaggattagggttttggggaggaggtttctccttcatataatggaaattatttttataaatagggattaaacaatatccctaagtttcaggtgttgtcttttcttagatggaaaaccacatgaacagatctttctctaggttacctctactcacctatcccagtgtcctcttgtttttgagcccacataatcagtgttttcattttgtatacaaaaggagaaaataaatatatagaaattagtatcatctttctaatattaaagatgtgtgcaatgaaagatgcaaagttaatcttattactgtgagtttgagcacaatccttaaagtttcttaggaatgaatcactcatttatcttactttatcattatatttattttcaatacttgttcttttccatccagcaatcaggcaggaactgagcaagtcaaatactgcatagaggaacagactaaggagagataggactttaatctggaggaaaaatatcctacaaacaacaactgttcacaacagcaaacccctacatttatgagctgtaagaagaaaatggagacaaacagaaggagggaaaaaccaacctactctgaaagccttcagacattatgactctggtgataagctctttccctctccgtttgctgcttttttctggcctttacaacagaatggaagagaatcatttaagagttcctgtaacagttatgcagaaaatactaaaacccatcaggcaagatcaccacgcattgaaatattttcatatcaagataaagtcgcacattttccacaatacattgctaaaataaagaggagaaaggcttaggaagtttttttgcagagagtgctggtaaagaattgagcaagtttgctattgtattgtaatgtttctctcaggtttgttcttcctatcatgtttgatattccatgaataattgagatcagccctatgtaagttaagatcataatatgtggaacaaatggaattgtaagtgctttcaaagggtaatatttataagaaagtgtccgaaaaatgtttcttcagcttgagaaattttagaatgataggaagtttctcgagttagccttcatgcaattttgtagattaaaacataaaatttgtccagaacttaaagatttagatgccttcctaaattgttacaatgctttaccaaatctatgacttctacataacacaaaccagtggtcaaatgtaaacactatattgtagatttactgtaggttttcaaccttttttagatttatgcatgtggacatttttataatgtaattacaatcaccacaaggttagcttttttaattgcagacagtaatgcatgtcacactaatatgtagtggccttttcaaggcctagtcccagggaaaacattttgtagagtataggggagtgggaggaaggggaggaataattttttatttaaagttgatttctgcactatctttttctcagttacctgcatgaataaataatgagaaatattttgtgactttaattggtaaatatgttacaaaaccaagtacttaatcttttacatcatgtcttcagctatttgtattttaaccagtaatttcaatggtctgaaacatgattctgagcttcacataatatcttaactgtggaactcaaaagtttgatcactgaatttggcagttattattacctaggtacccccgctgttacacaggtgtttagatacgtgttcctgaatgaagctgcttttgaattttgttatgttgaaatgcaagaaataacaatgatggcagcaattaaggtcacagaaatcattaggtaaaggaaaaccaatgaggagttctgcagttttcttttaataagtaaagtgagacttgggtggtgggaagaaggaaggtgggaagaaggaattagacactctgcctgccactctgcgtgtgtgtgctctcgcgcacgtgctgtctatatggaagccactcccttttctttcctttgaaactggtaaggttaaaataggggagaaatcctacatgttggaatgatagctttttggaaaatttaagaaactctccaggctctccatcttgatttatgcttgagttgttatgtgccatatttgctttgaactctgattatcagaagttttactaaaactttgaaataattcactttcatctgctttctagattttgtacatctcagtccataaagcaaagcttgttgatagtgtagttttctaaacgctgcaaatttgcagcctttaccactacaaagaagtttggatgagggattttttttttctttgtcaaaatagttcctgtttctgtagaaatttcatttttagattaaactgtgatggatgagctatcataattcaagtatacatttcttttttctatcagatattcattgtcatgcagtagtagtaaaaacatcaaagatgcagcaagcttattaagtattattttctaaaagaaataggaggcattttcatctttattattgtacttttggttatgcaaacactttgataatataaacagttatgtcccctataaatctggtcagcaacctcttttgattttgttgggtaagttaaatagtctgtagtaggtagagtactgggtacaagtggtccaaactaagataagagactaaaataaaatgctaaatcttaaaagaaactgggtttatgcactaaacgttttgtgccttggtctaatattaacatgatgtatgtgtaaactgacaaaaaaaaaaaaaaaaaaaaaaccagtgttgaatcatgctatatttcccatcatcccagattgctaaatgttctttccaagaagtctgaatgaattattatatacatttgctatcatacatgacagttgtgtcattattagagatttcagtaattaaaatgggaaacagaagcctaagttatttaccttatcaaaaccacgttccttggaaccacattattatgatggtttttgtgctcttgtacgttggatgtcttaagctgagtacagtttaggggatcctttctaatgacaggaaggcactgctttcctcaacactgtgatctgacctgtgacaagtctgtactatccactatgtaaatggctcacaagtcaattgcaaacaaactgaatgtacaaatcttagtgctggtgctgaaatctcttcagaatagtcatcatgatttaaaagtttgtttaaaaatttgcaagcatcaagtgtcaatcaaaactgaagatgaaacactaatgaatgttgaattctcatgcttttaggtgtacttcctttttagaattttcagttttctgctatttttaccgtaactatttcgtttaaatttgtttcatttaagtttcctacatgctaacttcgtttgtgcgattgaaataaaattgcagtatatatatgttgcttgtttgtgacacttagataatcttctgaaataatttgttttaaagtaagttatattggatgtgaaaaacaccttttaaagtccaagactttactacttaaaagtttacatgtcacgtcactattctttacagatttcatagaagtcgtgaatactaagtaatgtatacaaaagaaatatgtgatgatgtgtctactttttgtttgaaataactgttgggtgttccctcttcttattttctctctgcccaccttgacacagtaacttcctcttatagtcaagatgatgattaagtgtttaatttttattccattttgttctgcaacacgttcagatacttaaaactcattcatgcagttagaattatcctttatgtagtttgcatggtaaaggacattgtgtggtaaagggcattattgagtaatgaattttaagtatagcaaaatatgtatagtgtttatacatgatgctgatttcttaaaacctacatataagcagtagtactttttctctattataaagtattaattttgagttccattttataattctgatgtcttcattagaaatacaaaaatacaatccttgtattttttctttgaccagacccaaattttccccttcccccctccattctcctctccacttctcgtggaccgcgtgttcccaatattcattaacatttgcagccattacagagttacagttgtaaaattttcagctgtttttttttttttttttttttttgctctagcctgtctcatgttcttgcttctcttcatatgtaagtcagtatttttgtctacaaattaaaagtcacttgtcattcaaaaatgagttaagtaacatgataatcttttaaatttacctagctacaacttttatgtctcttgtaaatttatatatactttcagtgccattgtgaagaattggccttttaattctaagtagtattaccctatgaagcacagtgtgcaaaggtatgctacaaggtctctttaattcctgtgtggccattataattttataacaccattaccctttaaattctaccgattataagcagcgtaaaagtaactatataaagcaaacatcgcaaaggaactctgcaggagctcttaattcctttatgtagctatcataaaattcactttcctgaagacatttactctcattcacttccaaactccaaacctttttctggtagcaccacttttgtttttaatagaaagatgagttcatatctgtacatctctccaaagctctaaggaatgagaaaaggatcctagtatattgaaattactgatgtttaatacctctgccttttcactaaaagccatttaatatttttaaagtcaaaacttgacatacaggtatttataaggaatctccatgactctgaaggaatgaaattgatgtaggtagctttggctatgtaaagacatagtagaggacaattacttaaagaagagttttcttttgaggatttgtagatttgactaagcagctgaagtcagtaacccctcaagaaaggccgtttatagaagccaagaactgttggaggtctgtgatgcaggtttttctgttcccaacatcaaaagctgtggattatttggtgtgttcccctttatgttatctctcgataatttttgagacatcaagattttttaaaatatcaatactggaaagatgaaaccttcaaattaaaacctaaaattgattagaaagaaaagtaaaatattaatgcagtaaatttaggatggttacagatactcaccatcaacataaataaatggagttctaggataaattatttgtggaatactaatggtcaagtcacataagagtaaaatcttttggtgaggagacacatttgacaactgctaaagaattaactaaatttgtctttctaaatagttttctttataaagtaacagaaacattgtaaaaggataaataaatgactgtcataatgacttaggatgttgtaagaatgtctgccacatttattggttatttctgttgaaatctgaaggaatcgatacatctgaaaattgagaaagggaaataggactgtccccgttacagatactctgtgatgcacacaaccttctaaacggaagtgttagtatcatttaaagcacatagtaggccttgagtatttgcagattaacatgcagaaaaaatcaaagatgaagccccaattaagtgtttgaaccaaagaatcacagtcactgagctgcacccccgttctgtgaagcatgttaaatactcataaagagcagagagcagggcccgtagacgcttctggtgtaggacacaggaattctaggcagagggagaaaattaggggccccagttggtggctgagagtaaaaagaatataccatttgagtagtgctgttctttttcctcagtttttaaagacatataattcctagtagttaggacatctaaatagctcggtaaactggtcagaggcgggaggattgcttgaggccagaagttttgagatcagcctgggtaacagggagactcatttctacaaaaaaatttaaaaatttaggccaggcatggtggtgcacacctgtaatcccagctactcaggagactgaagcgggaggatcacctgagcccagggaggacgcggctgcagtgagccgttatcatgccactgtactccagcctgggtgacagagcgagaacctgtctctaaaaaaaaaaaaaaaaattctaagagaatatagcttttcatagaaattattagaaaagcttacatatttcattagagagcccagtttgttagactacatttattccgtaaaagttctatatacaaatgacaacccatagtttatcatgtaaatctgatttaactgttcccttcaattccaagaaagatttcttcagcagtagatgacaattctaaaagcataaagaaataactaataaaggagatggatgatgttataggttggtttggttgggttttagtaaatagttattcttctaagaaggcttagaaaatcgagaattgaatagttggtactttgaattccataggaaaaagcactcagaagaaaaagtctacattggctagtgtttagattgagagttaattttcccatcaagtccaaaagtttccatccaagtctatagaaactgagagaaaaggttcttggcttacacttaaaatacacattgttgcaaccatataagagagatacattacagaacgcttttaaaaatttggtctcttaagcgcctaacagtccatgctttagtcacatctgtgaaacctcttttctttttttctttttcttttattttttttttttaaagattaaaggcattttaaaaataaatgtttcatggccgggcatggtggctcacgcctgtaatcccagcactttgggaggctgaggtgggcagatcacctgaggtcaggagtttgagaccagcctggccaacatgatgaaaccccatctctactaaaaatacaaaaaaattggctgggcatagtggtgggcacctgtaatcccagctcttcgggaggctgagacagaagagtcgcttgaatccaggaggtggaggttgcagtgagctaagaccgcgccactgtactccagcctgggcgacagagcgagattccatctctaaataaataaatgtttttcaacgtgttttatgtgagaaataccagcttttcattattactaccagttgatctcaggtgtcacttggttggttctgctgaccgaggcactgggcattttaaatatggagtttccctccacccattgatcaagtctgaggtttgtccatccttggtggcaggctagcttaaccatggattcacaaaccccatttgattgtcgtaagtcatgaggccaccccagtgccagtggttgggcatcacagtgagtctgaggtgatgaatttgagttagctgtaggctagttccgcaactcagcaacagcccatggatggttggtaaaagacgttgactttgccacttaaatttccaggagaagaatagcttatagtttatctgaggaaagtaattgggaaggcttagatattgagaagaaagccctgttaaaatctaggtagcatttcctttcttctttattactagagggatgggaggttcaggcctgagtcaggactttacaatttggtgtccttcccagaggtactttgggcttgatcattttaagtttcaattgcaaaaaaaaatttttgacggagtgttgctctgtcactcaggttggagtgcagtggtgcgatctcggctcactgcaacttcccccccctgggttcaaagggattttcctgcctcagcctcccaagtagctgggactacaggcgcgtgccaccatgcccgactaatttttgtatttttagtagagatggggtttcaccatgttgcccaggctggtcttgaactcctgagctcaggtgatctgcccgcctcggccttcaattgcagaagtttttgaagggagaatatttgatcctcacataaaatgtccttgtttctgaaagaaaacatggtaaaaattgttattgagtccatgtctttgccaccttgttggacttgatttccctttctctgtgttcctcccgccctcagtctctctcagtctgtccttttttgtgtgtggagttgtgggcaggtcattggactgggactgactttaccagttttcaggctgtggggctagtcagtcattctctctgagccttctacctctaaagttgagttctttttttaaattctttttgttttgtttttattttttccttgccactatacaagcaaggatagataaagctttttattattattgttattattattatttcgagacagtctcgctctgtcatccaggctggagtgcagtggtgtgatttcagctcactgcaacctctgcctcccgggttcaagcgattctcctacctcagcctccttagtagctgggactacaggcatgcgccaccacacccggctaatttttgtatttttagtagagacagggtttcaccgtattggccaggctggtctcgaactcctgacctcaggtgatccacccaccttggcctcccaaagtgttgggattacaggcataagcgaccgtgcccatccccgataaagttgagttctgaatttcctctttcactgtattctcggcagctactggttggtttattctttttttttaatcttttttggtttattcttcttttgatctttgaagagaaggagaaaaaagatctgagtttggctctcccatcttaagtgcagcttttagttgttttatagtcatagacgctattgcactggacagcatgcatcctggatgtaaacaatgcggaaaaatcaatggagtgaccatcttggggtcagtggtgttgcataaagcaccagtggtgtgctgttctgtgtcagtttcctctgcgccacgtgctttcacagtttgaattaccagcatctctgtggtggcttcagtacattctccattgtgcttcaacctggaagcacattctgccgttcagaaagactgattccaatcatgtaatgggaccacacgagatccatgctccaattatatgaatagcagaaggtccatttgactcttgtagttcaagagctgtttctaagtaaacagactttccagagctcgatgaagtgaagaagcccttctttcaattcctgggcagaattcagtggttttcatatcatctgaacctgctgtgctgctgtttattctatcactgtcagccttgaaaggaaaaaaggaataatcttaccctcctgcccttcttattttatatcttccatcttatccatctatatccatgtagtcattccttccgagttccctggttttaatccaaaagactctgtttaacagcaatgtcttggcagaccaggtgccgcttccgtgccatttgagggctctgagtctttgcttcgtcttaggaagataaagataatttggcagaaagtcagagatggaaatagcagtttgggatgataaaagatgggtcctgttttgctgacattcttttactttggttcttggtgcgtgtcctttgggattcatttcttgctagcatgaataggacatgcttttcgttaggtgcttttcttttttggagaacatgaagtgtttctaacaaaactgaatgagctagaaagaattctattttgagacatctgtagttgatgcaaagtatttctgtaatcctcaatgacagtacttacatatttgcatagaattttttttttaatttttgaggaaacctctctggagtctgtatttataggagcatcctgaaagtccctattatgtagctggtgggagcgagagagggacagccacactcgtgctgtgagcagagcacaacttcaggcagagtgaatgccttctgagttctcattggaagctttctgttgctcagcctctggcagatttcagaaccttctacttaagccaggtgtggtggtgcgtgctcctaggcacagcgactcggggggctgaggcagaaggatcacttgagcccaaagttggaggccagcctgggcaacatagcgaggcctgtctccttaaaaaataaataaataaataataaataaataaataaataaaaaccttgtccttgactattgtgctgtctgctgcccctttgtagggatggggttggggtcagaataagcatgtgcatgaatggcggaaagctttggtggtgtttgtttgtttgtttgttttttgagaggtgggggagtcagcagtgaacctttctggttaaagaacaacgtacataatttctattatgagatttagaaggttaaatacttttttttttcaggcctaccaagttgatagaccaaaagtatatagtagaacagcacagtagaaaaaatttaaaagtgaatttcttatggtccaaaaggatggatagtcacagtccataacctttcataatatatgctggaattggaatctcttgtcatcttgctttgctctgaattttagaactagaagtgtgcacgtatgtcaaaagattatgcagagctattttctttgctaacaatgtaaacatttgcaccccatgaatgggactttataatctggaagtgagcctaaggttgcgtatactgaagtcatgttttaaaagttaaggttgacttaaacatatacaaggctgtattttaattgtaactagaaatcatttactatgcatacagaacctcatgtatcttatcatggaatttgtgaattaatgggccttgccgaattcaagggtaagggaaactggtaacaacttgttttaaatcaacatactataagctcctgcttgcttgactcaagttgtttgaaaatctgaattaaacaggatctcattgtcaggaaacatcttctaagcttgacatctacgtttaagaagggaacgtggaagagaaggtgagacatgaaactaaaacagctgggagggtaggatcagactgcacctgatttttggaccaaagtttcatataggaataaataaaaaggaggaccacttgtgagccaacctaggaaggacttgccagaaagtagcagctcctgctgcaaaatacagtgccttcaaaatgattctctgtgtgaattgcatgcaatttcatgtaaccataaagtgtaacctgtatgtgcatgacatgtgtctagaatgtgtaaagttaggattcagcaggaaggggcctggccctgtcactgtggtggatcagtggacctgctgaagtcactggactcatgtgacttaggtttgcagcatcagacccctgtgtttgcattaagtggccacatcgttgaaatcggatcaatctctccctcagctttctttcctactttgcagctttgctggttttaactgcttcattcttctgcttcttggtatccttttttcttttgaaataaaaacatgaaatacttaattcaaatgagatttgtatttattttaccagttgctcttaatttaccaaaggtatacgacatgaaaagagttgcattcttttgtcttggttgtgattctgaccttaaaatacgctcagttctaaaagcttgaggagcgttctatactggtccttctgcatttcagcctgtcaccaaggggagtgttttgcgatccgccatcctttccctgaatgctgctgctcctctatgacggaaagcttggtgacctcttcattggaggcgtccaaagccagtgaacagcctgttggtaaatgaacgagctgcatgtacgtgctattttcctccaggaccaaatgccctgtgcattttagtattaagcgtacttactgcaggaaccagtactgggaccactgcaaaactacacaatggtgcaagtgctttggggctttgaagagctgaagacagacataagacttagtgttctcaggccgggcatggtggctcatgtctgtaatcccagcattttgggaggggtgggcggattgcttgagtccaggagttcaagaccagcctgggtgacatgacgaaatcccgtctctacaaaaaaaaaaaaaaaaaaaaaaaaaggacttggtgttctcactttgtgaccatcctgcccctcactggaggtccctagaggcaggtgcctttcagctaagaatatctggaagtctgtggtttgtgaggagcttgctggcacattagtgtaaagggtgtgatccttttaatggccacacttttctgtatgatgtctttgttttcattctctgatgtcagggaggtgaaaagaaggctcaggtgaaaagaaggttcatcaactgaaccagagtaacttgtcacctccttttttgccagcctcatttctaaatagactgaatgtctgttacctctcctctccttttcaactgagaagcccttggtgtacagcggaaaggggctgtaggggaatgcattttgccactgcagtcatgagctgacccagccttctgtattcttggatgttttcattctaggctgaatcccattgtgttatggcaaagaggccagaccctaagagactatatgctgaaaagatttgtgaagcccctcagttcccagtaacttttggagcttattgtcatgagattgctaccctagccctgggcagtgtgggcaaggacaccgtggcacctgggcactgagtccgggagttgtattttagccttctctcctctcagctgtaaagtgaggtgtttaggtcttcaaaggtcattccagctccagcttctatggtttcaatatgctgggggtatctggctgaggctccccacccaggtggcccagctgacagtgacagtatcatagagtgcgagatagcctctgtcaccacactgacagctgcagacactagtatggaggggttatgtgggtgaagttcaaggcgtctctctgtgaacaagctagaaagaaccactcatttgtcatttctccttggccacaggctctcatggcaaaggcctctgactgaggagtaacacagcgttgaaccaattttaatattgcaaggccactcctgtgggtaaaggcattggagatgtatgcttcaaagcatttttaaaagtcacctgggatatgacagtgatgtctatccttggatgattatagctcttaagtcatcactcccgacccccaagacaaaaacgagtctgagaagccaggaagctggtttgcaaaaaatgtgtcgcgttgagttgggcctttcctgccacagctcctgccgctgggtgaagtgttggaaccctacagacaggtcctgtcgcagccagctgggaagccgaggtgagcaggcctcctgggacagatggggccccactgatgaggccactgaagccccacaaaagggctggctgctgtcaggagcctccacagctgggattgccaaccacgttttggcttttttaaaaaaactttttttaattttagagatggggtctggccatgttgcccgggctggtctcactcctgggctcaatcctcccacctcagcctcccaaaatgcagggattacaggtatgagccaccatgctcagccttaaaaaaactttattgaagtaaaacatatggacagaaaagtgtacgtatgcatacagctcactatcttgacaaactacacccatttgcacagcacccaaagcgagaaaagacgtcaagacccagaagccccctcgtgtttccttccagccactccctcccagcatcacccctctcctgacttctgacccccgaggttgctgtgtttgtgcttgatgtgaaggaatcctgctattttgtgcttggttcctttctcccaatattgcatgtgagatcatccgtagtgtgtgtagtggtggattgtctgtcctcgtgatatcgtagttcccagcttagggctattatgggtagtcctgctatgaatattctagcatgtgtctttggtgaacatatggatgtgtttcttctgggtgtgtgactaggaatagcgttggtgggtcacagcgtatgcctgcgttcagcttcagtagatcctgacccacttctaaacgtgcctagcagtgctggagccatttatgggcatgtcagctggcggggctgcgagcctccctccgtcgtagctcccttctgtgaatggccccacgggcagcacagggaacaatccaacgaaagaaccgaacctgccttggacagctaactaactgcggtctcattctgtttccctgaaacgtggaattaagtttcgaatacaactttccttccctcttaacaacgatattattcatgtctacatttattgcaagcatttacctagaagataaggcctatttcctccaataaggtgagtttatactcaatgaaattaattttttcgttcatttagcattgcttcctaacaagttgtcaattgatggagcagacatttctttcctgagctgcagattataaaggggtctcactctcagggcacaagaagcaagagcacatacccaaaggccaaggaagtggctgccttctttgtttttccctaaatgatgtcctctagagaaattcccacagccccattatgagacgggaatttgcttgattaaaggagatgattccactttctgtctagtaatctggggcatgaagtggatggttagatacaaatctccagtgttaagtaccagtaatttttgtcagtatgaaaaaagtggctgggtgcagtggctcatgcctgtaatcccagcactttgggaggccaaggtggacggatcacctgaggtcaggagtttcagactagcctggccaacatggagaaaacccatggacggatcacctgaggtcaggagtttgagactatcctggccaacatggtgaaaccccatctctgctaaaaatacaaaaattatcagggcgtggtggtgggcgcttgtaatcccagctactcaggaggctgaggcaggagaatcgcttgagcccgggaggcggaggttgcaatgacctgagatcatgccactgcactccagcctgggcaacagaacgagattctatctcaaaaaaaaaaagtgctttactttttaaaaatgtaattagagatgtagtcttgctatgttgtccaggctggtctcaagcaatcctcctgttctggcttcccaaagtgttgggattacaggcatgagccactgccaaagattatttattattattataacttaactgggagctgttcaagtcccaaagctctctagctctcctaagttttcaaaagaagggaaaagactttttccacatgatatcaatcccatgtgtcagattatcttgtaaatgttgagacgcgtaggtcagcaagggtccagaagctgggagtgtgcacagcaggtggaaatggaaggggaatttgtttttgccttgcagatctcctgtcctgactcaacacttaatggcacagtgtctcgggtgctttcttgaaacctggtgatgt

SEQ ID NO: 665 - DNA, 6828 bp, Homo sapiens
  misc_feature (1)...(6828): n = A,T,C or G
gaggcggcggccgcctggggaccagctccgcgcctcggcctctccgccccctccccagcctttctctcgccctcttctcccacactcccggccggcgcctcggctttgtgcgaggagatggtgtagccccctggccgccgaaggaggagccggacacttgtctcccgtctccgagctgctccccacccctggaggagagacccccccctcggctcggcgccttctgcgtctcccggctggtggggaagcctctgcgccgccggcaccatgagtgaacagagtatctgtcaggcaagagctgctgtgatggtttatgatgatgccaataagaagtgggtgccagctggtggctcaactggattcagcagagttcatatctatcaccatacaggcaacaacacattcagagtggtgggcaggaagattcaggaccatcaggtcgtgataaactgtgccattcctaaagggttgaagtacaatcaagctacacagaccttccaccagtggcgagatgctagacaggtgtatggtctcaactttggcagcaaagaggatgccaatgtcttcgcaagtgccatgatgcatgccttagaagtgttaaattcacaggaaacagcccagagcaaggttactgctacccaggacagcactaatttgcgatgtattttctgtggtaagcaacattatggccaacattgcctagacaaaactcacaactacctgctcaagttcaaaatggcccatcccaagaagaattggaaattcaaagaagaaagaatggaaagagaaaggttggagagagagaggttagaaagggaaaggctggagagggagcgactggaacaagaacagctggagagagagagacaagaacgggaacggcaggaacgcctggagcggcaggaacgcctggagcggcaggaacgcctggatcgggagaggcaagaaagacaagaacgagagaggctggagagactggaacgggagaggcaagaaagggagcgacaagagcagttagaaagggaacagctggaatgggagagagagcgcagaatatcaagtgctgctgcccctgcctctgttgagactcctctaaactctgtgctgggagactcttctgcttctgagccaggcttgcaggcagcctctcagccggccgagactccatcccaacagggcattgtcttgggaccacttgcacctccacctcctccaccactcccaccagggcctgcacaggcttcagtagccctccctcctcccccagggccccctccacctcctccactcccatccaccgggcctccaccgccccctcctccnatggaggatacctctttcccaagtggagggaatgctattggtgtgaactccgcctcatctaaaacagatacaggccgtggaaatggaccccttcctttagggggtagtggtttaatggaagaaatgagtgccctgctggccaggaggagaagaattgctgaaaagggatcaacaatagaaacagaacaaaaagaggacaaaggtgaagattcagagcctgtaacttctaaggcctcttcaacaagtacacctgaaccaacaagaaaaccttgggaaagaacaaatacaatgaatggcagcaagtcacctgttatctccagacgggattctccaaggaaaaatcagattgtttttgacaacaggtcctatgattcattacacagaccaaaatccacacccttatcacagcccagtgccaatggagtccagacggaaggacttgactatgacaggctgaagcaggacattttagatgaaatgagaaaagaattaacaaagctaaaagaagagctcattgatgcaatcaggcaggaactgagcaagtcaaatactgcatagaggaacagactaaggagagataggactttaatctggaggaaaaatatcctacaaacaacaactgttcacaacagcaaacccctacatttatgagctgtaagaagaaaatggagacaaacagaaggagggaaaaaccaacctactctgaaagccttcagacattatgactctggtgataagctctttccctctccgtttgctgcttttttctggcctttacaacagaatggaagagaatcatttaagagttcctgtaacagttatgcagaaaatactaaaacccatcaggcaagatcaccacgcattgaaatattttcatatcaagataaagtcgcacattttccacaatacattgctaaaataaagaggagaaaggcttaggaagtttttttgcagagagtgctggtaaagaattgagcaagtttgctattgtattgtaatgtttctctcaggtttgttcttcctatcatgtttgatattccatgaataattgagatcagccctatgtaagttaagatcataatatgtggaacaaatggaattgtaagtgctttcaaagggtaatatttataagaaagtgtccgaaaaatgtttcttcagcttgagaaattttagaatgataggaagtttctcgagttagccttcatgcaattttgtagattaaaacataaaatttgtccagaacttaaagatttagatgccttcctaaattgttacaatgctttaccaaatctatgacttctacataacacaaaccagtggtcaaatgtaaacactatattgtagatttactgtaggttttcaaccttttttagatttatgcatgtggacatttttataatgtaattacaatcaccacaaggttagcttttttaattgcagacagtaatgcatgtcacactaatatgtagtggccttttcaaggcctagtcccagggaaaacattttgtagagtataggggagtgggaggaaggggaggaataattttttatttaaagttgatttctgcactatctttttctcagttacctgcatgaataaataatgagaaatattttgtgactttaattggtaaatatgttacaaaaccaagtacttaatcttttacatcatgtcttcagctatttgtattttaaccagtaatttcaatggtctgaaacatgattctgagcttcacataatatcttaactgtggaactcaaaagtttgatcactgaatttggcagttattattacctaggtacccccgctgttacacaggtgtttagatacgtgttcctgaatgaagctgcttttgaattttgttatgttgaaatgcaagaaataacaatgatggcagcaattaaggtcacagaaatcattaggtaaaggaaaaccaatgaggagttctgcagttttcttttaataagtaaagtgagacttgggtggtgggaagaaggaaggtgggaagaaggaattagacactctgcctgccactctgcgtgtgtgtgctctcgcgcacgtgctgtctatatggaagccactcccttttctttcctttgaaactggtaaggttaaaataggggagaaatcctacatgttggaatgatagctttttggaaaatttaagaaactctccaggctctccatcttgatttatgcttgagttgttatgtgccatatttgctttgaactctgattatcagaagttttactaaaactttgaaataattcactttcatctgctttctagattttgtacatctcagtccataaagcaaagcttgttgatagtgtagttttctaaacgctgcaaatttgcagcctttaccactacaaagaagtttggatgagggattttttttttctttgtcaaaatagttcctgtttctgtagaaatttcatttttagattaaactgtgatggatgagctatcataattcaagtatacatttcttttttctatcagatattcattgtcatgcagtagtagtaaaaacatcaaagatgcagcaagcttattaagtattattttctaaaagaaataggaggcattttcatctttattattgtacttttggttatgcaaacactttgataatataaacagttatgtcccctataaatctggtcagcaacctcttttgattttgttgggtaagttaaatagtctgtagtaggtagagtactgggtacaagtggtccaaactaagataagagactaaaataaaatgctaaatcttaaaagaaactgggtttatgcactaaacgttttgtgccttggtctaatattaacatgatgtatgtgtaaactgacaaaaaaaaaaaaaaaaaaaaaaccagtgttgaatcatgctatatttcccatcatcccagattgctaaatgttctttccaagaagtctgaatgaattattatatacatttgctatcatacatgacagttgtgtcattattagagatttcagtaattaaaatgggaaacagaagcctaagttatttaccttatcaaaaccacgttccttggaaccacattattatgatggtttttgtgctcttgtacgttggatgtcttaagctgagtacagtttaggggatcctttctaatgacaggaaggcactgctttcctcaacactgtgatctgacctgtgacaagtctgtactatccactatgtaaatggctcacaagtcaattgcaaacaaactgaatgtacaaatcttagtgctggtgctgaaatctcttcagaatagtcatcatgatttaaaagtttgtttaaaaatttgcaagcatcaagtgtcaatcaaaactgaagatgaaacactaatgaatgttgaattctcatgcttttaggtgtacttcctttttagaattttcagttttctgctatttttaccgtaactatttcgtttaaatttgtttcatttaagtttcctacatgctaacttcgtttgtgcgattgaaataaaattgcagtatatatatgttgcttgtttgtgacacttagataatcttctgaaataatttgttttaaagtaagttatattggatgtgaaaaacaccttttaaagtccaagactttactacttaaaagtttacatgtcacgtcactattctttacagatttcatagaagtcgtgaatactaagtaatgtatacaaaagaaatatgtgatgatgtgtctactttttgtttgaaataactgttgggtgttccctcttcttattttctctctgcccaccttgacacagtaacttcctcttatagtcaagatgatgattaagtgtttaatttttattccattttgttctgcaacacgttcagatacttaaaactcattcatgcagttagaattatcctttatgtagtttgcatggtaaaggacattgtgtggtaaagggcattattgagtaatgaattttaagtatagcaaaatatgtatagtgtttatacatgatgctgatttcttaaaacctacatataagcagtagtactttttctctattataaagtattaattttgagttccattttataattctgatgtcttcattagaaatacaaaaatacaatccttgtattttttctttgaccagacccaaattttccccttcccccctccattctcctctccacttctcgtggaccgcgtgttcccaatattcattaacatttgcagccattacagagttacagttgtaaaattttcagctgtttttttttttttttttttttttgctctagcctgtctcatgttcttgcttctcttcatatgtaagtcagtatttttgtctacaaattaaaagtcacttgtcattcaaaaatgagttaagtaacatgataatcttttaaatttacctagctacaacttttatgtctcttgtaaatttatatatactttcagtgccattgtgaagaattggccttttaattctaagtagtattaccctatgaagcacagtgtgcaaaggtatgctacaaggtctctttaattcctgtgtggccattataattttataacaccattaccctttaaattctaccgattataagcagcgtaaaagtaactatataaagcaaacatcgcaaaggaactctgcaggagctcttaattcctttatgtagctatcataaaattcactttcctgaagacatttactctcattcacttccaaactccaaacctttttctggtagcaccacttttgtttttaatagaaagatgagttcatatctgtacatctctccaaagctctaaggaatgagaaaaggatcctagtatattgaaattactgatgtttaatacctctgccttttcactaaaagccatttaatatttttaaagtcaaaacttgacatacaggtatttataaggaatctccatgactctgaaggaatgaaattgatgtaggtagctttggctatgtaaagacatagtagaggacaattacttaaagaagagttttcttttgaggatttgtagatttgactaagcagctgaagtcagtaacccctcaagaaaggccgtttatagaagccaagaactgttggaggtctgtgatgcaggtttttctgttcccaacatcaaaagctgtggattatttggtgtgttcccctttatgttatctctcgataatttttgagacatcaagattttttaaaatatcaatactggaaagatgaaaccttcaaattaaaacctaaaattgattagaaagaaaagtaaaatattaatgcagtaaatttaggatggttacagatactcaccatcaacataaataaatggagttctaggataaattatttgtggaatactaatggtcaagtcacataagagtaaaatcttttggtgaggagacacatttgacaactgctaaagaattaactaaatttgtctttctaaatagttttctttataaagtaacagaaacattgtaaaaggataaataaatgactgtcataatgactt

SEQ ID NO: 666 - protein, 533 aa, Homo sapiens
MSEQSICQARAAVMVYDDANKKWVPAGGSTGFSRVHIYHHTGNNTFRVVGRKIQDHQVVINCAIPKGLKYNQATQTFHQWRDARQVYQFGSKEDANVFASAMMHALEVLNSQETAQSKVTATQDSTNLRCIFCGKQHYGQHCLDKTHNYLLKFKMAHPKKNWKFKEERMERERLERERLERERLERERLEQEQLERERQERERQERLERQERLERQERLDRERQERQERERLERLERERQERERQEQLEREQLEWERERRISSAAAPASVETPLNSVLGDSSASEPGLQAASQPAETPSQQGIVLGPLAPPPPPPLPPGPAQASVPPPPGPPPPPPLPSTGPPPPPPPMEDTSFPSGGNAIGVNSASSKTDTGRGNGPLPLGGSGLMEEMSALLARRRRIAEKGSTIETEQKEDKGEDSEPVTSKASSTSTPEPTRKPWERTNTMNGSKSPVISRRDSPRKNQIVFDNRSYDSLHRPKSTPLSQPSANGVQTEGLDYDRLKQDILDEMRKELTKLKEELIDAIRQELSKSNTA

SEQ ID NO: 667 - DNA, 7374 bp, Homo sapiens
  misc_feature (1)...(7374): n = A,T,C or G
gaggcggcggccgcctggggaccagctccgcgcctcggcctctccgccccctccccagcctttctctcgccctcttctcccacactcccggccggcgcctcggctttgtgcgaggagatggtgtagccccctggccgccgaaggaggagccggacacttgtctcccgtctccgagctgctccccacccctggaggagagacccccccctcggctcggcgccttctgcgtctcccggctggtggggaagcctctgcgccgccggcaccatgagtgaacagagtatctgtcaggcaagagctgctgtgatggtttatgatgatgccaataagaagtgggtgccagctggtggctcaactggattcagcagagttcatatctatcaccatacaggcaacaacacattcagagtggtgggcaggaagattcaggaccatcaggtcgtgataaactgtgccattcctaaagggttgaagtacaatcaagctacacagaccttccaccagtggcgagatgctagacaggtgtatggtctcaactttggcagcaaagaggatgccaatgtcttcgcaagtgccatgatgcatgccttagaagtgttaaattcacaggaaacagggccaacattgcctagacaaaactcacaactacctgctcaagttcaaaatggcccatcccaagaagaattggaaattcaaagaagaatggaaagagaaaggttggagagagagaggttagaaagggaaaggctggagagggagcgactggaacaagaacagctggagagagagagacaagaacgggaacggcaggaacgcctggagcggcaggaacgcctggagcggcaggaacgcctggatcgggagaggcaagaaagacaagaacgagagaggctggagagactggaacgggagaggcaagaaagggagcgacaagagcagttagaaagggaacagctggaatgggagagagagcgcagaatatcaagtgctgctccatcttcagacagctccctgtataacgctccacttcctgagtattccagttgccagcctccttcagcacctcctccatcatacgctaaagtcatctcagctccagtgtcagatgccactcctgattatgctgtagtgactgctttgccacctacttccacaccccctacaccaccactgcgacactcagcgacacgttttgcaacatctttaggttcagccttccaccctgttcttccccattacgctacagttcctcgtcctctgaacaaaaactctcgaccttcttctcctgtgaacacaccctcttctcagcctccagctacgaagccctgtgcctggtctacttccaatttttcgcccctccctccatctcctccaataatgattagcagccccccaggcaaagctactggtccaaggcctgtcctccctgtttgtgtttcttctcctgtgccccaaatgcctccatcaccgacagcacccaatgggctggttgactctgtaacatatccagtgtctccaccgcctacctcagggccagcagctcctccgccgccgcctccactgccttccctcgcatcactctcacactgtggatctcaagcttctcctcctccaagcacccctattgcctcaactccctcatccaagcctagtgttctcccttctccctctgcagctgcccctgcctctgttgagactcctctaaactctgtgctgggagactcttctgcttctgagccaggcttgcaggcagcctctcagccggccgagactccatcccaacagggcattgtcttgggaccacttgcacctccacctcctccaccactcccaccagggcctgcacaggcttcagtagccctccctcctcccccagggccccctccacctcctccactcccatccaccgggcctccaccgccccctcctccnatggaggatacctctttcccaagtggagggaatgctattggtgtgaactccgcctcatctaaaacagatacaggccgtggaaatggaccccttcctttagggggtagtggtttaatggaagaaatgagtgccctgctggccaggaggagaagaattgctgaaaagggatcaacaatagaaacagaacaaaaagaggacaaaggtgaagattcagagcctgtaacttctaaggcctcttcaacaagtacacctgaaccaacaagaaaaccttgggaaagaacaaatacaatgaatggcagcaagtcacctgttatctccagaccaaaatccacacccttatcacagcccagtgccaatggagtccagacggaaggacttgactatgacaggctgaagcaggacattttagatgaaatgagaaaagaattaacaaagctaaaagaagagctcattgatgcaatcaggcaggaactgagcaagtcaaatactgcatagaggaacagactaaggagagataggactttaatctggaggaaaaatatcctacaaacaacaactgttcacaacagcaaacccctacatttatgagctgtaagaagaaaatggagacaaacagaaggagggaaaaaccaacctactctgaaagccttcagacattatgactctggtgataagctctttccctctccgtttgctgcttttttctggcctttacaacagaatggaagagaatcatttaagagttcctgtaacagttatgcagaaaatactaaaacccatcaggcaagatcaccacgcattgaaatattttcatatcaagataaagtcgcacattttccacaatacattgctaaaataaagaggagaaaggcttaggaagtttttttgcagagagtgctggtaaagaattgagcaagtttgctattgtattgtaatgtttctctcaggtttgttcttcctatcatgtttgatattccatgaataattgagatcagccctatgtaagttaagatcataatatgtggaacaaatggaattgtaagtgctttcaaagggtaatatttataagaaagtgtccgaaaaatgtttcttcagcttgagaaattttagaatgataggaagtttctcgagttagccttcatgcaattttgtagattaaaacataaaatttgtccagaacttaaagatttagatgccttcctaaattgttacaatgctttaccaaatctatgacttctacataacacaaaccagtggtcaaatgtaaacactatattgtagatttactgtaggttttcaaccttttttagatttatgcatgtggacatttttataatgtaattacaatcaccacaaggttagcttttttaattgcagacagtaatgcatgtcacactaatatgtagtggccttttcaaggcctagtcccagggaaaacattttgtagagtataggggagtgggaggaaggggaggaataattttttatttaaagttgatttctgcactatctttttctcagttacctgcatgaataaataatgagaaatattttgtgactttaattggtaaatatgttacaaaaccaagtacttaatcttttacatcatgtcttcagctatttgtattttaaccagtaatttcaatggtctgaaacatgattctgagcttcacataatatcttaactgtggaactcaaaagtttgatcactgaatttggcagttattattacctaggtacccccgctgttacacaggtgtttagatacgtgttcctgaatgaagctgcttttgaattttgttatgttgaaatgcaagaaataacaatgatggcagcaattaaggtcacagaaatcattaggtaaaggaaaaccaatgaggagttctgcagttttcttttaataagtaaagtgagacttgggtggtgggaagaaggaaggtgggaagaaggaattagacactctgcctgccactctgcgtgtgtgtgctctcgcgcacgtgctgtctatatggaagccactcccttttctttcctttgaaactggtaaggttaaaataggggagaaatcctacatgttggaatgatagctttttggaaaatttaagaaactctccaggctctccatcttgatttatgcttgagttgttatgtgccatatttgctttgaactctgattatcagaagttttactaaaactttgaaataattcactttcatctgctttctagattttgtacatctcagtccataaagcaaagcttgttgatagtgtagttttctaaacgctgcaaatttgcagcctttaccactacaaagaagtttggatgagggattttttttttctttgtcaaaatagttcctgtttctgtagaaatttcatttttagattaaactgtgatggatgagctatcataattcaagtatacatttcttttttctatcagatattcattgtcatgcagtagtagtaaaaacatcaaagatgcagcaagcttattaagtattattttctaaaagaaataggaggcattttcatctttattattgtacttttggttatgcaaacactttgataatataaacagttatgtcccctataaatctggtcagcaacctcttttgattttgttgggtaagttaaatagtctgtagtaggtagagtactgggtacaagtggtccaaactaagataagagactaaaataaaatgctaaatcttaaaagaaactgggtttatgcactaaacgttttgtgccttggtctaatattaacatgatgtatgtgtaaactgacaaaaaaaaaaaaaaaaaaaaaaccagtgttgaatcatgctatatttcccatcatcccagattgctaaatgttctttccaagaagtctgaatgaattattatatacatttgctatcatacatgacagttgtgtcattattagagatttcagtaattaaaatgggaaacagaagcctaagttatttaccttatcaaaaccacgttccttggaaccacattattatgatggtttttgtgctcttgtacgttggatgtcttaagctgagtacagtttaggggatcctttctaatgacaggaaggcactgctttcctcaacactgtgatctgacctgtgacaagtctgtactatccactatgtaaatggctcacaagtcaattgcaaacaaactgaatgtacaaatcttagtgctggtgctgaaatctcttcagaatagtcatcatgatttaaaagtttgtttaaaaatttgcaagcatcaagtgtcaatcaaaactgaagatgaaacactaatgaatgttgaattctcatgcttttaggtgtacttcctttttagaattttcagttttctgctatttttaccgtaactatttcgtttaaatttgtttcatttaagtttcctacatgctaacttcgtttgtgcgattgaaataaaattgcagtatatatatgttgcttgtttgtgacacttagataatcttctgaaataatttgttttaaagtaagttatattggatgtgaaaaacaccttttaaagtccaagactttactacttaaaagtttacatgtcacgtcactattctttacagatttcatagaagtcgtgaatactaagtaatgtatacaaaagaaatatgtgatgatgtgtctactttttgtttgaaataactgttgggtgttccctcttcttattttctctctgcccaccttgacacagtaacttcctcttatagtcaagatgatgattaagtgtttaatttttattccattttgttctgcaacacgttcagatacttaaaactcattcatgcagttagaattatcctttatgtagtttgcatggtaaaggacattgtgtggtaaagggcattattgagtaatgaattttaagtatagcaaaatatgtatagtgtttatacatgatgctgatttcttaaaacctacatataagcagtagtactttttctctattataaagtattaattttgagttccattttataattctgatgtcttcattagaaatacaaaaatacaatccttgtattttttctttgaccagacccaaattttccccttcccccctccattctcctctccacttctcgtggaccgcgtgttcccaatattcattaacatttgcagccattacagagttacagttgtaaaattttcagctgtttttttttttttttttttttttgctctagcctgtctcatgttcttgcttctcttcatatgtaagtcagtatttttgtctacaaattaaaagtcacttgtcattcaaaaatgagttaagtaacatgataatcttttaaatttacctagctacaacttttatgtctcttgtaaatttatatatactttcagtgccattgtgaagaattggccttttaattctaagtagtattaccctatgaagcacagtgtgcaaaggtatgctacaaggtctctttaattcctgtgtggccattataattttataacaccattaccctttaaattctaccgattataagcagcgtaaaagtaactatataaagcaaacatcgcaaaggaactctgcaggagctcttaattcctttatgtagctatcataaaattcactttcctgaagacatttactctcattcacttccaaactccaaacctttttctggtagcaccacttttgtttttaatagaaagatgagttcatatctgtacatctctccaaagctctaaggaatgagaaaaggatcctagtatattgaaattactgatgtttaatacctctgccttttcactaaaagccatttaatatttttaaagtcaaaacttgacatacaggtatttataaggaatctccatgactctgaaggaatgaaattgatgtaggtagctttggctatgtaaagacatagtagaggacaattacttaaagaagagttttcttttgaggatttgtagatttgactaagcagctgaagtcagtaacccctcaagaaaggccgtttatagaagccaagaactgttggaggtctgtgatgcaggtttttctgttcccaacatcaaaagctgtggattatttggtgtgttcccctttatgttatctctcgataatttttgagacatcaagattttttaaaatatcaatactggaaagatgaaaccttcaaattaaaacctaaaattgattagaaagaaaagtaaaatattaatgcagtaaatttaggatggttacagatactcaccatcaacataaataaatggagttctaggataaattatttgtggaatactaatggtcaagtcacataagagtaaaatcttttggtgaggagacacatttgacaactgctaaagaattaactaaatttgtctttctaaatagttttctttataaagtaacagaaacattgtaaaaggataaataaatgactgtcataatgactt

SEQ ID NO: 668 - protein, 713 aa, Homo sapiens
MSEQSICQARAAVMVYDDANKKWVPAGGSTGFSRVHIYHHTGNNTFRVVGRKIQDHQVVINCAIPKGLKYNQATQTFHQWRDARQVYQFGSKEDANVFASAMMHALEVLNSQETGPTLPRQNSQLPAQVQNGPSQEELEIQRRMERERLERERLERERLERERLEQEQLERERQERERQERLERQERLERQERLDRERQERQERERLERLERERQERERQEQLEREQLEWERERRISSAAPSSDSSLYNAPLPEYSSCQPPSAPPPSYAKVISAPVSDATPDYAVVTALPPTSTPPTPPLRHSATRFATSLGSAFHPVLPHYATVPRPLNKNSRPSSPVNTPSSQPPATKPCAWSTSNFSPLPPSPPIMISSPPGKATGPRPVLPVCVSSPVPQMPPSPTAPNGLVDSVTYPVSPPPTSGPAAPPPPPPLPSLASLSHCGSQDPPSTPIASTPSSKPSVLPSPSAAAPASVETPLNSVLGDSSASEPGLQAASQPAETPSQQGIVLGPLAPPPPPPLPPGPAQASVPPPPGPPPPPPLPSTGPPPPPPPMEDTSFPSGGNAIGVNSASSKTDTGRGNGPLPLGGSGLMEEMSALLARRRRIAEKGSTIETEQKEDKGEDSEPVTSKASSTSTPEPTRKPWERTNTMNGSKSPVISRPKSTPLSQPSANGVQTEGLDYDRLKQDILDEMRKELTKLKEELIDAIRQELSKSNTA

SEQ ID NO: 669 - DNA, 57860 bp, Mus musculus
  misc_feature (1)...(57860): n = A,T,C or G
agataaaattcactacacagggaagttgacttcctcataaacaagacagatagccacgcatggtagtgcacgccttcaatcccagcacagttaaggcagaggcagtaactcgaagagttgaattcagtctatacaatgagaccttatctcaaaaaacaaagaaacatcataatatggacccttttaatttatattaagtttcataaaaaaaacttgaaactaattacgtctcaaaacaaatcataacttattattaatctaatactctaccagaaaggatcagagtaggccaactgcaatacatcctggtcagcagttttttactattgatccaactgtttagaaacaattccttagtacttcttattttaagtagtactgttaaagattacaaggcaatagtttgtctttaaaatatatctcttttaaaacttactagaaattaccagctttattggcagcaacagttcttaaggcccaactgctggaactcagtaatacaggctatacaaggaatgaaacacttaagtatgaaaattgtcgaaatattcaaactacctccaaatgatgtgaaaaatatatttttaaaaattctattattctcttagttgcttctgataacaactcaagtaatacatgcttgtgaaaacagttcagacagagcccctaactcagtgacccctctgttgatgatgtttcttgagaccttttctgaacctctgatactgtactcactgacaggaatcggctaacgtagatgccattttttgctgctcttgcaaagatcctgggctcagttcctatcatccacttagcagctcacaattcctgtgaggactggatgccctcttctggcctgccaaggtaccaggcatgcaagcagtgtatatacatacatacaagcactcacacatacacataaaaccccaaaatcttttttagcactatcactttctgtgctaatataagcgtatctttcttttacacaatagtctatcaattaactactgagacgaaatcttcaacttttctttttcttttttggaaagacagggtctcttggagtttactgtagctcaggctgtcctcaaactcagagatccttctgcctctgcctccgaagtgctgagaccatgtgtctgagctttaagtcccagttggttattgtcttcaccctcccagtccttctctggttttgtagtgttgaggttattgcctcaagtaagcaaggtcggacagtcttgttttgttttgttttatttttttcctagacaagatttctctgtgtagccctggatgtcctggaactcactctgtagatctggctggcctctgcctcccgagtgctgggattaaatccgtgtgtcaccactgcctggctagatggttctaaaggtaacaatgccatcttggtgtctcagttcaggctggttttaaagttactgggtagccaaaatgaccttgaacctctggtcccctggcccagcttcccacgtgctaggattacagatgtgcaccatcacacccagtatcacgcagtgctgggaactaaacccagaacagcagcagtgctaggatggccctttacctacatccctagccccaagaactgactttaaaatatcaaatgatgttcaacttaatcaaaaggcagaagggtgataaagaaactaattctgaacctatgctcaacccagaaaaaaatactctcagtgaagtcgattcctgaatccttctagcttaaaagagcactatgtgagcaggaaaatccagaacagagactaataatttaattatctgagtttcaaaaatgtccctttaataatacatgtaattacacaaacagaagtgaaagaagagtgcagccaggcacggtggcatggacatggaatcccagtttcttgggaggccaacatagaaagattccccaagttcactgccaatctaggaatcttcaaaaggagccaaggatacactgtactgaagtccacctcgttcttacaaggtgggatgcttgaaacacaagcaaagaatttaacaaccaaaacagcattacagatgttaacctaatttacaaatgaggatggttaccatattcttgcagtcttagtaaaaagcaagtccttttaggaacataatgagagcgtaaccagccttgtgctgactcgcgcagggacacagtaccggagagtgatggctctggccacggggtcgttactgtggatcactgagaacaccctcttcacaaactcatccacatttagaatcttctccaggtgcttctcactttgctgcgtcactttgagaacacacagccgcaggaagttgtttctagaaaagaaacaggcaaagaaatgcctcactctaggaacagtgcgtgtaacttgggttgagtcagaccagtgctaatggtcagtgcttttcctgctccccactaagaaccacccaactctgtatacggtggctcccgagcgaaagcagtgtaaagcccgtagccccgctgaaagacgcctaaaggcctgacccaagaaacagctccaggacagaattaacctctgcagtcactcaaaggcgacagccagtgagtcaggcgatcttcctccacacagcttagaagagataagggtaaggagcatacacatctccaagactgtacctacaagtcactaaatgaaatcaggaatttctaaaaccatctgtaagaaagcctacaattttacaaaatacatatacagtagcagaataaggctgttctgacttaatttatcttgttccctgaagaaacaatttcgctctgaaccttttcattttttctaaaagtgtcattaaatctcatattaaagtatggtacaaagcattatgcattcaccgagagtaactgagtggcaagaagttctaatggaccagaagaaaagacacagtataaaacagagatacaagtagcctgtcctttgggctgctgaggcattcagcacacttacccaactctgaaaacatcagctaactttaggaatgctgagttgatgaggatagggaacgggtacttctggaaaagcctgggaaagcgcacgactgcctcacactgctccccgagtttgccagacctcagtcctattgaaaaagcacaggaggaactaattacagatatgtcaaatactgacagaagctaacttacagaaatgtcaaatactaacttatacaggaggacagcaagttttcaacaagtaaaaagaagcactgttcaaggaactggagagatggcttagtggttaagagcactgactgctcttccaaaggtcctaagttccaagtcccaacaaccacatggctcacaaccatctgtaatgagatctgatgccctcttctggagtgtctgaagacagctacagtgtacttacatataataaataaataaatcttaaagaaaaaaaaaaaaaaaaaaaaaagaagtattgttcaaaactaatgacttctgttcgaaactaaaaatggaaggctgtgcaagatggcacatgcctctaaccccaacacacaggcaaaaagactgcagttcgaaataaaaacaaaacaaaaacaaaaaacagctgacaaaaacaaatgaaaatggcatgtaccttagttacttgcaggcagggcatggatggtggcacacacctgcaactgcaccacatgggaagaggcagagatcagttcaaggccatcctcagccacataccaagcttgaggccagcctgggtcacttaaggtcactaaacaaagcaaaacataataccgtaatataaaactacctcaaaagaaaaccacaatagccaccaaacaaataagtaaatgccgtagaaatttcataaacattcattttaaagtttttatttcatgcatacatgtgagtggctgcataggccagaaggtgttagattctggagatggagttacacctggtggtgagtctcctaacttgggtcctctggaagagtagcaagtgcttttaactgctgagccatctctctaggccctaaactgattctcttagacacaaagcaatgaaaaagaaataatttttaaaatgttgaaagttgattaagactattcaggaatataaaatatgagtgaatttaaaaggattgaggtcagttagggttggtagtataagcttatagccctgggtatagcctggctgagacaaaagaatcacacttcaaggctaaccctggctccagagcatgtacaaggctagcctgagcaacctagtaaaactctgtctcaaaggtgaggtgaggggcatgaagagagactggaaccacagttcagtggttgagcacttgtctggaactctcaaaagcaatccttagtactataaaaaataacaacaagcaagcaaaacgacacacacaacgtatgctttctatcaattgaattagaagaatatctagaaaccttccaagtatttggtaatcaatattctgttaagtaacccataggggaaagaagaaggaaaataaaaaatatattttcaacggaatgaaaacgacaatacagtttgtaggctatgactaacacagtatttcaaggaatagttgttaatatcaaatactcatgttaggaaaagaagagcttccaatcaataatctataacctaacaaatgtatcaacatagctgtggtggtctgaataagagtgacccttgtatggtcggcagttagtagagctgtttgagaaggactaggaggtgtggccttgttggaatgggcgtggcctttcccatgtccagtccaatctctccctctgactgctgcctgtggatcaggatgtaaagctctcagctactgctctagtgccacacctgatggtgatggactaactctctaaaactgcaagcaagcctccaattaaatgctttctttgtaagagttgccttggtcatgaggtctcttcacaacaatagaatagtgactaagctcaatgtggaaaccaaatttttaacattgattctggaaagactaaaaacacctaactaaaagatgaccctcagccgggtgtggtggcgcacgcctttaatcccagcactcgggaggcagaggcaggcggatttctgagtttgaggccagcctggtctacaaagtgagctccaggacagccagggctacacagagaaaccctgtcttgaaaaaaaaaaaaaaaaagatgaccctcaacccttagtctgcattatatatagatgttaagagctataattttaaatattttgagactttatttatttgctataacacacacacacacaccacacattttgcttctatgtataaatgtgtaccttgtgcttgcaaggcctgcagatgccacaagaaggcattggatcacctcacaccgaagactacgagctgccatgtgggtgctgagaactgaagcagggtcccctgaaagagcagccagtgtccttaactgctgagccatctctacaaccccataaactgttttcaaacaatataaatctcaggcacatgtgttggaatgtctcatctgaaatcagcaaaaactacctagttaattatgtagttaatctcttaaacatttttagactagacttcttgggttttgtttaattgctgagattcagtcttgcttttcaacacagcctatcctggcactcactatgcagacctggctgctttgaaactcactatgaatgatctcaaactgggagtgactacatgtctgcctcccaggctctgtggttacaggatacgtcaccacacctggcatttaaacctgctaaacttctaagaacacctaacaccacactgccaaactaattagatgagagcaactactgttactaagaaacgagatgctacagtgagccctgtcatttagggcctatgcagctgacactgtgccgccacaggaactgtgagcacccctgagctagctcttcatctcctgctgctaatcaaagcatgtgtcttactggcaggatctggtaactcggagctgctctcgaaagacaagctagggaactttttgcctccaccttcatgagaaggggctcctaagggctactcctcaggtagacattcgagacactaagtaaccacagatgcaaccaatatccactaaagcaccactaacaaagcattaccaggaaagggtgtcttagacaatggctgcatattttctttacctcagatgaacatggctcaaaattgaatctctaacatgtatacatctcatatattcattttttaatggtgcttggttgtaacaggactaaaaaaaatttccaagtatcaccacacagggttagaatacagctcaattgcaaagcaacagaacaccgggaatgagaccctttgttcaagcctcagcaccacaaagaaatagagtaagtataactacacaatagaaggtgtactggctagttttgtgtcaacttgacacagctggagttatcacagagaaaggagcttcaggggaagtgcctccatgagatccaactgtaaggcattttctcaattagtgatcaagggggaaaggccccttgtgggtgggaccatctctgggctggtagtcttggttctataagagagcaggctgagcaagccaggggaagcaagccagtaaagaacatccctccatggcctctgcatgagctcctgcttcctgacctgcttgagttccagtcttgacttccttggtgatgaacagcagtatggaagtgtaagctaaataaaccctttcctccccaatttgcttcttggtcatgatgtttgtgcaggaatagaaaccctgactaagacagaaggcaacccacaacccacagcttaataaacagttaataaaggtcacttcacatttggaaggcagaaatggcaatttctgacataattactaagtatcctcccacaaaacttcagaaatcactgctaataaacatgctgacatataatgcagactgcacatgagaaaatactagtttaaaacaataagaaatgagactatttaataattcccattgtaaatcataagacaacagctcacagtcatacataaaagtaaggccatggtttcaataagtggatttctgtttagtttatctgaccttgtccatcagggtcaccaaccaaactgcagagtccatgctccctaattcagcttcaatgtggtaaactagttgctgaatctagattctatataaccttaaaggttcacttaccaatgctgtcagactaaatgtagtctggtaataaatatcctcaggaaaaaaaagtctgaatccatagggccatgtttctactactcttaaaaccaccagtaatgacatggcgtcagccgcctagtgcacacccaacccagtggctaaggccattcattctctcagaggggctgtgctgagtcctcactccctaacaccagttacattcctgcacacatgggcagtacaacagtggtcttcacagggagaattaagatggtggaactgggtggatggtaacaacgctaggaaatcctagtgtgtggattctgtcctgactctcacccagttctcaagagttgaatcagcactccacgatcaggcttttcctacagcattaggttcaccagcttccactcatgtgcagcaagaaagggaatgagtcaccttccccactcccacccatcctctcaaagccaggtgtgcacagagccatcaggttgagtgatgtcactaaacctttctctctgcaggaaggggatcttgcctgttttcatctggacaacttccaatcactggaggggcaaatacttggtctgatgataataatctacattaggaaaagctacacttattagagtaatatgtgggactcagcctttagcagctgggcccactgtgtcacactactgttcccggctgatacaatgtgtcttgttgagcttagggcttatctgtaaaacactcaacagcccccacttatttcttacacatatgtgttttaatttcaactcttcttattaaaaaggttgtactattactttcattacaactgtaaccttttctttcaaagagcttcacttttaattatgtgtatgtagggggagggagagatgggtgtataacagaccctctagagttacaggcagttgtgaggtttggggtgtgagtgctgagaactgaactctggtcccacaaaacagcagtgtggcctcttaaaggctaagtcatccctacagccgcagcatcttttttttttttttaatgtaaaccttatttcattgttattgtatgtatgtgtgcacatgtgtgtgactgtcaggcttgcacaggaagtgtttcacacagtaaaccatcacactggctcacaacacttagaaggtaactctggatgtccttcctttccttgctccatatccttaccctgctctacaacactatctactcttagcctgggacaagattagctacgctagagccatacacatttcggtgggaagggagttggcactgaataaaacagtgtaatgggccacatcaggtctaggacttgggaggctgaggatcaaaagttgagagttatccttggctttagggagtacaggccaacctggatgtcacagactttagtaaaacgtaaaaaactcttacctgtaactggtttcaaacttggacaaggaactaaggtgcatatttaacatgccaaagtctaattgacctccaggttctctcagcatcccccagtccctacttggcacaccctgccccccagacttgaacttacagatccttggtttccagtcccgttctctacaggttacacactggctacagttaaccaagaattgcctatagtgtaaaaaccttggcaggaaactgaagcaaaggtctcacatttacacaggacttctttatggatagctatctgtcaaagtccctcttcagcctttaataaaggcatcttttcgcataccactgccatttaacatttacaacagctgacatactgtgcccactttgctgacatatcgaggctagatgataatgccgcattccataatcactttagtagaactggaatttaactcctaaccctaaaattttttctcttagctacctgtataaggggaactaactcgtggaacttgtgtgcagagaatgagcgcgttcagccaagcttttcggatgttctcatccacatggaacctgctttagaacgcgcaattgacagtctcgcaagacaaatcgctgtaaaacgctcagaaaatcatttggctctcttaatgaaggcttcacctgcactgaacgttttaaaaaataatctcaaaattcagcactttatcttatttgctgcctgggaaaccagagactgtgcccccaagtggtcaaaggcatcctcgcaagcacgagcctctgctccaactgtgcaaggctactccagcaaccctgcatgcgcctaagcgctggctccaagactagcagccgtgcttcccgccccatacatcggcgcatgcgcctttctagcctctgtagctgccgccactaggtggcgccactccccccagacgcttcgcccgcgtccctcctccgtacctttgtccagttccataagagcggaattagcgtccagctcctgttcgccatagccggcatcggccaggaacgacttggttgagtttgacgccatgacccggacagttacccgactcgcccagtcacaaagattgcaaactctaccccagcaccgccatcttctcccgccgcggtctcgcggatttttccctccgcgcgctgtcaggcagtgtacgcatgcgcctcggtcgccccgcggttcgccagttcctctctgggcccccccgcgcaggcgctcagggagcctgtgaaccttgggttcccgcggctgagcgagagggaggcggagcttaggatgggggcgagccttcgaggcgccaggacgctgcgacgagagccaatcagaaagcgtgacgtcagtttggcgcggagtttggcggccggggctcttagtggcgggagttggaggcgaaaccgcgccgcgttgtggagggtgcagacggcggctcctgtggaacttgggggcgatcttctcggcgttcccctcagctgagccttctcctcaggcccagatgctcttcaactcggtgctccgccagccgcagctcggcgtcctgaggaacggtgagtaacggccccaacggccgctggccgtggcgggaaccacctccccccaggcgctccaccttggatcgctgccgactgtgggcctccaggtctcccgcggccggagcgaatccgggcgagcgaggaccgccgaagaacatcgtgcttgggttccttccggacgcttttcaccgtaatcgagctttttagttcggaacggaggccgaagttaggacgctcagtggcgtcccgggcccctggctgcttacgtcaatatcgcgcgttaactagagagtgcacgcttgtgagagtcgggggtgggagacgctttggcaccagcgatgtgcctgccgtctctgcagaaccttagcgatcactgcaagttcgttgtgcaccagcgcgcatggcccgcagttaaggaactcaatcttaaggcgccaaagtcccctcccccatctctgcaggctctgaaaagtcctaaaatacagactaaaagatgcccatagccacacccacgaggtgaccacgggtaatggatggaagggtattgttccaaatgtgtcttgatgccgaggtacttccagaaatgggattaaactcgtttttctcttcacggtggaattcagccatgttctcctgttagcatatagaaagccagctcatctcctacagtactcttaaaaacattggcaatctgagatgcgattaggctgatgtgttgttaaactaagaccttgaagagtggtcctaagaatgttgagaagaggaaaagctccttgaggtcctgcccggatctaaaactttgtagtcgtattccctctgtggatactcttgtagttacattctgcctctttctctgctcgaactttacaaaagttacttcgccctgtgttaggaatggccgccctgcacaatggttgtgagcggtcttcggagcgtctgagtttcaactccacctcttttcctatgtgctacattttctgtctacccacttttcagtctgtcgttccggcttacagatagccagacagacgttcagtgataggcactggcattcattgattgttacctcctgaagtctgcatctcttttcccctccggtgttgctgggccttaaatgattatagccgtaagtaaggattctactgctgctacactcttccattccctatgttttgggttaatttctgtaaaagctgtatgtattgaacttaatctagacagttaggcatacaagcatcttatattctaatgccccaaactgagttggcttcttcccaatttttgggagtgacattattttaaactggtgtccccagctaaaacttagactccatattcctcattatgacattttcaaaagaaaaaaaagaaatcccttaagtctgcttgaatctctttttccatccccacagattcagcctctttacctcaaactgagtcttccattttctctattccatccccaccattgggcctgatactttactccctgatcataacaagcctctaaatgtgcctttagtttcctttctctaccgatatttgtaagatggaaatataattacttttgtgagtttttaaatccatatctaagaatttttactataaactttaaacatgcaaaattataatttttagccttatagtgagttagcatcttaagataaatactattttagccttttaaatacatctgacactataaacaactataccaacgtggaagtcgtggtctctgtttttgaaaaggtgagcaaatgcttactgttcgatgttttatatggttgctttttcttctgaatatttctatcttaattctccgcaaatttatcctattgtaatttaaaagttcttgtcaccctgtcatgccccatcaaaaagcatataaagtgctgttttctgtggttttagtacccagtagtcacaaaggtttcccttaggatgaattatcaccacagttaattaatagtgggcagttgttagaaactaagtaacttcttaaaatgttttaagaaaaaagcaaaatttttattgaaagtgcatcttttaaagaaatggatttaggtatctggtgccttgtggtctcaaattgtctcatagttaggacctcactagttttctatttgggattttgtgtgtgtgtgtgtgtgtgtgtttatttatttagcacatgcctttaatcccagcacttgggaggcagaggcaggcggatttctgagttcaaggacagccagagctacatagagaaaccctgtctcgaaaaaccaaaagaaaaaaaaaaagatttatttatttatttttatttatatgcgtacattgtactcatatacacaccagaagagtgcatcagatcccattacagatggttgtgagccaccatgtggttgccaggaattaaactcaggacttctggaagagcggtcagtgttcttaactgctgagcccatatttaaaaatttgtaatggacacatctttcaacaatgcaaggtgtaagatgaggaagggagagtagaataccttccttttgtggaagtagaaaggaagtgaagcaagtgataggaaagggaacccctcaacctgttcagacagagtagctttagaaataatgtgtgggagctgttgaattgtcaaggggttgatcctctgaaaatgcaaagccttgtatatttcttttgagtgtgggcctttagctgtgtattgaagaaagaatggacctttccagatgagtatgggtgtctggaaaacactacaggttcatattcatagcataataaagatccaaaagtatattatggggagatacagaaataatgaactaagtagagcttgctcagtgagtcactttaaatactgtttatcagtctgaatactagtagaggtaaagaggcagagtaaaggaattagcttcattgtgaaaatatccaaagcaaattgtatcttcagtttttttaggttttttgtttgtttctctgtatagccctggctgtcctggaactcactttgtagaccaggctggccttgaactcaaaaatctgcctgcctctgctttccgagtgctgggattaaaggagtgcgctaccaagcccggcttgtatcttcagttttactcatgtgatttctctttgaatagacttaaaacttcacatcatatacctgcgtttacatttctttacaatgcagccttttgttttcaattttactttttgagtatttgtgaacataacatctttttagtggtctttcagagagtacatattaggttacttaatatcaaaagttagaagccatgcccctacaagcaattttaaaatctagactaagttccttttctcctttcttctcattccttctcaaactagattgagtgatatttctgttaggctgaaatatcttctctgtttgagaggggtcgctttctcatcatctttatcccttccttctattttgcaaaaggaaggcattctcttgtccccattgtataccttgcattgtctcagaatagacaaactgctggatgtctggtacagaattttaaataaacaaaactgagaattggtagtgccctaagacatgaatttaacatttgcagcacttacaacttgtcagctcattatttcatctgatccttgatcagcaattacttctttaaaaaatgtttttcttactgaggctgagcatgttaatctaaaaaatctgaaggctttgagtgctggtatgttcaaaagcctcaggatgcccaaccagtaaaatgtaagcaaatcggaaacatccttggtctcaaaaatgttttgaataagaacattcaaccttttatatttaaatgagccaacctacatgttcatactaatcagattttagatgatgacttagtatttagaaccgggatgtacattagaaagttggctttctttctgaaatgaaaatttactttgagttctctaaagctgcatttcttaggggcagagacagaccacttttgagtcatatctcacataagatactgggttcctgttagaattttaggatcctagaatttcagcactttagggaaaaggagttaaattgctagtcaatacagtaaccgtttgagtgctgattgtgttatggttgcagtttgcttgattttctcattcatgcactcccaaaacgaacttttcatggaagggagtaacagtttaatcggtaatgctttactggctgcgttttactggtaaatcggaactggatgtggtagaacatgcttttaatcctagcacttgggagtcagaggtaaacaatcttgaattcaaggctagtctgatctatgccatagtaaattcaaggccagccagagctctacataatgagactgtctagaaaaacaaacaaacaaacaaacaaacctatttatagtataacccaaatgtcctcagagtgttttgatttcttccttaaaatggcttaagaaaatagcataaatgtctggttgatctccannnnnnnnnnnnnnnnnnnncctggtcaacagagtgagttccaggacagggctggaaactgagaaaccctgtgtcgaaaggaagaaaaatagcagaagaggtgttctggagcaccatagatagtgagtagatctgagttacatatgtaaagttctatgtgaacaaatacttaaaggaactgttttgttttagggtggtcttcacattaccctctacaatcccttctaagtggttatcagtgcaactgtaacgatgaacacacgtcttatggagaaacaggagtcccagttcctccttttggatgcaccttctgtaccggtgagaaaaggactaagtacactaagcttgaacagaacattgcttcctacttagagggaaaatagactttgaaagaaaagaaatgtaggtagatgttaaaattattctcataactgatgatttataaggtacagagatgtttttaagatgaaggtttttttttcctagcaatcattttaaaaatgtgaaaagaagttcttgtctctagtctcatagtttaatggaggaaaggtcataaaaaggaactttaaaaccgacagtttctatctgctggtggtttgtatcctggttttatttgccatgggccagtaccactcttgatttagtcaagtcagagtatctaaagactattttgatggttagagtagggtttttaaaaattatttttatattatgtgtatgagtgttttgcttgtgtctatgtttatgtaccacagaggccagaagagggccttaggtccctgggaactacagttgcagacaattgtgagcagccatgtgggtgctgagaatcaaaccccagttttcttttgttgtagttgttttgtttttgagacagggtttctctgtatagtcctggctgtactggaactcactttgtagaccaggctggccttgaactcagaaatctgcctgcctctgactcctgaatgctgggattaaaggcgtgcgccaccactgcctggcaaaccctagttttctaaaagaacaataaatactcttgacctgagccatctctcagccctgttttgagtcacttgatacttttttactcattttgaaagttcttacatattctttgtttctcttcagctcccagtatggagcatatattagcagttgctaatgaagaaggctttgtcagattatataatacagaatcacaaactagcaaaaagacatgcttcaagggtaagtctgtaattttttaacatttttaattcataaaatctttggtgtaaattattgttttaatacaaggatgatggacagcttgggtggaataaggtagataaccatgcacgtgataggtgagagataagtgcctccacagaactagcatgcagggtcaaagcaaacagaacctcagatgccaaactaaagtcagaataacgttgtttccttgttagggttaggaaggctttggacatagagaatgttttgatgtgatcctattttagagaatacttctaatactcagaaaataattttatttctttgggaaagtatatagtgcatgtacatgagtgtgggggccagaagttgttgttagatgtcctcctgaatcatgctctgctttactttttgagacaagatctcacactggacgtggggctcattcgttgtattatacttacacctggtatttatttggctgttggctgttgtgaactcaggtccctttgctggtgcagcaagtgctttatccactgagtcctctctcccccatttgatgttaggtagtggctcgcgcatgtgtcctggagaggctgtgtgacatctgtgactccataatgctctttggcctgttgatagtagagtactagctatcatcttataataaaaacttccaaagtgtcttagttatggattcgttgctgtgaacagacactatggccacagcaactcttacaaagaaaaacatttcattgggggctggcttactgtttagaggttcagtccattatcatcatggcgggatgcacgacagcttgcaggcagacagcaggtgcaggtactggacgagctgagagttctacatcctgatccacagtcagcaggagactgctccactaggcatagagtataagacctcaaagcctgccctcacagtgacatgcttcttccagcaaggccacacctactttaataagaccacaactcttactagtgctactccctgtgggccaagtactcacacgcattctatttaagctaccataaaagatgtttaaacttgtactggtatgactgtcattggatacactctggatctgtcacacttatgttttctttgtttagagtggatggctcactggaatgctgtctttgacttggcctgggtccctggtgaacttaaacttgtgagtgacttccattttattatgtctgagtagctgctgataaagggtttctttcttaaattttactatattacttttggaaggttacagcagccggtgatcagacagccaaattttgggatgtaagagctggtgagctgatggggacatgcaaaggccaccagtgcagcctcaagtctgtagcctttcccaagtttcaaaaaggtaggttggtatttgtcattttccttaatggtggggagacacaaggacatttttgtttgtctttgctctctcaaagttgtcactttacctaactaggtggtagagattttatctgaaaatcttaatggagttagttggttggacccatttaaatctttttattattgtattttaatgtgtatgggtctttcacctgcatatatatgtctgcactgccaaggccaggagagggcactagatcctttgggactagaattaaggaggttgtgagccatggtgaggggtttgggaatccaaccagatcctgtgggaaatcagtaatcttaacctctgagccctctccagcccctgtgtctaatctttggttattatcgtcagcttttcctgggaaggtaataagacttaggacaattttactttttctatgaccaactttgcaggtgggtaagatagtactattgttagctgtaagatagttggtttattcttatctctgtctagtttcaatgggatgagacacaaactgattttttttttttattagtctctgtgcaatacttgggtattacccttaaactaattctctaacactagactggctgcttccccaaatacttgctatttgaatcttcctgggtatttctacttcagcagtgtagtgttgtagggaagcatttcactctcgcccatgctgctggtccatcatgactaatggagatctgttctctccatcttctcttgtgtgctctttctctctcctttctccttatccttcatggtccctacctgccacccccagcccagtaactcaaactccacgtctctttattctccccagtaattggctgtagccatctttattcaaccaataatattacattgtggagcaaggtttacatagcatcactaatattacattgtggagcaaggtttacatagcatcacttggtgtgtgtgaggtggtctcctagggcagagggaggactagatctttggagcaggtatttagcatttgaataaattatatatagcacccgactaaccccccccccccacacacacacacacacacacacaccccagttttttgagattttggagtcaggtctcaccgtaaggcagttgatttcagaatcagggagatccctctgtttcttcctccccgtgctgggattaaaggcatgtgccgcatcacttagcaaagcgccctgtttgtatttactcatacaaatgctctgggatactgaactaagctactgagtgggttagacttttggcaaagttaaattgtatttctgagacacgctctcagactaaccagaaacttgtgatcctcccacctcagcctcctttgttgggattacagacacatgccaccatctccaggtcataaagtttattctgttgtagttgctgttaagctggaattctgaaaagttaatatatgtcgtgagttttgattccacatcactgttcattaacaatgtattgtgtgaagttaagaatgtctgtgttctcatttgttgaactcttaagatttaaatttaagtttatgtaaaatgtatgggaataaattatgatcatgaaattttacctaatttaacagttttggaaaggggaaacaccatgtctgttaatgcctttgtctacgttttaaaactgtggataagtttatgccaatgtcgtgtaaaagaaaatgcactgggtcggatgtggagctctagtggcttttatcctggcttctagtgttacagttagctgagttggaaactgcctacaaggttcagcctgcccttagctatgcatacaatagcttagaaacaacttttattttagacttttaaaatgactttgcatttgttactttgattaggttagtgcccaacaccatttaagtcaggaaaataattatgagcataataatgaggttgggnnnnnnnnnnnnnnnnnnnnnnnnnnnnnnnnnnnnnnnnnnnnnnnnnnnnnnnnnnnnnnnnnnnnnnnnnnnnnnnnnnnnnnnnnnnnnnnnnnnnnnnnnnnnnnnnnnnnnnnnnnnnnnnnnnnnnnnnnnnnnnnnnnnnnnnnnnnnnnnnnnnnnnnnnnnnnnnnnnnnnnnnnnnnnnnnnnnnnnnnnnnnnnnnnnnnnnnnnnnnnnnnnnnnnnnnnnnnnnnnnnnnnnnnnnnnnnnnnnnnnnnnnnnnnnnnnnnnnnnnnnnnnnnnnnnnnnnnnnnnnnnnnnnnnnnngttgtgagccccatgtggttgctgggatttgaactctggacctttggaagagcagtcgggtgctcttacccactgagccacctcaccagcccctgtactcattttttaaaaaaacctggagactataaatgttagtgggggttttatgtggttttttttttttttttttttttttttagttttatgctaacatagtaaaaaagttgattggtccagtttattcaaccctatatgaacaagatactaatgatcctaattgaatagtagtgaatcctaattggatactagttggtgctagtgaaatttgcctccctgaatggctgtcctctaaagactggtaagttaggcactttggccagaatgaggaggaatagcattagattttctggtagataatttaaattaactgtgaatgtattttcttgtctcctaaaaacttaaatatatttgaacctttctaattcttcaccttgtttaaagccagtcagttcttcatcctaaactggtggttctcaacactagtgatctttggttatctgatggtttttttaacatgctaattcaatggtaatctctagtagttgagccaggttatctgtgcgcctgtctgtctgttttacttcatcaagggattccagtgtattgctacagttgaggaatgttttttaaatttaaacttaactttgagaatttcctaagtgaatattatattcatagtatttctacctctcccctccagctcatcgtgtgtaactccacattctcaaatatgtatgtatgtatgtgtcagacgtctgtaactgtggggatattgctgttcttttagctacttcctgcttgatcatgggcagaccttctgacaattttttttcctaatttttcattattaagcagaagtataataaagctcacacctgtttagagataaaaacctgaaagttaatttgaatttttggttggctgagggaaagtgggccacactagcaagtatatatgtacaaactgacaatatgaccagtccatggtattagaaagcttttattgtaggtatgagagagaaaatccaatggtatcgagaagaatagaactgagagaaaaagtagactaaacatggccagccagcagactggacccggccatgagcaaagcatgagggacaaagtgggaagggtttagacagagggaacatagctgaaaaagcaggattataaggacagtgagtaatgggggggggggggggcatgaactggggaagttttattagagtagtgatggtgagaagagctaggacttagaaaattgtaacaggtacttttgatgccaagggaacctgaaggacaaagtgtgctttggaatgctaataagcaccacagttagccttttgcctcatctgccttttggaatttgggaaaatagtttcctttggacctaccactatgtacaacctactgagtccatttaatgttgctttttttgtgcatgtatttaaggctgacccctggggattagaaatttattgggaggctggtccatagaggaaattgattttcctatagttcttcatctaagggtgaagctttatgaaattccctctacccatgctagcatgtcaactggtatagtcattgtgtaggttttgattaggcagccacactgttgagatctcagaggcacagtggccgtctagaagccaccatctcagagcaggtattctgcccttctggctctcggaatctttcacactctggctcctgcagtgttcactgggtcttgggtgtaggagttatgttatagatgtaccaactgagggtgggcatacgaccatgacttatttgaatcttgagcagtgtggctctctgtatgtaaacagtttccatctgctgccaaaagaagctgctttgatgaaggtagagccctacttttaccttgttggaggataagagggcaaactattcaaaacatattatataccataaaattttctgtttttaactgtgtatttaaacagtttttagtttactcagagttgtgtagtaattaatatgggagagcaatggatctatcagtcaatttgttaactccactatatcatccagagaggctgagtttgaagacataagtaaaggttctctctgtgtctagttcacctgctgcttgggcagctcttgttgtgatagagcccctctccacccctagtctctttcctgcttcctctatcttaaaaggaagctggcaggtttctctgttggcatttggttacctttgcctcgattgctccatctaatcacctgatttagttgttaactcctacaaaattaggtgtttttattcagtgtccacaaagctctcaagtagttgttttgggactttgttcaatttatagctattattatagttgaatcagtttgttaattgctcactcttccatatagggagcagaattcctttttaaatattttgtaaatgtgcctattttgcagtggccttgtgcatactaggcaaatgctgtaccactgaagctatatacctagcttccactgttacctaaaatataaacagtacaaataagtgggaattctgtgttctattcaatgctgctgcctctttcatacccagaggtagtactttgatctgctaagaaagaggacttttagacgttccttacctcaaaataggaagattagtgcctacctactagattggcaggcacattgaggtaatgtgtgagaaccgtgtagagcgtgagctatcttagacagtaagctctcctctgtgctaacagttgctacgctgtcgttttcttactatcatctctggtggcaaattcagtgcttttggagaatgtgttctctggggaaggggaatggaatgtgtctttgattcgtttccaacatcttgatggctcttcccacagctgtgttctctacaggggggagagacggcaacattatgatctgggacaccaggtgtaacaaaaaaggtaagctagttctgtcttaattttaataagtgcttaatgctcaaaataaaatgaaatgctagtgatttcatctgataccagcagggggcacttgtgttcccttcctgctcaagtctcaaggtaatgattattgcaaagctattaatagatgttcttagtttcacattgtctctgaattataattccgtctatctaaattattgatagaattaaaactactgatgtatagttcactgaataaaggtttggttgagatgtttttgtttgcttttaattttcctttttttatcctgacaagatggctcatcagataaaggtgctatccatcaaacctcaactacccaagttcagttcctacaagtaggagagaactccttaagttgtcctctgacctccactcccctcacacacacaaaaaaatgccttttaaaaaaaatcagattaaattgaatataagcttgtattgtacagggtggtattaaaggagatggtcgttggtgtgtttattattaatttatgtattgattttaaaatgttaaactatttttgtggagcagttttttgggtttttttgtttgtttggctggttggttttttgggttttttttttgtttgtttgtttgtttgtttttcgagacagggtttctctgtatagccctggctgtcctggaactcactttgtagaccaggctggtcttgaacccagaaatccacctgcctctgcctcccaagtgctgggattaaaggcatgcgccaccaccgcctggcagtggagcagttttaattttatatcagcattaaagtgcagagaatttcatatatactgaacacctacacagatgcagcctttgcagtcattcagttggtacatttttaagctgttaagcattggctcatacataattaattcataatttgtatcagggtttatttttcatgttacacatactatggatattgacaaatatatgacatgtatccgccattgtaatatatagagtactttcattgccctaaaatatgtctgctctggtgtttctacttcctcacgaagccttgctaccactataactgtccgtggttctccagattttcataaatggagtcatgtcgtatctttctctttgcacagaattactctttgggcaggaataccacattgtatccactcatccactgaagggtgccttgattgtttgtgttttagccattaagaataaaactataactatatctgtgtttttctttctttgtgtgattaaactcaccatgggctctttgggattttgtttttttgttttgttaaactttgtttgctttttcattgtgtgtatacacaaccacagcgcatgtggatctgttttcccttttgaacatgtgagcagggaatcaaattcaggtcatcaggcttggtgacaagtgtctttacctctactgagtctctttggggtttttcggttttgtttttatactagttagtcaaaaatcacaaaatttgaggttctatagaaatgattaaatattgctttcagcttgaaatcagaaaacattaaaatctttggaacctttcagatggattttatagacaagtgaatcaaatcagtggagctcacaatactgcagacaagcaaaccccttcaaagcccaagaagaaacaaaattcaaaaggacttgctcctgctgtggtaaggttttagagaagtgtatgtgtaaataggcagttgttactgtatttgcttgcttttgaggcaagatctctgtgtgtacttaggttggcctggaatacatgatctttctaccttagcctaccaagtgttaggactatagactgttcatgagccaccattcatgacatgagtggctcttaacagtagggagaatcaaatctctctttaaggaatttgttaggcaaaaagatggatgtaactcttaatttctttggtattaactgtttatagtttacttagccctactgcaatggttctcaaactctggtgagaatagagaacatggtaaagattcagctttctgagcatatatgcatttgttataaaaggtgaaagggtagtttgtgttatttttttaatgaaaataggtaatataaagatggatggagttttagttactttcttctagatgttttagacaccttaccgtaaacatggtgatgaaattcatacacctttagtattaaatttttgggggtgcttgctagatctggtacgttgctcttctgtatttatgacttgtaaatttttttagagaaacatcaaagcactctcagtcatcaaatgcttaagcaaagactgttatacggggactacactggctggcaggcctgctgctagtcctacatgctacagataagcaccaagatgtcagagtcatatggacttgggagaaaagaagcaagtcactttgagtgatagaaatatattcagaagattaagggcaccctggtgttttgggggtcagtaatttgatgtagaataaacacagatgcagcttttaaaccagtagttctcaacctgtgggtcccaactcccttgagggtcacatcagatagcctgtatatcagatatttacaattcataacagcaaaattacagttataaagtaacaatgaaaactttaaagggtaaaggtttccacgacgtgtgaagaactgtattaaagggttacaacattagcaaggttgagaaccactgctttaaaacaatagttaaaaaaaaaaaaactgagtcattactagctactttaaacaagcatcttaactgcaaaattttttcagtcttcaagaatgtgggttcacattcttaagcaaacgaaagtgaataaattcacacttgcaaaaagttttatctcaagagaagagaataactgttccctttgatcttgtagaaagatgggaaccttcagaaataaaaagtagactacttcctaagattgtttaagccacacacccccagaacccatcctcgggtatgcatgatgccttgttttagtctctcctggcttcttgctccctatagaatatcggtctgatctctttcccaaccttttgaggatggccagcagctctgggggtgttccttcctcctttcctggatatagcccagtgagtcactcggtagctggtggcgttggggtggggaattgctatgcttgtggaaagtgagtagatgcaacttacatcattgaaggcatcatcgggcatgtgggaagtcaagttcagcttataagacccccagcccatcagcagccctgcctttttgcaatatatggatcaagcatgccagcaaataagactatcttaggccctgaccctgctgcagtttaccacccatgtgtgtggttgtgctgctgtagtcgtatgtgtagtagacagaagctcgaaacatgaccatagtacatcctctttctagaaaagaaagtggccattaaactcattaatgcagttttcctatatgtgaggtctgaataaatatttaggggacagtgtaactgctaaactactgtgactgaacagtgcattcttcaatccatactctgtgtgtggggaccagatgacattaaagtgtcaaatttcattgaattccaagagaacttctgaaggagaagcatttaggagataaagttcttttctgcacgtgtaactgagcatacagcagcattttctggtgaatgagacacaggggaaatcgatttcctacgctgtagggagctctgagcagacttggacaagtcatccttcagtgaccggtttattcctgttatgtgtggtgtgctcgtgttggtgtgcatgtgtgaaaatcagaggacaacctttagaagtcatttttctccaccatggtctcttgtgaccagactcaggctgccaagcttgcacagcaagtgcatttttatcttcctgactatcttgctcactaagttcatgttaacatacatgatagtcatgtttaggctgtttccttagtaacatctagaattactgggaaaagattaagggaccagcaacatggctcagtgagtaaaggagctttttctatcattcctgatgccctgaagttgatccctggaacccacacaatggaaggaaagaatttactccggcaagttgtcctctgaccgccacatgtgtgcccatgttacacacatggcatgcatggagagatcaaaaacaatttatgggagcccagttctctcctaccatgtggattatgaatattgaattcaattcttcaggcttggcaacaggtgtcatactcactgaaacatcgtacccaactaagggaatttttaagtgtggttttgttggtttggtttggtttgagacaggatctctaagtagcctagttgacctggaacttattatgtaaaccaggctgggcttgaacttacgagagatttacctgcctctcctcccacctgctaagtctaaaggaatgcaccaccatgccctgcctttgttttaataaattaaaaaaatatataacatatattcttttcccctttccctttactcttgccttctacccctccctggtctcaaaatcatggcttctctgtctttgttattgttgcatacacacatatgcatgcatgctaaatataaatataacatgttgtgcttatttattatttagtatctatgacttcagggctgagcccatggtatggaataactggagaataactgtctcctgctgtcagcattccttcattgcttagagttgtttgtctgtatgtgggaccctgggaggttccctcttctacgttggcttgtctgtaagtgtactgcttcgggtcttgtctaggcagccatattgttaggatattagggaagcttcttgacacttttaggagacagtctcacagcagcttcagaaaggctagttttaagtaccttgtcaaataccctggtgaagctatgatgcccaaaacagaatttccttttttctttcttgtgctattaggattcccagcagagtgttactgtggtcctctttcaggatgagaatacattagtctcagcaggagccgtggatgggtaaaagactatttcttctgctttttaccccactgcctttgtgagctatggtagtacctaatcccattgaagaagttaagtatgtgccttattttagacacagtgggtgatggagctgggaagaagtttacaggtcacactggaacataaaaattgagataatacatgtgcacattgcctctggcacatagcagtatcgctgctgcagggtgggtagcttgcttgggatataaacagtaaagttaaggcctgcgtacttctatgtgcatgttatctacaattgatctaaatactgatggccaaatgagtctgcagtgcttgttcatttgtcctttacagaatgctgtaaaaatagattgtttgtatgcagggatcctttacatgtacatctttgcctatttccaattataaatacaattctgtattcaagtttttaattttaaaaatgtcttcctaaaggtacttattttatggtaaatgtgtagttctagaaaacccacaaagtaaagagcaagacaattatcccaacaggaaaaatgaaaatggttttcctctttcacaggaaaatgtgtttagttaaggagttatgtatagaaataaagcatggggtgtacaccctgtgttttgggggatatatgcggtcttacaggttaggcagggttttttctagaagaacaatggagcaatgactgtcgacatgtgacctccagcttccttttcccgctgccctgggatgagtgtcagtgactcatcactgggtcatgtcacatctgtttccctttgtacgagctataagcttgacactggaaacaatttcatatgaaatagttaaattgattggattccagtgagttgttctccgtgtacctggcagtgtgccggaggacatagattaaaagtcacttcatacgcgtgtaagtaacattgttaggataggtgtagactggagtcaaaccacccctttcccagggtcacaataagaccatctgtgtgttagatgtttacattatgatttgtaacagtagcaagattacagctgtgaagtagccatagaaataattctatggttgggggtcactacaacacgcggaattgtattaaagggccatagcattaagaaggttgagaaccactggtctagatggtttatgaagtatttgtcttgatttttagaataatcaaagtatgggatttgcgcaagaattacactgcttatcgacaagaacccatagcatccaagtctttcctgtacccaggtaccagcactcgaaagctaggtaagcctttgtagaatttgggatgtaatgaatttcccttagaaatcaaaaagacttaaagtgttaatataaggctaatttcagcaaaaacttgagaaagagttaaggacatggatgtcaagataaaaatcttaataaagttttcatttctttatatttttgaaacagaattatggcatgaactgcttttggccccacactttaacctcactgacagtctattattaacttctctcaggatactcgagtttggttttagactctactggctctactttatttgctaactgcacagatgacaacatctatatgttcaatatgactggcttaaagacttctccgggtaagttgttattcaaattctcttttgttaatgatatgactattcaaatctctcttcaaaagacaaaatcagctgggaaatctagctcttgtacttgtctggtgatctaggttcaatccccagtacaaccataaaaatgaaaggaaagaagaatactttatggcctgcaaagatggcttagttggtaaagtgcttgccacacagacatgaggacctgagtttaatttagatcactagcacccacgtgtaatctttgctggggaagtcctgggagactcctggggcttatggccagagctagccttgtagaattggcgagcttcaggttcagtgaaagagacttatctaaggttggcaatggaaaagacacctggtatctttgacctccggcctccacatggtgtatatacggctcacaggacacacatacacgatgtaaactaaccctggtgcgttattaagtgtgtactcttttatgtatactttcctatacacatggtgtatatacggctcacaggacacacatacacgatgtaaactaaccctggtgcattattaagtgtgcactcttttatgtatactttcctatacacatggtgtatatacggctcacaggacacacatacacgatgtaaactaaccctggtgcattgttaagtgtgtactcttttatgtatactttcctatacacatggtgtatatacggctcacaggacacacatacacgatgtaaactaaccctggtgcattgttaagtgtgcactcttttatgtatactttcctatacacatggtgtatatacggctcacaggacacacatacacgatgtaaactaaccctggtgcattgttaagtgtgcactcttttatgtatactttcctatacacatggtgtatatacggctcacaggacacacatacacgatgtaaactaaccctggtgcattgttaagtgtgcactcttttatgtatactttcctatacacatggtgtatatacggctcacaggacacacatacacgatgtaaactaaccctggtgcattgttaagtgtgcactcttttatgtatactttcctatacacatggtgtatatacggctcacaggacacacatacacgatgtaaactaaccctggtgcattattaagtgtgtactcttttatgtatactttcctatagtgtagtaccaaagagtcttgagttttcgttttgcctttctgcaattttaaannnnnnnnnnnnnnnnnnnntatgttcaatatgactggcttaaagacttctccgggtaagttgttattcaaattctcttttgttaatgatatgactattcaaatctctcttcaaaagacaaaatcagctgggaaatctagctcttgtacttgtctggtgatctaggttcaatccccagtacaaccataaaaatgaaaggaaagaagaatactttatggcctgcaaagatggcttagttggtaaagtgcttgccacacagacatgaggacctgagtttaatttagatcactagcacccacgtgtaatctttgctggggaagtcctgggagactcctggggcttgtggccagagctagccttgtagaattggcgagcttcaggttcagtgaaagagacttatctaaggttggcaatggaaaagacacctggtatctttgacctccggcctccacatggtgtatatacggctcacaggacacacatacacgatgtaaactaaccctggtgcgttattaagtgtgtactcttttatgtatactctcctatacacatggtgtatatacggctcacaggacacacatacacgatgtaaactaaccctggtgcattattaagtgtgcactcttttatgtatactttcctatacacatggtgtatatacggctcacaggacacacatacacgatgtaaactaaccctggtgcattattaagtgtgcactcttttatgtatactttcctatacacatggtgtatatacggctcacaggacacagatacacgatgtaaactaaccctggtgcattattaagtgtgtactcttttatgtatactttcctatacacatggtgtatatacggctcacaggacacacatacacgatgtaaactaaccctggtgcattgttaagtgtgcactcttttatgtatactttcctatacacatggtgtatatacggctcacaggacacacatacacgatgtaaactaaccctggtgcattgttaagtgtgcactcttttatgtatactttcctatacacatggtgtatatacggctcacaggacacacatacacgatgtaaactaaccctggtgcattattaagtgtgtactcttttatgtatactttcctatagtgtagtaccaaagagtcttgagtttcgtttgcctttctgcaattttaaaatagttcttgtggataggtttgctttttagaatgctagctaggtgtgttgacacatgcttaatcctagcactcaggtaacagagataggtggatctctgagtttaaggacaaccaggactacatgataaagagaccttgtgtcatgtcaaaacaaatgagagagttaaatgtacgggtaaacgttgcctggtgatgacttgcctttccactttgactttggaaaggacaaggacttcatgcttgtgatttttgttttcaattcacagtattgtaatgtactaataattacatcccatgctcagtttagcatagaaaaattaagttgaagccacgcataataccacatgcttaaaatctcagtgtttgggagactgaggcaggagggtcaggagttcaaggccatcttaagcttcctcagaacaacagcaagtcaaagtgagttaattataatgaaagccgccattgggttttagactttttgccatatctgaaacatttgcaatgtgctttataccaccttttcctagaccagcagagagcaataaaaacagggttagtcacaggtgatggttgcccacacctttaatcccagcccttgataagcagaggcaggcaaatctgagagttcaaggccagtctggtctacagagtgcaggacagccaagactacacagagaaactctgtcttgaaaaacaaaacaaatatgattagtaggaaattcaatttatatttttctgttcagggctggtgagatggctcagtgggtaagagtacccgactgctcttccaaaggtccagtgttcaagtcccagcaaccacatggtggctcacaaccatccgtaacaagatctgacgccctctcctggagtgtctgaagacagctacagtgtacttacatataataaataaataaatctttaaaaaaataataataataataattttctgttcatagttcagtgcaaaagataaataacttcagctttgaagcagtgatcagaatgaaggaacttctattttgcaggtctttatcatagtgaggggttttgttgttgttgaatgttatatctgtgtgtacagttaaaggctattattgagccattgtgtaggtgctgggaattgaaccccgggcctctagaaaaactcagtgctcttaactctgagaaccaatttttggtcttgtttttatttaaaaggtataaatacaaagtatttttttctcccagtgtgtttttttaaatggtatggattatctagtaagaaacctaaccctgatgaagcagtttacagatgagcatatattatgcccctctgggtctgtctatcactcagcctgttaaagagttagatttaaaaaaaaaaaaaaacaaaacaggtgtatctctgagttccaggacatccagggctacacagagaaaaaaaaaatgccaataataataatagacaacttcggcatgtcagccaaaattcaaatgattcttttcacttatttttacctttttcatgcaacaaatatttgaggctttattctgtttaaattactacagtctagaaaaagtgagacgtaccctcaaagctcacagtggtaagatcagtggagaaagtcctataggataagataggattaggcatcctgcattctttttcatgaaattgtcatatgacatttggtcaattccatagcaagtttatgttatgttgagttacgtagattgggtctaatacaaaccttatttttttttttttaatatttatttatttaatgtaagtacactgtagctgtcttcagatactccagaagagggcatcagatttcattacggatggttgtgagccaccatgtggttgctgggatttgaactcgggacctttggaagagcagtcggcgctcttaaccactgagccatctcaccagcccacaaaccttatttttaatctatgttttattttgttctgtcttatttttaatctatgttttattttgttctgtcttggcacttggtaacataagttgagacagtaataacacttgtatgttttgtgtgtgcatttattggaatactggaaatgatagtagccaagtaatttggtttttctccctggcagtggctgtcttcaatggacaccagaactctaccttttatgtaaaatcaagtcttagtccagatgaccagtttttaatcagtggttcaagtgatgaagctgcctacatttggaaggtgagttgttatatccctacacaaatagaaagctgtggtctagtgtgaggttcatatagcacaagcacacactactgaccttttacatcaaatgtttacaaggtcacttgctgtgcacttccttttataaataatgaatgccatggaccaaaaagaaaagttgccaggggtggggcattctgtaggagttctgctagacaagttgtcaggagatggagaaactgaaaagtggtcagaacctccgatgctgttgcttcttagaaattacgtgcactgccccttctgttccatattgtcagactcttccttaggtatctgtcagtttcatgtaaacagttgctcacaactgttggtataactcttccttatttttttcttacagcaatatctagccttcaggctattaacaggtattttaatacaattaatagtattgcttaatatttccttattttatagattctccattactgtttagtaagtgaacatatgcttcttaaaatccatattttttacatacccatattctaaagcaactgccatagccaagaaacttaaatgatgttagtggaaagatattaaaaaagtaccatctcatggttctctgtcccgaaatcgctccacccagctcgccaaattcccacagccttttgaggtgtgcttcttgcaagcccacactttgccactgtacctttctctctggaacccagttgagttgccacatgaaggaaaacaccacacaaacttagttcagaatcaacaggtaactcagtctctgggtgcagcatctagactcctaatttgtgagccattctaagttaagtcctcaagtaggagatcccatcggataaacaggggcggcaaccccacctcccagcccagctacagtttggcctcatcatctccagcctacaggccaactttcctctcctgcttcccctcttccactctagaagtcccgcctactcctcacccagtgattggtcccctgaaatctttattcattaggggaaggttctgctacagaataaagtcctgggggaagtgcagaaggagttgcaagaatgacattgtccccacggacatcttctagtgacagtctcccagtagtcacaagatagagatgccaatctgcccaaagcagttgtgttagttgtgttccttaacgtgaatctttgctattggagttgtaatgaattttttcttatgagtgtatatctgagactcccatcttacagaaggccttttacctgctttctttactcttcctgaagttctatactgtctacttatttgctaatacaaatgcttctcttacatttaaatttttgagtttcaaagttttgctctttgtattttgtttcttccctcactgtcttactgcatttatttttctaaactcccaacttagttacagaatttcattcattctacacatctgtcatttgaggtttctttcttgaaagaaaaccacaaactgaaaatttagatgtatcatataacataataaaatggccaattccatacataaacactagattaaaatattcaagcaaaaatacgtatatgccaaccattgttttaagccatttaggtgagttatttaattataattatatatgtaaacatatacataaacattttcttgctgattctttaaatttctctagcataggatccttttttaaatggatttggttggtgagaattgaggtggtgcacactaagtatttgttggggttcccagcccatctatgctaaagcccttgcataatgaaagaacaaaagaaaagagtttatatcttcaggcaaaagagaatggcctaaatggaaatggactaaatctgtggactctgacactaaggcccaacattctagtaagacaaacattgaacactccactttttaatttcctactccttgttccactctcttccccccacctgtttctgatacagccactgaatagtattgaagtggctataaataaatgcatttggcatggctggtctcccgctgactggcgggacactgagctgacactttaggacgtgtcaatgatctcatggcaaaataaagatcagacttgctttccaattggccgtagtaaggagatttttttttgaggaaaagtgctgatggatttttttccctgtatgcttaagttctcaaagtactgtctgaggtctaaaggtgagagtcattttctttaagaggtccctcagaattttagctctgtgatttcttgtgtctttaacattctataggaaatagagtgtgtataagaggaccgtttctgtgttgaccaccccatggtatttagatggttttctgttttgttttgctttgttttgttctaactttaaattagtttccttcctactcaaaagggaagacatgaaatcaaataattatagtagtggtttttataataaatttatgttaaacttaattggaaaaatcaattcaaagccatttgagattcatgagaaaaattaatcctgtttaaagtactcttaagaaagatagacctgagctgtcaaagcccttgtcaccaaagttcacaaaaaccttatcagcatttggcttctgtttctttccctttttactaaaacggaatttaggagtttggtaaaaatctacttacagttcagagtatagtaagatgtaagagtacttgcctagcatatgcaaagccttgtatttgattccccagcatcaccaaataattcttttgtattattgtatataattcagtttggtcactatattttttctttccatggatgtttgcctatttgaaatattttatataaataatatcacctaaaatatggcgttttgtgtctgactttcatttactatgttctccgggtttgggcaagtttcacattacttcagtacttctaaggtaaagaatgttctattttatagtctaaacatattttttatctgcttaccacttgttttactctattattaaaattctgctgtcaccatttgtatgtttttgctggagtgtatttttgttgctcccagtacatttaagaataggtcatgtgaggccaggcagtggtggtgcatgcctgtaatcccagcacttgggaggcagaggcaggtggatttctgagttcaaggccaggactgcacagagaaaccaaaaaaaaaaaaaaaaaaggataggtcatgtgatacttaattacacatttttttttaaagtgccttctgcctatttcttgatcctatataaagtacctggtttatgaattcagtgaataaatgctaactttactgctattaatgctggttctttgctctatgagtttttataggggtctttttttccttaagcctgggtactttctgttggcaggcacttggtttttcttaaacgtttactattttgtgtctacagttaggttctcctaggtaaaccctaacttagacactaaggactgagcagggtcctagaatgatatgaagaagtgttttaccagagatgcttgcacaggtgtgaagatttcccctgcttttctttgagtcttgggtaaagagaaacctaatggactagaatcatcacaaatagagaggagaattcctggctgaaaccatcctttaatgtcctttataaggagtatttttttctgtgaaagaatgacttatagtctatagcattgtaggaatgatctatgtatctgttaatacatttaacttttaatttaacaaggcaaattagagtatattctttgtgtggttttaatcattgtgcatttgcctcatagcagagacaagagtggtaatgattgcgttggataaccttatagaccagtatctgttatcttagctgtaatctgaagactctgttaagctgacttagtcattgtcacaagtattctttccaaagttgcctccttcatgcaaatgacccatgattcagagcctcaggaaaatagagaatgtgttcaccgtgcaccttgcttttcaaatacatctactaataacagagtaagcttgtactctattatgctggggttcctgtgtgctttaaaatatattgataactttggaaagaattgactgtacaatgctatcaagtacctatcactgaaagtatccaataataagaaaaagtttgaatgaaaaaatataaattgtagctcatgtcccttccttcagattggacgttcatccaaatgaaaggatgatgcttggggttttggtcatagtcgttgtgtcttgctttaagcagaaaaattaaacctttcttcttatcctaaaagggctagttgcccattacaggttccttcaggattcagctgattcccatagtcctggaggtggctgactatagaaggtctggatgtggctactgtgtaaaagcaggactgggttgaagagcagtacctggaactgaacttcagtgctcagtggctgagggacagtgccaaaactgcattttaatttaaataagagccagctgctgtttgaacctctgactgttgagctttactaacaactctaaagcctaagatggagtcagggaggctctggcctctatgcaggagcaagcaccattctgactgctctctttggtttgcctaggtttccatgccatggcatcctcctactgtgctcctgggtcattctcaagaggtcacgtctgtgtgctggtgtccatcagacttcaccaaggtttgtggatgagtcttcataactgattttaaaaagtggatcccagatttgcatgttttcccacagtttattccaaatgatacagactctgatgtttagacatgtttagacacggtttctcctggcctttcttaccaataggaaaatcactatgtgctgggtttctaatccactgagctcttcttttcttaaataggagttgaaattttgaactgaagataaatcttaaaatctgaagtgaaggtctagagaggtggctcggtggttaagagcaaacactgttctttaagaggtcaacctgagtttggttcttagcatcgacatcaacatcaggagcctcatggccagctgcccataactccagctccagggggatccagcacatctggcctccatgttgtgtacctgctatcaaaagctttgagacacatgcaattaaaaatatatagattttttaaaatatttaaaccaaatctaagatgaaaaagtagtaagtggctggaagatggctccatgggtaaaaacacttgctatgtaatcataatgacctgagttcaaatctccatcaattttaaaagctgggtagttgctttaaaggatttttaaataagataaaagaatgtaaagaagcagacgtgtagtaggtgtccgtaaatataattattgtcactatagagcaattgtggagttccaaacatttttttggcctcccagtaagggaaggaaaatgttgccagtctcttgggggccacaagttaaaagaacgtgtgttctttttttcctttctgtttagtgactgaaatagagaaattgtataaacaaatgccggggaacagctctggcattagtggccatttgcctctagctcttcaagctgggctttctctgccataaaaggcttgggaccaagatcaggaatggtcggatatttttaaaggggcaaaggttatttttaacttctttgagactagtgaacttttgtttttccagattgctcctttacctatctgaaagagcatctctgagtcttcgaagagcagctcttttgcacttgttgtggactgctggaggcacagactatgtctcatctgagaaatgttctcgttgctttagccataagattaagcatgcagaatttagaagaaacttatagaattgatatgtgttgattgatcatttcataaaaggaaaccatagttacataacattaaataaaaagttagagatgtgagttgcccatcttctttggagaccaaaaagaaatgagcctgtaagtgtaaatggctgaggagagaatggtatgctggagagagcgtcctctgctgttgttgcagaggacccagacttagttcccagcacccacatgacgactctaacttcatttccattgagtctgatgcacttttctgttctccgttgctatacgtgtccatgcaagaaaccaacgtttgtatcattggaaatctaggatgattctgaagcacgagggatagagaagtagatgatatttagatgtcatctgttttatgttacagcagagaaaatcagtcgctactcatgagccctcatctaccatctttttttgtttgttatgaaactttatttgaaacttcattcacattctcctcctggttcttagattgcaacctgctctgatgataatacactgaaaatctggcgcttgaatagaggcctagaggagaaaccaggtgataaacattccatagtgggttggacctctcagaagaaaaaagaagtgaaagcctgcccaggtaaggatagcatgcattctccaaggttttttggtggtggtggtggtggtggtggtggtggtggtggtggtggtttctttcttttgttagttgagtcctactgtgtactatgggagcctaggtttgttcttgttttgtaatatttttaaagaaaagcatcattttggctttttttttcccttcaagatttatttattttatgtatgtgagaacactgttgctgtcttcagatacaccagatcccattacacatggttttgagtcaacatgtggttactgggaattgaactcaggacctctgagaaagcagtcagtgtttttagccgctgagccatctctctagcccttggcatttcttagaagagaattatccagatcacaactctgtttatctatgaaaaaaagcacagtaatggatttagccaacaaatatttatggactgtcatgtactaggtactcttagttttgattggcaatgaccagaagactcaagactcagatataaacacatgaaataacaggagctgcttagtagcataagtgagagaaaagaatggaaattgctgtcaaatgtttctatgatagaggggcctcattgacttaagtaagtgaagtacttggtgagccgtgtggctatttggaagactattccagatacagcatggcaagggtaaggtgctgcagcaggggagcactggcatgtctcctctgcctcagtgtccttagcactaaagcagtgagggacagcaggaaagcagtagtagcagaaaacggagtttgtgtataacggaaaccttcaaagcctgtgtggtagcacatcccttttaatcccagtactcaggaagagtgagtttgaggctagcctaacctctctagcacatcagccattgcacactataagccaacttctataacagattgtctgctattaactacactgccccccttttttttttttggtgttttcaagacagggtttctctgtgtatccctggctgtcctagaactcactctgtagaccaggctgccctcgaactcagagatctgcctgcctctgcctcccaagtgctgggattaaaggcgtgcgccaccactacctggctgttttctggctttcttaacactaactgcaaggtataacccttttaattttaccaaagttttgctaacctttagtgttcacaaactcttctctttgacaccccatatcataacatcgtaaagaagaaattacctaatttcttaaccatctttcagtccctcctctgctctccagtatcatgtttctgttaacctttagtagacacttgcagcatgtggcttttgagtatcaaaaacttgatagctattctttatcccatttattctttacccaaaagccttattggaacttggtatgttgctagacatgtagtatttcaggacttctgtgcaaatacacatatgggttgtttaaatggaggacgtgattatcgacctgaactgagcagtacatccaatgaccccttcttgattcctgccatagttactgtaatcaaagccagagcagatgtgtgatgcccgtggctaacgtccttttcatagcagcttaggacagtgacgctgccagctgtgactttactggaagaacaaactcactttagacaagtctaagcacttgcttaaggataaaaattgaaagaaaagtatttatcaaactattgtcttgagctgtcaagatgccttagtggcaccaatcaagcccaacaagctgaatttatgcacacagtaaagaggccagttcccacaaaatactctggcgtgtcgaagaactgtgattcaagacaagactgataaaatagtgaggacagaataatacactaagattggctctgtaaaacttaatttttgctgagagagatctattacatgtctttttttaaaatagggttttttgggggggttgttttttgttttggggggggggttaatgagtattttgcctgcgtgtatatatgaagaggccagaagaggggagttggagcctctgggactgaagttaacagatgtggatacttgaagctgaatctaggtaccctagaaaaacagccagtactcctaactccctaccccagccatcttttctgctcagattacattttctatcagtccattaaatttactttttatgtaaatgaaatttaataattatcaaaaagactgagaatgaatcagtaatttttttttcttgttatttaatttggaaagctcaaaaaatagtgaaaaattcagtattggctgttaagaatttatgagggtagaagcataagctttgtaagaattcccaggaaatatttgtcgtgtgtggggtaaggacacagacttgtccacaagcttgatttgctttccaaagagcaggcacttaattctgaatgttctttggcattcttcgacgccatttgtaaactaagcaggaaggctgataaacctcagggggatcacttctgtaaggataagatgtttcacttcacaggtgtgacaagataagctgtgtgaatggttgagcccaagtcaagtactgagtgactgtgccaagatttggctctgtgcatttgtgttggggagcctgaggccttcaaaggtttacaagaacagcagtgtcacttcatttaggactaagctaccactaataacctgcattcctgttaaagtgcgctatgatgcatgttaaaggttatagtgcatctgttccttagtgtactcccagaattgtcagtggaaccagcattcccgtgagacgtgttggtgataaagtaaaagatagaatcacatgttaaaaatgttgtaggctagaaaatcttaaatgagcaaaatgatattagtaaacatttgtcagaaggcataaattcaaaccacaatgacacaagtcacctcagctgtcacaaggcttggtgttgaactccctgtggtcccagaaggttaaggaaatatgtaatttaaggtcagtctgggaacatggtaaaaccctgtcccaaaacaaattaacaaaaaggataataggtgtgggtgaggatgtatacgatcagtgctcctataaattatttctactgtttgggaaaatgggacagcaatttcttttttttaaaaattaaaaatagagctcccatatgatccagcaatcccacttttgggtacatatccagaggaatcctcagtgtgtggaagagacccctgcactcacgtagtcactgcaggttatacataccatccacggagcagaatcagcataactgtgatcacaagagaataaagacagttgtgtataagtggtagtgaggaagtttagattggagggagggatccgattttctttgaaacaggattttactgtgtagccctaactggcctttaactcatgacccttctgcctcagcctgtaagttctgagagtctaggtatattccatcatgcctggattgctcggctactaagagagccaggcacagaaaggaaataatactgcatatttcttctgtgtagaacccaagcactaaatttaaagactggagttaggaagaagccattgttgtcatctattcctcctcttcctcctccataaagatatgagaaacttgtcttgttttttttgttttgttttgttttgaagcagggtttctctgtgtggccctggctgtcctagaactcagaaatccatctgtctctgcctcccaagtgctgggattaaaggcgtgcgccaccattgcccggcaaaagttttttacttattaattatatgttgctgtcttcagacaccccagaagagagactcagatctcattacagatggttgtgagccaccatgtggttgctgggatttgaactcaggacctttggaagagcagtctgtgctcttacccgctgagccatctcaccagcccccttgttttgtttttaagaattattttattgtatgtatgtgagtatgtcccctgagtgaagttgcctgtgcagacaagaagtatcagattccctagtgtaggagttacaatctgtagtaagctgcaagatatgggtcctttttttttttttttttttttttttcttttttaaagaactgattgtgtggtggtgcacaccttttaattccagcacttgggaggcagagggaagtgggcatcttgactttgaacaagatagccagaaccacatctaaaatcctgtccttaaattaaaaaatccagaatagaatggtgattaccaggtgcttataagatcaaagatcaagctgggcagtggtggcgcatgcctttaatcccagcacttgggaggcagaggcaggaggatttctgagttcaaggccagcctggtctacaaagtgagttccaggacagccagggctacacagagaaaccctgtctcaaaaaaaggagggcagatcaacaagtaggagatattatttgaaggttataaagttttgtgtgcatacaagcaagaacatggaaaatttttaaatattaatcatattatgaggtgatagattatatcatagatctatttaatcattttacaatatgtgcatatgttacaataacacgtttatccccaaattcataggataaaaagtagaactgttatggtgaaacaccatgtgccttttgatctcgttttttgtagcaagtttgtggtgtgcgttgtgtcatctgcacgtggagactgttgggggtggtgcttgtgctttagaagttttatctctcctaggctttgccaagtatatgttttacatcaggggcttaggaaactggcagttagacacaggagaggaaaattgctaggggggtatggtagaaatggaatgattttagctatttactgacaaaccaacccttagatgatgatgttagatatgccccttgatgaaaaaaatcaaggactttattacatcattttctttctgattttcatgctcttcttcattttcagtaacggtaccaagtagccagagtactcctgccaaagctcccagagccaagagcagtccatccatctcctctccttcgtcagcagcttgtactccgagctgtgcaggagacctccctcttccttcaagtacccccacattctcagtcaaaaccactcctgccacgacccgttcttcagtcagcagaagaggctccatctcttctgtgtctcccaagccactctcatctttcaagatgtcgcttagaaactgggtgacccgaacaccttcctcatcaccacctgtcactccacctgcttctgagacaaagatctcatctccaagaaaagctcttattcctgtgagccagaagtcatcacaggcagatgcttgctctgaatctagaaatagagtgaagaggcgtcttgactcaagctgtctggagagtgtgaaacaaaagtgtgtgaagagttgcaactgtgtcactgagcttgacggccaagcggagagtcttcgtttggatctgtgctgcctttccggcacccaggaagtccttagccaagactccgagggtcctaccaaatcaagcaagactgaaggtgctggcacaagcatctcagaacctccttctcctgtcagtccttatgcttctgaaggctgtggaccactgcctcttcctttgagaccttgtggagaaggatctgagatggtgggcaaagagaatagctctccagagaataagaactggttgttggccatagcagccaaacgcaaggcagaaaattcatccccaagaagtccatcatctcagacacccagttccaggagacaaagtgggaagacgtcaccaggcccggtaagcttaaatgtgggaggacacatgtcctatttgaaggggactaggtgcagttctcaagattgtctgggaatcaggttaataacttcgccctgttactccattaatccttttgtctgctcacattcttcagtcttactgcttgactcactaaagccttcctctcaccatccagagtgtcgattcaaaaatatctctcctggtagacagtatgggtttttttttttttttttttttttaggtaaactttattcttgggaaacttgccaacatccttaagtagacttttttagcttgtaattgcattttatgatcaaaatgaaacttagatatttcaaagcaattaaattacagaatccttgattttttttttaatttatttttatttgttggcttttcctcaagtttctgattgtcttgcatatagcaatattctgaacacttatttctaaggttcacttttcagtgactgacaggacatttaattatggtaagagaaataagtgagctttgtaaagcctaagagtggtaaagatagaagtagctgagcattaggtaagccatgcacaccagcagagcaatgcagagctgctgttactcggtgtgaagttatggggaggggcattcagttcctggggctcgcaaggttcttgttctaagtttaaaagggagatggaaaggactccaatccaattaggggcagaagctatctttagactagtactaatgtggtgagtatcctgcctcacttaacatccttaacctagcctgtgcttcagggaaaggaaacaaaagatagatatataaaggctatttactctgcaagccaaaccaaaattttggtacagaaaatgacaaagtttctttttctcaatagtaggaatgttctgtgttcctagccaaaaatttgtcatcagtgtccctgtggctcccatctgtctttcctgacccccatgattacttttcactgacaatataaatcttaaaaagctttgagaccagtgtgctgatctagttttttaagttttgggttttgttgttgtgttttggttttggtgtttttacgttttattgacttacaagctttcactatgtatcccagactggctttgaactcaggaccttcctgccttagtctcccaggtgctgagattgtggggctgtgtcactatattacaactaatatttatcagaaaaatgttccttttttggaagaaaatgaagaaagtgctgtttttgcacttatcaattgaggggctgattttgattcgctcaagaaaatagcagttttaacctagacatttgctgtggggacttggaactttaacttggggtgtcgctaactctacgctttcttctaggtcaccattactcccagctccatgaggaagatatgtacatactttcgtagaaagactcaagatgacttctgcagtcctgaacactcaactgaattatagatgctaatctgaagttcattgaacttgggtctacaaagattttttaaaaaggctttaaaattctggtctttaagaaaatggtcatcttttcattttggaaaaagtccttctactctttagcagacctagtcaggccccactgtgtataggcacagctgcctaggtgagtgctgtctccagttcccggggcggcttgtcctctgtagtctactctagcagtctgtggtaatcacgtccagctcgtggatgcaggaatcaaggagtgcttttgtggacagtggagagtgctagtccagcacagggcccatccgtgaaggccagtctgaagacatcctctgcagaagatgccttaagcaagcgtgagcttatttgaaatatatcatttgttcactatatttgtgtgtgtgtgtgtgtgtgtgtgtgtgtgtgtgtgtgtgtgtgtgtttctcaaactggataaaaatgtgatattcacttcgtacattcatattgtcttcatgtacggtatcaatgtcaactctttggagaatgtaggagaaaacatcagaaagctgagtttttgaaagctgtggaggtcttttctttttttttaaaccagatttctattacaaaccagcatcactcatgagggagcaaggcactttcttgagagagatgttttataaaatcagtatacagtgagaccagggcagttctctagggtctgtgactttttttaaaatgtcattagatttttaagataaagtaatttcttacttataaaagttgatattgctttaaaaagaaatctagaacctggaaaataagctttttttttttttaaacaaaaggcaccagctgtctagtatattggtaagcaaaacataaagagcactttatctcgacagttagtgcagaggttgtgtctgttgactctaaattgtatttgaaatgctgtaacttttctttcccttaaatgctacatgttggtcctcatgaaatgagcatcatatctccctttgcagactcttagaaagaaactttatgttggagaaaggcgttcccttatagttagaaaagagtttgtctcattcaaatctctgggggctagctaaactttatttcaattctcgtgatttttaaatattttattaaaaacgtttaagtcctttgagattgtaagttaagcttataaaacaaaccaaactgagaaagttaaataagtgttgggtttctgtagtcattacagtcaaaccacacacacatgcagcagctttcgctgagcgctggggagtcttcagtgatgttagctttttgagtagtgggcagtaggaaggaatttttaatgatgtagaactgccaataatgttaaatatctgctgctttgaaagccagtggtggtggtcagtaaagcagatgatttgtgtctctgtgtctggccacactgccaagtgaagctggggtaagtggctgtcagaaacttcaggctctgcttggaaaacttggtaccacaaatgggtgtcaaaggtcatgtgtaacaaagtagtaattatccctgccgtgtgaccttgagctgaccctgaataatcagccttttaccttgtctgatattgtcctttcctatgatttttttttacagtgacctgaaagcaatctacataaaaggaagtaatcttagagtcccttttgcttgcttgtagagtaaaatgtgttatttccaaaggtataatctagttcaaactgaaagaggttctaataaacgtcttacttcatcaaacctcaaatgtttaagatggcttgggttacttgctgtgctgctttaaataagaatgacccgtagtctcatatttgaatgattgaccactaggaagtggaaatgtttgaaaggataataaaaaaataagtgtggcctttgtggaagagtgtgttactgggggtgagctttcaggattcaaaagcccatgccaggcccagtctccctttctaccccccagccccctaccccttggcctgtggatgtagctctcagctactgttccagctccaggtattgtcaaagcctagctttgacatccaggtaaactgaggtggaacaagaaaatggatggaccaaaagctgttagctcctggtaattcgggccctgttactcttttttggaggcagagctggtggcttctggcaattcctgctgatagcatcaggggattagaagaaaaaaaaaacttaagctcttaattaactcttaggaagccagcaaaaaacaaaagaaaagaggggaaatcctgaatacacacactaagcgggtctgaccaccagttcagtttcacaagtgtgtacactctctctctctctctctctctctgtgtatatacacacacacacacacacattcatttggtaaatggagcacggccacagcagtcacttttatttttttcttggcctttacgttacttctcagacaaaagttatctatgtaaaaaaaaaaaaatacctcatagacaaaatgttatacaagggagttacagcaggatattgttcaaagcagtgtttcattctataagttcaaagcagtagtttacatggctttgctttatcatagtgtgcacccatggcctcatccttggacctgacctagaataaatgaatatttttccttggtcattaatttgttccaagacttttttttttttttggtattgcagtggatgtgcttttagtgtatgagagctcattgtactgtatatctttctggcaaaccaactaaaaccatctcctaagactgtcaattacttgaaccaaatcaagaattctataaaatcattaactcatctaaacaaacaattcaagaaagtatatcttcatattgattctgcacagaatctcctctgtagtgtgggctagtgcccaggaatcaaccaaaacagactatacgtggaaagggtcgttgacagtcacaacctgtcggaaaagtgaggaatacagtgatgacaaacacaagaaggcacggcagcagcaagtagcactttagaatggaacatgtggggctgtacctgtccaggaatcacccatcaaagccatgcaaaactgcaggccctctccaggaaagttgcttgccttcccagcatggcatctgccagtgtatgttgcagtgtttccttccatgatagttgactaaacctctgaaacgaagcaagcctcccacctcccagtaaaatgctttcttttattaaaaaaaaaaaaaaaagacttgatcattgtttctcttcatggcaatagaacagtgtctataactcttggtaaaaagtgccagtactttgatcccaaacttctttttggatacatttcaagcagtgtggctatgcaaatataagtttcttttggttatttcaaagcctttgttgagttgaataattctcttaaaatgtctttcaatgttggctgcacataaaactttgtagctgcctttgtgttaaggggtcagccaacaacctcttccctttgccttattaaaactgcactaaagtgggcggtggtggcacacatctttaatcccagcattcaggaggcaggggtcgtcagaactttgagttggaggctggtctgatctacaaagtaagttctaggacagccaggctgcacagagaaatcctaccttaaaaacaaaacaacaagccaggcgtggtggcgcatgcctttaatcccagcactcgggaggcagaggcaggtggatttctgagttggagaccagcctggtctacaaagtgagttccagtacagccagggctacacagagaaaccctgtctcgaaaaacaaaaaaaaaaaaaaacaacaacaaaacctgcactaatactatggattcgaagtactttgtgtgtgtgtgtgagagagagagagatggaacctatgagagggtcccacaaactgtcctcccaccatcatatgctctcctttgataagcatattcctttcccacgcaatttttttttaacaaaaatttcagcctatggccatgttcttttagagatcacatgtctagtcaatgtgcctgttgaaagcctatcataacacactgatgctcttagggctgtttttgtgcttttcctagtcccaagagagacttcctttaatactgctttcaaaggaaaagccagtagtctcacagatgcactcacaaccaagcaatgagaacaatatctcacagcggatgtggggagggagcctgggatagtgtcctaggacgctagagttaaactcctggcaggcctcagaagagctcagtgcagccctctcacttgaggctcacagggctccatgggaacccatgccacatttcagactaaccagttagcttgttaagtcttgaaataatggaaaattcttcatttgctggccctctagatattagtttaaagttacaagcaagctgaacacattttgttaaacttgaagtaaattgaatgctttattaggactttagaatagccattttgttgtctaaaaattgtttttatgtgggcctatatttgaacacaaactagagtggaatgttatggataaattctgccttaaaaaaaaaaaattagccgggtgtggtggcgcacgcctttaatcccagcatttgggagacagaggcaggtgaatttctgagttcgaggccagcctggtctacagagtgagttccaggacagccagggctacccagagaaaccctgtctcaaaaaaaaaaaaaaaaaaaaaacaacaacaacaacaaaaattacctggctgggcatggtggtgcacgcctttaatcccagcacttgggaggcagagccagacgggtttctgagtttgaggccagcctggactgcaaagtgagttccaggacagccaagtctacacagagaaactgtctcgaaaaaccataaaataaagaaaaattttttttaaattacctggctgtgaagaggtctctgttaagtggattaagtgcttcaagcatgaggaccagagttcagaacccacaaaattgctggaggtagcagccctattatattccaggtctcggaagaggaagtgctaggttcaaaggagagaccctgtctcagagtatggtagagaatgatggaggaagagtcctgatctcagcgtgcttctatacacacatgtgcatactcacatgaaaaaaatgtatacgtgtatggagtgtacttacagcaagcatcgacacagccgaggagtgctgtattcctgaggaggtttgtacggtttcaaggctcattgcccttctccactgtgccaggaaaggagttccagggtgcagggctgttcctcttgagctccatttctctctgctttcttccatttgacacacgtccttttctgtcctgacactctaaatttgtatttaagccattctgtagactcaggaatagcagtggcatactgcaaactgcccttgattggcagacattccaatttcacctgcccctagtagtcactacctgggtgcaagtcctgtgtgaggcactgggttgtcagttactaccaaagttacattattggtgatgctccatgacccgaaggcagcacttgagagaaagatcagattgccaagccctttgagtgaacctgtttgtgtcgaggaccagtcgcttccctataaaagtttagaattcagttcccctcctgtttacaatgcctgtagttcttggatcagaaatctcccctggtagaccttgatggtcaaggctaagatgctagcctgtggtactattgaggtgatggaaccgttagagggcaagcctggtgggaagaagttaggtggacagggaacacggccttgaaggggacattccgaccccaggtctttcctgtcttctgtttcctggctaccactggcccaaaagtgggccaggtgaccatgactgaaacctgaaactgagtcaaaccttttttagcttgtgaagtgttgacttacccaaagtattttgtcacaacagaaagctaacaaatgcttatattctacgtgtttttatgttttatattaaaatgatcacttcctagctttgattctaaaccctgttggctcttgggcaattccctgtctgtaaaagttggtttatctggttcttaaacatggtgtttttaagatgttgcctggtgcacaatagcaaatacagttactgttatccattattcttattaggcaagaagggcaggagttgttgttgcccacatttgatagacataatgctttagcagtaatcctcttatgtttctatgaggttgccatctacagcaggtggtcactaaattatctgctgcccatagttgggaaaggctgtaaactacatatttatatcaagacatctacaagccccaggctgctcacacagcacactctgtccctttcctgactcagcctccagctctgctcccctattgaaaccaccttttcaaggaaataagagcagccctgcagagctggttcagttctgttctctagttctgttgagagcttgagcagagtaaagggtagaggcaccccttgccacgggagcacctactttaccccatacagaagctgacgagctagctgcactcagtggttaggctgttgctcccatggtgacatctttccccaggttatttctggtgccagtcagatttattaccattcacatgggtgccaaaatactatccatgacaaatgtagcactgtggttccagcaagcccatgcctccaggatacttcaggtgcctgttaccaatttacaggaccatacagaatgtggcatcctcttgtctattgtccagcagtcttgctacctggccccttccccgctttgaaccaagacatggattcggatataaatgtcatagactgagccttttcccactcctatcaacagtgttccttacttttaaagtctaaaggtaaattctacagagcagaccttttcctctagcagtgcatcccaggtaatccttgatgaaacagactcaagcctttggccttgctgttgacatggagctggcaaacataacatgtcacagagggtcattcggcacctcccacctcctccaaaatgcacatacataattttccaaggatgatttgaagttctcatgctcccttgccctcatgttgcttgggattgaagggtccagggccttgcacatgccaccacactacacctccaacccttctaagaattactgaaaagcagcattttaggatttaattaaataggtctataaaataacttactagtagttcagacactactcctgtgggccctggtgtgtctgatatgtgcttttggaactggtgcatcccccaaagccttctatttagagttccactctcactcccttgggcagcaggagctcccctttctgcaccagcatggggccagctgccagtttaggaaggtcactcatggatgtagtttggtggccctgattgtcctccttggataaaaagctaggagctgaatgaaatgggtatctatatcacgctcttgagtttcacagaagccaagggccagagcaaagtgacacttgcttcctggacagtgttggtcctggagtatcaagtgggatggaattgtcaaatgaggctttgtcctcacttggccttaaccgtgaccttgctccgtgtcccagcccctgctactcctaggtattcctaagcaataggcagagtatgacacaagaaatatccctgtgtaaaaacctcccatgggctagaaaggaccacttctaacaagccttcaggggtgggtggcatgtgtgaactgggacacatgggaaatgtacttaatgacaaagctcagtggctttccctgggtcccaaggcaggggattgattgggaagtgagttaaagggaaaaactgcttagtggagacagaaaagccccctttccccactgttccctgtctctgcctccccagaagaacccaacttgtttactctcatttacccagacctttgagcagagaagagaagcttcagtcactcctggtgacttaacacttcccctcctgagatgaagcaaattacctgcttcctgcctgcacccaggcaaccaggctccttgagaaagcctcacctctagccagaggggacccttcgtggcagaaatgttcatatccctgctccatgtacctgctgtctacagcagactccaccctccactctgtaagatctctgatccttccacccccctcactatccacagagagtcagcctttgtgagttttccctgtgtttccaaaagcttaaacccacccacttgatcctggcttcctgctgcagtggaaacagtcaagttgagaccaattccattttcaaaccatcccctcccatcttgtacaagcccacctctgcagagtcccttttgctcccccgccccctttattggattcacctagtggttctttaaagacactaccttcacacacacacaagttgtgaacatacattttttccatgtgtgtgcctttcttgatctctgctcactctgactactcaaaatagttccccagctacctggctatgctctcccaccgactcagtcctcagcatcctggcatctggcaggtgctctcctgagactggtcttgtaatggtcatctggattctgaggtcagtcatccaatagtcctcagtcgtcagcgttgacactactgaatggctgaatggccattcctttcttagtgataagatcttcagtgttttctgtgactttcgatcctgtcccgctggccacccttgcccaggcttatccttccccttgtcattcttggagctcaccagaagaagcccccaagtctgtccatacttgtagctccctaagtacttaaccgaccatcaaaatgttcatgtatttatcaaatagatatcccaaagcctccctcaatctacagaattattttagtgagtacccattataaatataccataacctactagtcaaccctgaccactgatatgtaggtagtttttaatattttaacttcatgaggaatatttgtgtaacagttcttgcatgtaactgaacaatgctaataagactagtgaggtagttcagagggtaagggtgcttaccatcaactgtgaaaatctgacttcaagccccagggttcatatggtgaggaaagaagctactgcacacacacacacacacacacacacaacacaaacacacacaaaatatgtaagcgagattttgcttttgtttttagaaagattgtctctgtaacagccctggctatcctaaaactcactttgtagaccaggctggcctggaactcagagatctgcctgcccatgcctcccaagtgctggaattaaagacaagcgccaccatgcctggctcatgcatgtaatttttaaatatgctaatattagtagttacggtcaaatcactaatttccatagggaaactagggatgtctggaatgtacacttgatcttttgaaaaataatgtgggggcaaccagagtaacattgccaagggtagtatcagaatcaaagagcatgactcatttggcccagggcaataggtctggtctttcctcttctcagtcccctgcatgagcaacaccgtggactgccaaggggttctggccaaggtacagctcactccagaagttataggccatttgtcttattcccgtcctgtgttttggcagaagagcccatctgctggagccaggtgaaacttaagtgattccagaagattctgtggctgtttgctggttaaagaaatttctgagtcggcctagatccagatggccatgggaagtgacaggccagcagagatcagtgccagtgcaggctgattgcacagatagaatggttggatgggggatgacacaatttgagatttcttcagcatctcttttctgcttagccttacttccctagtaatcttaaataggcttgggctccatgcaccatctatgcccagacaactcttgaattttgtgtttgtaatctgacttctaaactgaactcctggcttatgtatccaacagcaatgttagcatgtccatctgggcattcagcaggcctctccaatttaacatgcttaaaattaaacctttataatgctgatccacaaaaaaacctaaaaattaaaaataaataaaagccaggtgtggtggtggtgcatgcctttaatcccagcactggaaggcagaggcaggcagatctctgtaagttcaagaccagcctggtctacaaagtgagttgtaggacactcaaggctattacacacacacacacacacacacaaacctccatcttaaaaaaaacttaattaattagttgggcgtggtggtgcatgcctttaatcccagcctggtctacaaagtgagttccaggacagcctgtctcgaaacc

SEQ ID NO: 670 - DNA, 2426 bp, Mus musculus
cgggagttggaggcgaaaccgcgccgcgttgtggagggtgcagacggcggctcctgtggaacttgggggcgatcttctcggcgttcccctcagctgagccttctcctcaggcccagatgctcttcaactcggtgctccgccagccgcagctcggcgtcctgaggaacggcgctccaccttggatcgctgccgactgtgggcctccaggtctcccgcggccggagcgaatccgggcgagcgaggaccgccgaagaacatcgtgcttgggttccttccggacgcttttcaccgtaatcgagctttttagttcggaacggaggccgaagttaggacgctcagtggcgtcccgggcccctggctgcttacgtcaatatcgcgcgttaactagagagtgcacgcttgtgagagtcggggggtggtcttcacattaccctctacaatcccttctaagtggttatcagtgcaactgtaacgatgaacacacgtcttatggagaaacaggagtcccagttcctccttttggatgcaccttctgtaccgctcccagtatggagcatatattagcagttgctaatgaagaaggctttgtcagattatataatacagaatcacaaactagcaaaaagacatgcttcaagggggggagagacggcaacattatgatctgggacaccaggtgtaacaaaaaagatggattttatagacaagtgaatcaaatcagtggagctcacaatactgcagacaagcaaaccccttcaaagcccaagaagaaacaaaattcaaaaggacttgctcctgctgtggattcccagcagagtgttactgtggtcctctttcaggatgagaatacattagtctcagcaggagccgtggatggaataatcaaagtatgggatttgcgcaagaattacactgcttatcgacaagaacccatagcatccaagtctttcctgtacccaggtaccagcactcgaaagctaggatactcgagtttggttttagactctactggctctactttatttgctaactgcacagatgacaacatctatatgttcaatatgactggcttaaagacttctccggtggctgtcttcaatggacaccagaactctaccttttatgtaaaatcaagtcttagtccagatgaccagtttttaatcagtggttcaagtgatgaagctgcctacatttggaaggtttccatgccatggcatcctcctactgtgctcctgggtcattctcaagaggtcacgtctgtgtgctggtgtccatcagacttcaccaagattgcaacctgctctgatgataatacactgaaaatctggcgcttgaatagaggcctagaggagaaaccaggtgataaacattccatagtgggttggacctctcagaagaaaaaagaagtgaaagcctgcccagtaacggtaccaagtagccagagtactcctgccaaagctcccagagccaagagcagtccatccatctcctctccttcgtcagcagcttgtactccgagctgtgcaggagacctccctcttccttcaagtacccccacattctcagtcaaaaccactcctgccacgacccgttcttcagtcagcagaagaggctccatctcttctgtgtctcccaagccactctcatctttcaagatgtcgcttagaaactgggtgacccgaacaccttcctcatcaccacctgtcactccacctgcttctgagacaaagatctcatctccaagaaaagctcttattcctgtgagccagaagtcatcacaggcagatgcttgctctgaatctagaaatagagtgaagaggcgtcttgactcaagctgtctggagagtgtgaaacaaaagtgtgtgaagagttgcaactgtgtcactgagcttgacggccaagcggagagtcttcgtttggatctgtgctgcctttccggcacccaggaagtccttagccaagactccgagggtcctaccaaatcaagcaagactgaaggtgctggcacaagcatctcagaacctccttctcctgtcagtccttatgcttctgaaggctgtggaccactgcctcttcctttgagaccttgtggagaaggatctgagatggtgggcaaagagaatagctctccagagaataagaactggttgttggccatagcagccaaacgcaaggcagaaaattcatccccaagaagtccatcatctcagacacccagttccaggagacaaagtgggaagacgtcaccaggcccgtctactctagcagtctgtggtaatcacgtccagctcgtggatgcaggaatcaaggagtgcttttgtggacagtggagagtgctagtccagcacagggcccatccgtgaaggccagtctgaagacatcctctgcagaagatgccttaagcaagcgtgagcttatttgaaata

SEQ ID NO: 671 - protein, 784 aa, Mus musculus
GVGGETAPRCGGCRRRLLWNLGAIFSAFPSAEPSPQAQMLFNSVLRQPQLGVLRNGAPPWIAADCGPPGLPRPERIRASEDRRRTSCLGSFRTLFTVIELFSSRPKLGRSVASRAPGCLRQYRALTRECTLVRVGGWSSHYPLQSLLSGYQCNCNDEHTSYGETGVPVPPFGCTFCTAPSMEHILAVANEEGFVRLYNTESQTSKKTCFKGGRDGNIMIWDTRCNKKDGFYRQVNQISGAHNTADKQTPSKPKKKQNSKGLAPAVDSQQSVTVVLFQDENTLVSAGAVDGIIKVWDLRKNYTAYRQEPIASKSFLYPGTSTRKLGYSSLVLDSTGSTLFANCTDDNIYMFNMTGLKTSPVAVFNGHQNSTFYVKSSLSPDDQFLISGSSDEAAYIWKVSMPWHPPTVLLGHSQEVTSVCWCPSDFTKIATCSDDNTLKIWRLNRGLEEKPGDKHSIVGWTSQKKKEVKACPVTVPSSQSTPAKAPRAKSSPSISSPSSAACTPSCAGDLPLPSSTPTFSVKTTPATTRSSVSRRGSISSVSPKPLSSFKMSLRNWVTRTPSSSPPVTPPASETKISSPRKALIPVSQKSSQADACSESRNRVKRRLDSSCLESVKQKCVKSCNCVTELDGQAESLRLDLCCLSGTQEVLSQDSEGPTKSSKTEGAGTSISEPPSPVSPYASEGCGPLPLPLRPCGEGSEMVGKENSSPENKNWLLAIAAKRKAENSSPRSPSSQTPSSRRQSGKTSPGPSTLAVCGNHVQLVDAGIKECFCGQWRVLVQHRAHP

SEQ ID NO: 672 - DNA, 88892 bp, Homo sapiens
  misc_feature (1)...(88892): n = A,T,C or G
ttaacagcatcaatttcaaatgtctctgtttagtattttaccagtcacaaaatgctgattatgtcctcacaggaataagtatcttagaatatctctgtccagtaacctttgattattcttaaaaaaaacaacaaaggaggccaggcacagtggctcatgcctgtaatcccagcactttgggaggccgaggctggcagatcacctgaggccaggagttcaagaccagcctgggcaacatggtaaaaccccgtttaaatacaaaaattagcccagcgtgatggcaggcacctgtaatcacagctactagggaggctgaggcatgagaactgcttgaactcgggaggcggaggttgcagtgagccaatatcacgccactgcactccagcctgggtgacagagaccctgtctccaaaaaaaacaaaaagacaaaggaaatctgaaggcttttcctagttgccacaatgtttcatacaaaagacaaccacaaagtaaaactgcataggtaatttctatcatttactaatgggtgatgttccgtaatgcactcatgttagttattcagtacttagaacattatttcctcataggaaaataatagcactatcggcactcacagtactctggaacctaataaccatttataataaatgtttctatgggaaaattaattaacatttctaactgagatagaacacatccctccttcatctgctccctcctccccttcaccctcttacacacacaaagaactgcctctgaagctctagaaatccttttcctatcaaacacaacgccaaaagggataattctaagtagctggcagtgtggctcatgtagccttaacttttctaaaagcctgatatgaaaaacgggtcaagggacacacagggcagagaaggggaaagacatagctgaggatggaggtgagaaggaacagagatgtgtgcttacgtatatgtgttggcaaaggggttgaaaaaatccacagtaattggattgtttcattttcttctcactgtcagtagctgagttagatacaaaggatggtaaagttctgtttgtaatgaattaaccttggctgagatgaaaaaggcatagtaggaaacagcctatgtacaggtagtctccttgacagaatataatcatgttttatcttcccttgaaaaacagaaccaaagaccatattgatttgtttaaacatgctgatttaaaatgtaccaaagattattttgaatgaagcgagagaatgttttgatttatctaatatcatcaaacttttttctctgagataaaatagactctcattcctctgtaacaacgccacggggtaaatgaactaaagaatattaaacctcttctgtattttctgatgtaagagccctccttaggaaagaggtagtgagaattcaggctggctccgaaggacaggagctaaggtgaaaaagaaggaaaaagtgctttaaaggcctattacttagcaacagccctgggttggggtagtatggtactcatcttgcttgctctaggccaattttgtaagcactggaaaacaggagctcagcacgttccagttctagtataagaggggctagacattttatttgtattgcttgctacaggaagaatgccctggtcataagaccactaatcataagaatactactgtaagcccagagataagattaagaaggagggatgtgattgctatacctacattttattttgtattcttccaccaaaaaaaaacaaaaacaaaaacagatctctcttccttttctgtgcctggacttaaacagtgcttaactcagttgcaacatgcatgtagaccagggaaactaaaataggctgtaaaatcatttattcattcaaaattcatttggcagtagtaaagcattcattattctaacattatttcgcacttaaagtgtgcagagctttttgccaggctagtggttttcagcttggttctgcatcagcaatatctgctaagtttttgaaaaatatctatgctatgggttttactccaaacctactaaatatatggggcagagtcccaggcatctgtttaactactttgaaaaggttggcatcgagattccttttttttttcttgagacagtctcactctgccgcccaggctggagtgcagtggcgcaatctcagctcactgcaacctccgccccccgggttcaagtgattcttgtgactcagcctgccgagtagctgggattataggcgtgcaccatcacacctggctaagttttatatttttagtagagacaggatttcaccatgttggccaggccaatctcaaactcccaacctcaggtgatcctcccgcctcagcctcccaaagtactaggattccaggcgtgagccactgcgcccagccagcacctagattctcaagttaacttctgccacttgataacttatttaactagcctgcccacactgattatactggagttagaaaactactaggctgctgaatttggtcctcagaatgcttttatctggcacaatgtttttaaaggtttcgaacacactgtcaagttttacaaatcatacttcacataaaaccccaggatctctggttttagaaaagtaaaagatctaaaatcttactgaagaaggtagaagtgtctgaccaaagaaacatagtagtactgcagaaacattacagtactgcaggtccatgttgaaggtcagtgtagattcggctcccatttatgatgatagccatgtaccccactgtatgactttctgcagcaatttttgactgcctttggggatacatgagtagaatggaaccttggatgtgaatttaaagtactggtaagaaagtaaatgcagttaataaaatgaaggaccatgaaatctaagctgaacaaagaagtaaaacaggtacagaaatgtagagaggtgaaataccgaggtctgaatgaaaataaagactagccaaaatagcagttaatcataatgataatgatgatacacatgaagtgcttattctgtgccagtcactttaagcactttgcatgtattaaagtctcactaaaaatcacataaattaggtaccattattttccccatttgaaaggtgaggaaacaggcacagacaagctaagcaatttgcgtaagaaacaacaatgctgacaaatgacagagctgggattcaaattctggcaatgtagctccaaaggctatagtgctaaccactatgctaaaatgcatctctagcaagcaactagaaagaaagagattaagattcaagaatgagacatttaaattagtgattaaatggtggaattctgaggtgatgaattctagggaattaggggaataccataaattatggtaaacttggggtttgggatacacattaatcaagttttcaaaacagcacaaatctccaagtagcatctatcagcagttcttagctgcaagcaacagaagctaactctggcttatgaggcagaaaatgagtttattaaaagcttaagaaacaattttaaggctaaatttctaggaacacctaataccacactacccaaccaactggatggaagaaccctgtctttgataggaaacaccagatgcaacaattagctctgctgtcatctaggaatatcgtagccattgttgttgctgctgtaagctagaaatactgctgctgccatggcagaactgtgagtggacacttcaactcttccttcttgcatctctaacttctaaatcagacagtgtgaaggaggtgtgtctgactggcagagcctaagtcagatcctgcactcttgcaagggaaactaggaaataagtttttgcttctaccttagtaagacaaggttcatgatatgggacattccttaagcataaaaagagtgttcaaaatatattaagcaaccatcaacataactaacatccactacaaagaacaccacaaataaagcattaccaaacaaacacaatttaggacaatttgtgacatacatttgctttagctaagagatgaggatgattcaaaattgaaccataacacgaacatatcttaaaatctatacattaataaaaggtgtgtggggggacatgggtagaaacatgaacacaaacatacaacccacagcttaaaaaattgatggcaaagcccatttttatatttaaaaagcagaaatagaaacaagtaaaatgacagtgaaaactaatgatgcattaataaggcagcatccatcccccaaatttcagaaaatgtctgtaaacgtacatggcaagatgtatgcaacatcatccagtatgcacatgagaatactaatctagaattctaaacaaatttgagtttatggataccaacttctaggaatatttaataacccactttgcaaattccaagacagtaaatcttagttatatataagaatgagtctgtgggtttcagtaaaaacttgaatttttggattagttcatagcccatcaaggaattaccaaccaggctgctggtttttatgttgcattaagttgcccagagtctcaccttagcttcaattctacatgattttttgtttttttttttttgagatggagtttcattcttgtcgcccaggctggagtgcaatggcatgatctcagctcactgcaacctctgcctcctgggttcaagtgactctcctgtctcagcctcctgagcagctgggattacaggtgcctgctaccacccccggctaatttttgtatttttagtacagatgggatttcaccatcttgggcaggctggtctcgaactcctgacctcaggtgatccgcccgcctcggcctcccaaagtgctgggatgacaggtgtgagtcactgcgcccggcctaattctatatgattttataggtccgcttctcaacactctcagactaagtgtggtctggcagcagagattctcaggagaaagaatttgactcagtgtgggtcacatgcctacttctgaatcaatcagttatggtatggaattagtcacctggaacaaatctggctgctgaggcctttctcttgaggagggcctatgaagatacttccccaaaggcctcatatttgtttactgaaacaccaacaacatctgagccatatcgataatgtaaaagcaatctgtggtctttcttgacaaacttttttgatggtctgagaattcaggtattttggaatacaggtgaggtgacaccgtctaagggggaaattagagtgcagagacagttgtcctgattcacatcatttctctatttcataactaaatttttcattaagcacaccatcaaggtttttcacacagcattacattcaccagcacctctagtaacaaatctatcctctatatttcctcccttcccattgcatcagctgcaagaaagggaatgagtcactgctctcttccccattgctttcatctcatcctttccaaggtcaacattgcagaaggcagataggctgaataatatcatttaagagactcctcttttcccagggggaaggagatcttgcataagttttcccaaatcatcaggataaccttccatcagctgatctaaaaatgtttagactaagaaattatattagtgaaaaagttacactaatttttgtgagatgcatcctttatattgccaattatgtatagtaatgatcatatcatgaaatgtgtcagataaacataagctgtaatgtatttgattatgacacttaactctgcttgtgtatgctcagtcttacagaagctcaagcagcatggccatcagcctacaactttcaatgccttcccattgcactctgcacaaaatccaacttcttgtcctgactaacggcaccacatttgatctagcattgtccatctccttacatttgtatgcaatctccttaaagatgtcttgtttgccaacatagcccctagtctgagtatagagcctgagacaatgcaggtggtcagtaaatatctgttgagtaaatgaatggctatcacatgaaggatgattttcctgttactaactacatcctaaagtaatggaattgagtcagcttcaaaatagtattcacttattcctatagagatcagaaacaatcagcttactgccaatgcttgctcaaaaggctcagaataaagtacaacagttataaatatataacaggttatgaatggcagcatttcctgagtgtgtttctaaggacaccagtgccacaaaatatttctttaaaatagcgttcaaaggttacatcttatgcctaactgactaatcatctccatttggatgtctaagagacatctcaaatttaacatgacccaaactgatttgatttcagtaaacaatacatacatcctcccagtagctcataccaaaaacctctaagttttcttgaccacttactcttatatcctcatctaatccattagcaaatcttcttggctctactttgaaagtatatccagaatctcagcacttcacacattttcagtgtcaccatctcggtctaagccactattttcttttccctggattgttatagttgccttctcattggtctccctacttgggtccctgaccctccccacttcagtctattctcagcacagtagccagactgatacttttcaaaggaaagtcagatcatgtcacacacctgctgaaaatcctccatggtttcctttctcactcagaatgaaagccagtccttttgatggcttgcacggccctacctgaacgggactctggttatctttcttttttttttttcgagacagtcttgctctgttgcccagactggagtgcagtggtgtgatctcggctcactggaagccccgcctcccaggttcacgccattctcctgcctcagcctcccaagtagctggaactacaggtgcccaccaccacgcctggctaattttttgtattttgtttagtagagacagggtttcaccatgttagccaggatggtctcgatctcctgacttcgtgatccgcccgcctcagcttcccaaagtgcggggattacaggcatgaaccaccacgcccgactgactctggttatctttctatactcattgcctattactttgctccagataactgcatgcaaaggaggcttctacctcagggcctttgtacttgctgttcttccacttgattgaggaggtctttcttgcctatacttcataaaataagaaatcaactccagccccagatcagttttctccagtccctttcattgcttcattttcctttataatatgtatcactaactgtcacgtttgctatatttgcggagtgtctgcatctgctgtctagaatgtaagctctataggggcaggagttttgtctcattaactgccatgttcctagtacaaagcccgatcaaataagtcatgtgtctgagtgtgtatgctgaggtgggggagatatttcagaaacagtattccttggagtttgggaacgaaaaaaagagttggaacttgtagccttctgacctttagctcacaaaacagaaatactttaacaggtacaagatgaaatgactcaatatttaaaatactcaactatattctacacgaaactggctatttctataacttaatttcctaacagctttaaaagttactacagatgagatgaaaaagaacaagtcatctttctgagcctgagattcacctgtaaaacactcacgccaggcattgctgggaggagtgcaaatgatcacttactctgtgtctaagattgacacctgatttctttcctatagatataaaatattttcatttcaactcttctttaaaaaggaaaaattgtggtttttttcttacaactgcaaaatttgaggaattaaaccattctagactcctcttcagtgccccatctttatccctgttccacaaccactatcctattgtcagcatgagacaagctcagctgcaccagaatggtagaaaatgtccttagaactcgtagggatattagatattatcctgacctgtaactttcactgaggaataagaaagaaatgtatcagaatgaggaggaaagtgtttgaaaaacacatttaaggccgggcgcggtggctcatgcctgtaaatcccagcactttggaaggccgaggcggacggatcacctgaggtcaggagttggagaccagcctggccaacatggtgaaaccccgtctatactaaaaatacaaaaattagccgggcgtggtggcgggcgcctgtaattccagctactcgggaggctgaggcaggagaaccgtttgaactcgggaggcggaggttgcagtgagccgagatggcgccactgcactctagcctgggcaacagagcaacactctgtctccaaaaaaaaagagaaaaacacatttagtattatacttttttttttcagaggagaaaacccctaaagatttggtaagagaaggaaaagttcaacataattttcttggttgatgggggtgcactaaagatactgagactcaaccaaaggaatatcccattagggggctgtgaaatttttgtgtttatcaaaataaggtaaaagcttttttaagagcctgagaaactcttatttagactaacccactaaaaatattcacagtttaaaaaataaacagaaaaagagtcccaaaaaagttaatagacatgtccaactcagaaaactgggaagtggctcaaacccttctgagttctagtccagttctccaacattatatattggctacgattaatcaagatttaattgtataccagctgccgaaatgtttcccgtacaataaaaatcctcaatatgaaataaaggtttcatattactagtcgagttctttactaacaaatttccgaccttgcctcccatatccacatctaagaagggaggtatatctcttcagcatttactaaatgcttcttttgcataccattaagtcacttaatacaattctgccggctcaatggtactgtacccactttgcagacgacaagccgaggctagatgaagttaatcataaaatcagcggcattgaaacttaactcagtgtaaccccaaagctccctctacaccaagctgctccctgtacggcaacagaactcctggaacttgtccgcagagaatgagcagggcccttgcttttttatggtcttggccaggtttagcctgccttgtaacccgcaggtaacagagctatggaaatcaaatgaatcgctgtcaagtcggtgcaagattactattcagcacatttcatgaagacctggtctcaactgaacagactgaaaaccaatttcacaatttctttgcagtgtctcttagaaactagccactgtcactgcttagaaaatcgggggactgctccctcaagtggtcaaaacgggcctctcactagagctcgctacttgtttagccggtataaggccagtcacacaatcctgcaaatttcccgcaacctcccgaaggggtcaaagcccacgccccagcaaaagcacaggcgctccccgcccagcgaagacatgcgcatgcgcctatccgtcttctcccaaagcaaccaccacctggtggcgccacttccccccacgcctgtttcacccattcagccctctctttcgaatacctttgtccaattccataagggcagagttggcatccagttcctgttcgccatagccggcatctgccaggaaagacttagttgagtttgacgccatgacccgaatagttactcgactagcctagtcagaaagcttgcaaactctaccccaggaccgccatcttcccccgccgccttcttgctggtttttcttccgcgcgctgtcaagccctgttacgcatgcgccctggtcaccccgcggtttgtccgcgcctctgctaccccctgcgcaggcgctcaaggagctcttggactccaggttcccgcggctgggagaaaaggaggcggggatccgaagggggaaatgactctgaggcgcccggacgtcgctcggaagccaatcagagagcgtgacgtcagtttggcgcggagtttggcggccggggcttacagtggcgggagttggaggcgataacgatttgtgttgtgagaggcgcaagctgcgatttctgctgaacttggaggcatttctacgacttttctctcagctgaggcttttcctccgaccctgatgctcttcaattcggtgctccgccagccccagcttggcgtcctgagaaatggtgagtaacggtcccaaccgctgctcggagctggcggaattcatttcccccgaaacacacgccacctccgaccagggccgactccaattctgaactcagcttctgagttctcccatggcaagggtaaattagtgttagcagggactactaaagaaagctgtactttcatcccctcgggacacttgtaatcgtaatcgggcttttaaaatcgtaacgtaggcagggacgtcgaaataactgccttccaaggccccttacagcttacatctccattgcgcgttaacgggaaaatgcatgcatttgtgtgtatatgtttccttcaacggttatttgagatgctcaaaactcctaatcattgattaattcattcgtttgttgtagaatcttagtgagcccagctatgtgctataggtatataccagtgaatatgacccgctgttaaggaactcagtcaagcagagaagacaggatatctgcttctaacaggaacaaaatcttattttccccgtttactacacggtcataaaaatttaaattatagagtgaaagatgcctgtaaccacatccgccagagatgacccctgttaatagattgaagtatattattccagatgttttcgacgctagaggtaatacctattattttcagaaatcggatcaaaacgtccagttttttcactttaatggtataagttgaacgtattcccatgttaatacgtagaaatctaacttattttcttacgctaaaacattggcaataagagatttgaggttagatttggatgtcatcaacttaaactttttggtaagtttcagataagggagctaactacccagattaaccttggacagaaataaaatctcactcatgtgaaggtcgactatagccagaggttctttttccccttgaaactatgtggaaaacgaacctgagaagggaatttttatattcagcgatgagtctaggaaaataatattgagaaagagactgagaagtagtccctcaacttcctgctagcagtctgaaactttataccatccttatttatttccctcttagataatctttgtaattatacttaaatgctcctctttctgtctctcctgggaccttgtttgagtaacttctttgtcctctgtttaagagtgacagtacgcacagtggctaagaactctgtctttgaagttaaactgcctgggttttattatacttccacaccttactatatgtgtgttctgggggagctgttcagcctctattttgtgacagattttctcctaattctccatgtgtttacctttcccttccctctttcctattctcaagtactcattcgttgttacataatagtcactgaaattcattcgttattatatgaaatctatagaatcatctcctttcctcttcagtgttggtgttccatccttgaccccttttcttcttctacctactcctttggatgatcacagccacaaccagggcttcttccacttctacatacatacaaccttctgttacttatatagtaagtcctcacttaatgtctagataggctcttggaaactgtgactttagggaaaacagtgtataactaaactaactctaccataggctacttgatataaataagaattgtttcagtggcatattttggtcacacaaacaccaccgaacttctaaagaaagactcaaagtacttttaatattaaatgttgaaataattgtgtgctatacatatatttgagaaagattaataaaaacaggtgagataattatccaagttttggtgtatcagcgagtgacctcggtcatagtggtggtgggctaaatcaaggaataaatgtttgcaaagtgaaaattggaaggagcacctcctaccaccacccaggtcaaaaacaatcacaaatatggcagctcactgagccctttcataccaaatcgtttattgtcattcatttgtatgattattgtaaagtttacccatttttattttacaatgatttgtattcattcattttctgacacacttattccagctcagggctgtgggtgcccggagcctatcctggcagctcatggtacaaggtggaaaccagctctagaccagacactatttcatcacaggaagcactcacacacactcattgtctactgggaccatgtagacacaccagtgaacctaacatacacatctttggcatgtgggaggaaaccagagtacctggagaaaacccctatgaacatgggaagagcatgtacaaactccacacggccaatggcctcaaacaggaattgattttttcctcatgaacagtataacgaaatgacattgtacaaaattatgttattggaagacttcctgtacctgagattcatttctataaaagctgtgtgggttgattagcacctagacggtcaatcccacaagcatctcaaactcaaatacccaaaactgaactcagcttttcccccaaacctgcaatattaccaattttagagagtggcctcattatttaaacctgccagaaacctgagtaaattaaagacttcttcatcttcctcacagttacacattcaaaacatttcgttaaaatctcttgaatccatcctctcttctttatctgttatgattatgcatctttactgtatgctggatgtgttctatttttactattccatttccctaggttgggccctaatgccttcttgtctggattgtaagaagtctcccagatggcctcctagtttgtctgtcttcggtttattctccacattgctgctaatgatccttctaaaatggaaatctgattactcttctgtgtatttttaaattgatatctaaaagtttttattataaacttaaacaaatgcaaagaatataatttctgaccatattgggaatattgacattttaaaaataaaaatgctatatcactcctttaagtgtatctaatataatttaaatactatagtgatttgataatcacatcatccattttttagaaaaatacaaactcctctttatctgctggacattccatatagctgctttttcctcttgaatttatttccatttcatttctcctacagaatttctcctaatgtaatttaattttatgcttgaaaagctcttttactgatcactctgtcatacccttctgtgtcaaaaaatgtgtttaaattgctgttttctgtcataagcctccaagtattaaaacttctttatggattgaattttcaattcaattattagtactatatgattgattaaaacaatatagattaccaattttgataattattaaccaaaagtaaaattttattggaagtccatctttttaaagagatgaatttgggtgtttatggtccctttattgaaggaattatttaattatctcttagttaaggttccaccagtttatttgtttttatttaaaaatatttgatacccaaaagtttttattctttggatcagtgcaaggtttaagattggggcacgggaatgcctttcttttataaagtggaagaaaggaagtgatgaagggaaagggaaaaagtggtacctcaaccttctcagagacatcaggtttttcagacaggtgagttttagaaatgcgtatatagtcatccaattgcttataaatggagataacattttgagaaatgcatcattaggtgattttatcattgtgcaaacatcacagagtataaacacaaagctagatagtgtaactactacacacctaagctatatatttttcctaggctataaacctgtgtagcatattactgtattgaataccgtaggcaactgtaacacaatggtaagtatttgtgtatttaaacatagaaaaggttcagtaaaaataggatataaaagataaaaaatggtaacacctgtggagggtgcttactatgaatgggagcttgcaggactgggggttgctgtgagtgaatcagtgagtgagtagtcagtcagcacgaagacctgggacattatactactgtagactttataaacactctatacttaggctgcattaaattgattaaaaaatactttcttcaataataaattaaccttagcttactgtaacttttaaacttacaaacatcttaaattttttaactttttgacccttgtggtaacaggtagcataaagcacagacacattgtataattgtacaaaatattttatttcttcatattcttattctataagtttttttattttaaatgtttttcttttcttaacttttcaaaccttttgttaaaaactaagacacaataggaatttttaagctccattataatgttgtaagactaccattgtgtatgcggtctgtctttggccaaaatgccattacatggcatatgactgtatatcgtagttgagtacagtagtacctccttatccttgaaggatatgttccaagacccaaccctatgtatgctgtgttttttactatacagacacatacctatgattaagtttaggcacagtaagagattaacaataactaataataacatagaacaattataacgatattctgtaataaaagttatgtgaaggtggcctctcggaatatctcatggtgctatatacttgcccttctcatgatgatgtgagatgatataatacctacaacatgaagagatgaagtgagatgaatgacgtaggcaggcactgtgatataacattaggctactacttccaactatgtgacagacaaagcagcttctatgtgatataacattaggctactactcccaactatgtgacagacacagcagctaagtgactaaagagcaggtaacgtctatggcactgctactctggacacagggatgattcatatcctggacaggtcagggtaggacagtgtgaaattttcttgccactcaaaatggcacacaatttaaaacatgaattgtttatttctggaattttcagtttaatagtttcagaccgttgttgactataggcaactgaaaccacaaaaagcgaaaccacgggtgaggggtaactactgtatctggaaattgagtctctgaaaactctcatgttcttgtatactacttggaatatgtgcatgtaactccaggggcttaagttgtacaatgaggaaataatagctttttccaaatgtgttgtggaggaaagcattacagtttcatgttcataacacaataaggatccaaaagtagcttagggtggttcatcagtgaagtgtgtattgcagggattgcataagtagaggggtaggcaaggaccaatcactcaccattcattggtgtttggatgttaattataggcagtgaggcagagttaaagagtcattgtttaattgtaaaaaattgtaggttttttggagtgtatcatcttcatttcaaccaagttgttcaaaagtcccttttgagtttttattttgcagttgatttttttttttaattccaaaacgtgtatatttacataacctttgaacagaggcttttgtttttacacacttattccgtaggttaatacttgtgacctcaacataactattgcatttttggcgggggggtggggggtggggacggagtgtcgctgtgttgcccaggctggagtgcagtggcgaggtctcagctcgcggcacgctccgcctcccaggttcactctattctcctgcctcagcctccgagtagctgggactacaggcgcctgccaccacgcctggctaattttttttttatgtatttttagtagagacggggtttcaccgtgttagccaggatggtctcgatctcctgacctcgtggtccgcctgcctctgcctcccgaagtgctgggattacaggtgtgagagaccgcgcccggcctattgcattcttttagtggtctttaacagctcctttacaatgatatgtgatgctgaaattatgacgtgatggccccagaactaattaaatttggattaaatttctttggtgcccttctgttgattcattcagattatgtctatgaacatccaaatgtagatttgtctgaggttatgtcaggctaagatgtattctccacatagtacttttgatgaaaagtgaggattcagagtaccctaaaatgtgagtttgttaattatttaagatgctttcaatagattgtaaactcagtgtttcctccaatgcttattgaacatttggttttcagtaattacttgttgaatgaatgtttattttatatatttaaaatgtcttgatcacaaatcagtataataaaaacaaatctctgaagatgtctttactatgtaggagcatagtgcacattagacctctgacccaagcagaataaacttttcttctaccctgagtctcttgttctctgttctaaattcagtgaaaatttacccatctttcaagacctcctgtaaagactccctgacccactaccactagccagggctaattaaatgttttctaggggtaggtacataacacttcactttacaatttctctaatataatttaaggtactataattgctgctattgacattttagattcctacaatttcagcactaaaggaaaacagaagtaaatttggtgaatatgttactggctatagtagctgcattgacatattattttctttggctctttgaccattggattttgtatgatgttctggaataagaatttaattgaaggggatagcagttttaatggaatgcttttgtggttgtctctttggtaggagaagggggaagatctttcttaatatgcagaggcctcttgtttcttctaatctcaatgtactagtgagagtctccattttagatagtaagcccaaagctatacctccccagaagttggaagtgctctttcattttttccttaggactccttaatgaaataacagaaatggtgtcttccatagatattaatagtaagtggatctatgttaatatctaaagtttcttaaggacaaatatttacctctgaatttgttaaaaatgctgaaatgtgatgctgtattggaattctataaggaattatcttgttttaggatggtcttcacaataccctcttcaatcccttctgactggttatcagtgcagtggtaatgatgaacacacttcttatggagaaacaggagtcccagttcctccttttggatgtaccttctcttctggtaagagaattactatctaggcaaggcttggacagaaatgatctatttcacacttatagggaaaatatactagagtatttccctttcaaagaaaagtaaattaggtggatgttagagtttttgtaaaaactgttatcttctgatttataaaatagacttttcttaatctctatacatcattagcataactatatttcctctaaagcataggactattatagcactatttttaaaaaatcaatataaggaaggggttgcaaaggttcagctactatgaaaactgttttatccagtagatacataccctttgatctggttgaatgtatctttctgtgactcattggggaatatatgaacagaaatagaagtacttcagccaggctcagtggctcacacctaaaatcccagcactttaggacgccaaggtaggtctgggcacagtggctcacacttgtaatccccgaactttgggaggccaaggcgggtggatcacttgaggtcaggagttcaaggcagcctggccaacatggtgaaatcccatctctactaaaattgcaaaaaatcagctgggcgtggtggcgcacccctgtaatcccagctacttgggatgctgagacaagagactcacttgaacctgagaggcagaggttgcagtgagccaagatcgtgccattgcattctagcctgggtgacagtgagacttcatctccaaaaaaaaaaaaaaaaaagaaatagaagtatttgtctccacccataatagtttgagaggaaagaaaaagttgtgacaaggaaatttaaaactaatagactccttataaaaattagccgggcatggtggtgcatgcctgtagtcccagctactggggaggctgatgcaagagaatcgcttgaacctgggaggcggaagttgcagtgagctgagatcacgccactgcattcctgcctaggtgacatagcgagactgtctctcaaaaactaatagactattacatagtcatgattgtggtaaaaataagtaaataaaaatatggttaaaaaaactaatagactcagcctgctggcagcctacatcatcatatgcctttgtttgccattggccagtaccactcttgttttaagtactaccctcgatttagcccttctctaaataagagattatctgaagaaaattttggtggttttgagtaagcttaaaaatttttgtagctaggcatggtggctcacgcctgtaatcccagcactttgggaggctgaggtgggtggatcacttgaggtcaggagttcgagagcagcctgaccagcatggtgaaaccccatctctagtaaaaatacaaaattagctgggcgtggtggcgcatgcctgtaatcccacctacttgggatgctgaggcaggagaatcacttgaacccaggaggtggaggttgcagtgagccaaactgcactattgcactccagtctgggtgacagagcaagactccgtctgaaaaaaaaaaaaaaaattgtgttactctttatatatttttttctttatttctgctttagctcccaatatggaacatgtactagcagttgccaatgaagaaggctttgttcgattgtataacacagaatcacaaagtttcagaaagaagtgcttcaaaggtaagtctaggtctacaatttttgttttaacatttaaaaaactttacacatcctcaagtatattattatttgaacacattctgttttagtctgtcttctgttgctataaaggaataactgagactgggtagtttatatagaaaaagtttacttggtgtgtgattctgctggctagaatagtagacatctggtgaaggcctcaggctgcccccactcctggcagaaggcaaagaggagcccatgaatacagaggtcacatggcaagagaagggtgtactaccaagctcttttttaacaatcagctctccagggaactaatagagtgagaactcactcatcttttcacctcttagggagggcgttaatctgttcatgagggatccacccccatgacccaaatgcctcccattaggtcccacttccaactttggggattaaattataacatgagatttgggaagggacaaacatctgtagtatatataacacattcccaatgatattaacttctgattaagtctttttagggaccagattagatgtgaatggtggactgcctatctgtcaataactgttaactgtgacaatgcctttactcaaagttaagaaaaatactttttaggattaaaaacaattcttaaaaaagttaaatctttaacacttaatgtgattagagaagtgttgctttaaaatacttatattaatcaagcatttttcatgtttaaagcaaagttctaaccttaagaagctgataatttggaacccataagtcaagtgttgaaataactgaaagaaaacaaagactataaatgatgtagaagtagaaagtaaaacacactggtgtcaaagagaaagctctcatgtagtaaagaaggctaggaaaacttacgaagcatggggcatttgagttggattatggtatttagaccagtggaaatggaagggggcactccaggtgacgggaaaagcattagcaaaggtctagagatagaaaagcataggatataataggaagtgaccaatttgtttggaataaggtatcgagaacagtgagagatgaggcttgcaaccaagataaagactaaagaatgcaaaatgttgaatgtcaaactaaagtattttacattccattcagagagcatcatgaagttctttttgtttttggttttgttgttgttgttgttgttgttgttgtatttttggtagagatggggtttcaccacattagccaggctggttaactcctggcctcaagtgatctgcctgtcttggcctcccaaagtgctgggattacaggtgttagccactgtgcccagccagtatcatgaagatttttgaactggaatatatttcagaaagattccattgtagagaatatattactagtgaactcatggaaaggaatttgacatcagatggtagtagttctcatgtggtaattaagggaatgtgtaatttctgtgagtccacaaattctctttgctcatgccaaagggtgctgactactgattttttatgtgtgcatctttatttttattattttaagttccagggtacatgtgcaggacatgcaggtttgttacgtaggtaaacatgtgccgtggtggtttgctgcacataccaacccatcacctaggtattaagcccagcatgcattagctatttttcctgatgttctccctctccatgctccccctcaagaggccccagtgtgtgttgttcccctccctgtgtccatgtgttctcgttgttcagctcccacttatgagtgagaacatacggtgtttggttttctgtttgtgcattagtttgctgaggataatgacttccagctccatccatgtccctgcaaaggacatgatctcattcctcttatggctgcattgtattccacagtgtatatgtaccacattttctttatccaatctatcattgatgggcatttgggttgattccatgtctttgccattgtgaataatgctgcagtgaacatatgcatgcatgtatctttataatagaatgatttatgttcctttgggtatatacccagtaatgggattgctgggtcaaatggtatttctggttctaggtctttgaggaagcgccacactgtcttccacaacggttgaattaatttacattcccaccaacagtgtaaaactgttgctatctctccgcagccttgccagcatctgttgtttcttgactttttaaataattgccattctgactgacgtgaaatgatatctcattgtggttttgatttgcatttctctaatgatcaactactgatctttttactactacagctttccaggcatttaaagttatattaatatgggtaccacagaatacaatttagacatttcacatttaccattttctttgtttagaatggatggctcactggaatgccgtctttgacctggcctgggttcctggtgaacttaaacttgtaagtgactttatttcattaggatctgggtaaatactgataagggagtgctttattaaattgtgtttaccttatttttgaaaggttacagcagcaggtgatcaaacagccaaattttgggacgtaaaagctggtgagctgattggaacatgcaaaggtcatcaatgcagcctcaagtcagttgccttttctaagtttgagaaaggtaggtttgtgcttatcttctttcatctccttaaccttctttgcagttgggagataagaacctgtaattgtttctaccctttcccctgtcaaagttactgctttacctacatagatgattaagattctttttttggagacagtttcgttctgttgcccaggctggagtgcagtggcgccatctcggctcactgctacctccgctgcctcccaggttcaagtgattctcctgcgtcagcctccggagtagctgggactacaggcgcacatcaccatgcccagctaatttttgtatttttagtagagacggggtttcaccatgttggccaggctggtctagaactcctgagctcaggcaatccacctgcctcagcctcccaaagtgctaggatcacaggcgtgagccgctgcacccagccaggtgattaagattctaacatgactgaaaaccttaataaaattaaattggttttaggcccactcttctggacattatctctagcttgtccctgaaagtcaagagtctttgataagtttttctgtaatcttgcacataaggtaaagatttataaacagctacaataccattgttcaaccttgattgttcattgaagttaaaaccttgtactgggcactcattaactatttgtaaaacagagttactttaactctgcttgtaaaatctaaatgagctataaggctgataaacaacataatttttttctacctaaaaatttatcatgtatttggtttaaatggcctgttttttgttttttgtttgtttgtttgttttttgagacggagtctctgtcacccaggctggagtgcagaggctcgatctcagctcactgcagcctccatcccccgggttcaagcaatcctctccctcagcgtcccaagtacctgggagggattacaggagcctgccaccacgcccagctaattttgtgtttttagtagatctggggtttccccatcttggcgaggatgatcttgaacccctgacctcgtgatccacctgcctcggcctcacaaagtgctgggattacaggcatgagccaccacacccggccaaatggcccaattttctattatgttttcaactattacttaaaattgattttcctatgtttatattgttataatggacaaggaagatttaagagttatataacacagcacagtactgtagcagctagggaaaaacttatcagtggtgtctgaataagctcttcatttctgtttttgtttgtttgttttctccttccatttgtttctcactaaataattttttttaaatggaccaacaaacatttctctcaaaggagtctctgaagtaatctgactttaatctctgaataatagtgacagacattacaatctcctttatcactaaaaaaaaaaaaagtactctgttttaaaaatcaaatgttttcatttattcacctgagccatttaggaggttaagctggtttggactggttttttgtttgtttgtttgtttgtttgtttgtttgttttttgagacaaagtctcactctgttgcccaggctggaatgcagtggcgtgatcttggctcactgcaacctccacctcccaggttcaagcaattctcatgcctcaacttcccaagtaactgggattacaggcgtgtaccaccacgcccagctaatttttgtatttttagtagagacagggtttcgccatgtcggccaggttggtctcgaactcctaacctcaagtgatctgcccgcattggcttcccaaagtgctgagattacaggcatgagccaccatgcccagcctggcttggacttttaagaaagtcggttttaatttactgtggttgcagttgaaactggaaccttgaaggggaaatatggcatgatttttcttatttctgcataactttattaacatatttaagtagttaggtatgcttgtgttctagttttctacactcttgtgtcatagttcactctgagtttgtaaacataattttaagataatgaaaatttacctaactaaagagtagtggaaaacatatcttttggtccttttgcttaatttttacaactctgcatgtgaatcagcctgtgacaatgagctgtagaagaaaaggcactgagttagagattggggcaggtggcttttttcatgattttcagtagttcataggtactctagtgtaaattagtctgatcggatactgctcccaagccctgtggtttgttttgttaaaacagaatagataatagctccactcactccatcagccataagccctcttgcagggcaaacctttgcaactaaacatggaagccctctgttttattctggcctcctgggcaaagtgattttaacctccttgggccttcattttctaattttatgagataaacacctagtttatttaggtcacaaaaatattgtagacataaaagtgaggtgaaatatgaatacttttttttttttaatctgagctcattatggtggctcatccctataatcccagcaacttgggaggctgagaaggattgcttgaggccaggagttcacgaccagcctgggtaacatagtgagaccctatatctaagaaaacagaaaattagcttggtacagtggtatgcacctatagtccgagctacttgggaggctgaggtgggaggatcgcttgagcccaggagtttgcagctgtagtgagctgtgattgtgccatcatactctagcctgggcaatagagtgagacccagtctcaaaataaattaattaaatcaatcgatctatctataatcaatcagaggaccatataaatacttagtgttttgtgggggtttttgtaggtagtatggtagaaaacatctttggtccagttccttccaccctacataggtaggatacaaataatcctaactggacatagtcacactaatggaatttgccttccctaagtatctaccaactaaaagcaaagaaaatggactcagataagtgctttgtgtggcaaaagggcaggtattagaacttctagtggataattaaaattgattataaatttatttcctctcctacaaacttacctatatttacaccttctttctcattcttcattctcaagttttaattaaatgagaatctcttgcaagtgggccaggcatttattttttcaaagttcctcaagggatttcaatgtgtagctaaaattgagaaacattcttgatccttcccaagaccttccaccatcacatgtatccccactaccctgtatcttcaagttctccctctctattggctgtttctccttaggagaagatatttggcctattttcccaaatatcttaaccctgtgttctcttttagttgttactgtttcatattttccatctcctttaatttggtttaatctattttccacatctagccctcttcctgaaatcactcttgctaaggttattaattatctaattatcagaaagcacgaaacttttcaggtcttttcttctgcttgtataatatgttacacttttggtcttttatagaatttcaataaaagtctttgcttagaatctgtgatatcccactccctctggtactccttctgtccttctctttattctttcatagttgcttttacctaggttgaagtgttagcaaggcccaggatttggtgtttagcctttttttgctttcaacctataccttcttggacagtttcatctgtaccagttttgttttgtttttcatcctacttgtgttgacccagatctatattcctagccttaacctttctgcaagtacttcagattcaacatatcaaaaagtgaacccacaattcctccctgaactcatgatttctccctggcaatgccatctttttcctctcctctgatatcatttccttgaacaacgtatttaacttttcttatagtgtgagtctgatggtaataatttaccttagtttttctttacctgaaaatgtccttatttcatcatcattctcgaaggacatttttgttggatatgaaattcttttttttttttttttttttttttttttttttttttttttataagcccagaggtcctttattttttttttttaacacctattatgccatgaattcatagggaataggttccagcagctcaggctccttcccattggttctcacaaagtgtgcttctctgggtggagcaggctggcgctttagttgaacccaggtacctttctctttggcttctttctttttctgatcattttccttcacacgtttcaggaagctatctcggctcttagaatgcttaatgtgctcaatacgcacattaattctcttggcaagaatcttgcccttaacttgtttgtttacaacaatgccaacagcatgctgggtaacattgtagactcttccagttttgccatggtaacacttgtggggcattcctttttgaacagtacccgttcccttgatgtctacaatatcacctttcttatagattcgcatatatgtggccaaaggaacaactccatgttttctaaaaggcctagagaacatatatcgggtgcctctcctctttccctttgtgttcgtcattttggcgaattactggaagatggcggttccggccgaaaagaagctggatatgaaattctgggtcaacagcttttttttcctttcattgctaaagttgttccactatcatctctgctttcattgagaactctgtggttgttaaaatcatttccctgtatataatatgctgtttttcctgactattttcaggattttttgtctttggtttctagcagtttgactgtggtatgtctagtcatggttcccttcacagttttcctgtttgaggcttgttttagctttttgtatttgtaaattcctttttactgaataggaatttttctatcatttcttgaaatactttttctgggccaggtgtggtggctcaggcctgtaatccaagcactttgagaggctgaggcaggcagatcacctgaagtcaggagttcaagaccagctaggccaacatgatgaaatcccatctttactaaaaatacaaaaattagccaggcgttgtggtgggcacctgtaatcccagctactcaggaggttgaggcaggagaatcgcttgaacctgggaggcggaggttgcagttagctgagatcgcaccactgcactccacactccagcctgggcaacagagcgagactctgcctcaaaaaaaaaaaaaaaagaaatattttttctgcctaatttattcatattctctctcctccctgcttcttctgttaccttaattacccatatatatattttttttttcaattactcatgtatttgacttttctaaattatcccatgcatccttgaggttttgttttttttcagttatcctaaacttaagataaaatgaacaagccataaaattcatccatttaaagtacacggtttagtggtttttagtttattcactaagtcgtgcagctatcaccacaatctaaatttagaatcttttcatcagtccaaaaagaaacttgaacgcattagcagtactttcacccattccttccaaccttatacaaccactatagtaatttcggtctctatagatttgcccattatacacatgcatacaaatggaatgatacaatatgtggtcttctgtgactggcttctttaatttagcctaatgttcagttctatttttctctctcttcttcaaattgaatgatttctattaatttgtcctaaagttcactttctctattttctccagcctgttcttaggcctatccagtgatttttttttttaatttcagatactggttttcagttctaaaattttcttatgttttttttaagacagggtctggcactgttgcccagattagagggcagtagcatgatcataggcacatgccaccatgcctggctaatttctttttgtattttttgtagagatggggtttcacccatggttggtcttgaacttctgggcccaagggatctgtcaaccccagcctcccaaaatgctgggattacaggcatgagccacagtggctgaccttcatttgtttgtttgtttgtttgtttcctgctgagatttatcatctttttattgattacaagtgtatatatttttttcttcctttttttgttttttgttgttgttgttgtttgagacagggtctcactctgtcacccagtttggagtgcagtggcgaaatctgctcactgcaacctctgcctcccgggctcaagtgatcctcccacctcagcctcccaagtagctgaggctataggtgcatgccaccacacccagctaatttttgtattttttgtagagatggggtttcgccatgttgcccaggctaagtgtacgtttctttaactcatttaacatggttatgtatcctttacaaccttatctgataaatcaatatctggattatcttgggattggcttccattgatttattttcccttgagaattattcgttttcctggctctttgtaagtcaagtaatttaagattatattcaggacattgcgagtggtatgttggattctagattctgttatattgcttagaaaagagttggtgttccttttttaacaggcaattcacttgtttggatccaaattgaagactgtcacacctacaggagggcagtggatcttatctcaattattttctttagtttaagcctcagctgcaaactgctttcagtttctcttgcccatatggtacaggggtcagccagagacttggactgagtttaaacacggaatcatgggttccctttctctagctgtctccaggttttccccatcccctcactctctgactgttcttgttgctcccagtctccttttccttgttcttctggcttgaaagatggcagattttttaatttgcattttagctgcctggtattaatgctgcaactttggctgtcctcaaggtaaaaccacacacacaaaaaaaaaaaaaacaccaaaaaacccagtaacttaatctcaggccaatcatttgctaaagatgttgactctcctccaaaaattgcatgtttaagaggaaagtgggccaggcacggtggctcatgcctgtaatcccagcactttgcaaggctgaggtgggctgatcacctgaggtcaggagttcgagaccagcctggccaagatggtgaaaccctgtctctaccaaaaatataaaaaattagccgggtgtggtgacacatgcctgtaatcccagctactcgggaggctgaggcgggagaagcgcttgaacctgggagacagaggttgcagtgagccaaaatcgtgccactgcactccagcctgggtgacaacgagacaccacctcaaaaaaaaaaaaaaaaaaaaaggaggaaagtggtaacttaaagggaggagtaaattttatccccaaacaacagtttctattttaggcggagtaaattccaacaaaaggggaaaaatgaacccgagtgacattctgtacaaccaaagctgttaaaaggaatgaatagtgcctgacacttaaaaagtgctgaattagatgaatggtttcaacatggctgactagatgcatctggtactcacctctttcacagagtggaaccaaaatagtgagatattatagtgacagtgagatcgtagataatcacccttcaaatagatcatctaagagagaacactgggattcaacagagaagtgataagaagctccggaagcaaggaaggagagaaaagtaaagcagcctgtttggctgggatcagctaggaatctggagaggcttcctatgcagggacagagtaagtgggagacccccagcagcccaaatacccactgtgaaccctaataatagccatgggagaccccttgatgctcacggaccctgagactaacatagggagctgcctggagacttcatgaaggcattgctccagagagatatcatactgggtcccacaaaccctcaagtcctaagcagctgtaacactgattttcagagcccagcccccaccagactgtgtcctgccctgccacccaggctgaattgggagccacacacagcgacctcattcccctgagtggaggggcagctgcacattttcacactccccaaggacaaattccacttcctgcaaccaccaccactctgggctgctgcagggcagaggtgtaagcaaaactcagtcgtttaactgcctgcctatgggtactcccagggaaagcaaccccactctgcatgtcagtactgcagcatagctgctgctgccccttacctgagcattccactggaagcctggggatcaccccacccctgccttccatagccagcacctgcatgcaccaccagggtcactgagggcagttccacctagcctggcttcatacacgccactacccaagcacaccctctgggaggcctgaggattgcccagttcagttcatcaccagtggtgcctgagcactcctcctagagtctaaacttgggcctactcaatctgctgctaccaccatagctggcaccaacctgtacatgcaacctgcaagtctagggactggcctgcccaacctgtcacagccaccgccaacactagtacggaacacttgggttccaggggattttttcatcactgctactgtcatcatccacaccactccacacctcctgcccaggggctcaagaatttgcccacccacctggcccactgctgccatttccaatacctgagtaagtcatctgaaggcccaagaatctacctgcctggatccattaacaccagtgccagcgtatgctgccttggggccaaaggacacacaggctcagaccactgctgccaccactggggcctgaagactggcccacctggtatttcaatttctggcaaaacttaaccagtctgcactaaaaaccacactctaatctaccaacgaaaccagataccaatgactctatggccaaaagaaatgatagagactatgctactgcttgcatccagaaccaaagccaagtgtcctctccaaccatcaccatagatacatcttcaggaaaatgttctccactacaaaccaaattcaaaaaattggaaaaagcaactgttacaccaggtgcacaaatatcaacataaaaacacagagaaatcaaaaagcaaggatatgtgacacatccaaaggaacacagtaattcttcagcaacaaatcccaatcaaaaaggaattctcaaaatcctggaaaaatgatccaacatactgatactaaggaagctcagtgagagaaaagagaattctgaaagacaatacaaagaaacagaaaaataattgaggaaatgaatgaggaatctaccaaagagataggtatcataaaatagagctaaattctggaactacagaattcatttaatgaaatacaaaatacctttgaaagcttcaacaatagactagatcaagcagaagaatcccagaacttgaagatgttttgaagatcttttaaaataacctactcagacaaaaatagagaaaaaataataaacatgaatgactaaagctttcatggcatatgggacactataaagtggccaaatatatgaattttcagtgtcccagaaggcaaagataaaatgaaagggttagaaagcctatttaacaaaataataggtgaaaacttcccaagtctagcaagggatttatatatccacatacaggaggctccaagatccccacatggatataattcaaaaaggttttttttccatggcacattgtagtcaaactcaaaagtcaaagacaaagtgaaaattctaaaagcagagaaaaaacatctagtcacctataaaagaaaccccatcagacctaacagcagatttctcagcagaaatcttatagttcaggagagaatgagatgatatattcaacatgcttaaagaaaaaaaaaaaaacctgccacccaagaatactacacccagtaaaattatccttcataaataaaagagaaataaagtctttcccaaacaagcaaaagctgaggaaattaatcaccagtagatgggccgtacagaaaatactaaaaggagtcttataccgggaagtgaagagcaatatttactgtcatgaaaacacaagaaaatataaaaactactggtaagcaaacacacaaacaagaaagaggaaaggctgaaatgttaccactaccgaataccatgaaaccataatgataaaaagtaccagagaaaggaaggaacaaaggatatacagaacaaccagaagtcaatcaataaagttaggaataagccttcacatatcaataacgttgaatgtaaacatgttaaactttccatttgaaaagtacagactgggcaaatagacaaatgtgacctaattatatgctgcctacaagaaacgcatctcacctgtgaagacaagtataaactgaaaataaaggaatgtaaaaagatactacatgcaaatggaaaccaaaagcaagcaagaatagctatacttacatcagataaaacagactttatgtcaaaagcagtaagaagaaacgaaggttattctatgatgataaatcagttcagccaaaggatatatcaattgtaaacatgtatatacctaacactggagcacacagatatataaagccaatactattagatctaaagggagagactccagtgcaataacagttgaggacttcagccaccccactcagcgttagacagatatctagaaagaaaattggatttaaactgcacattagaccaaatggacctaagagatatttacagaacatttcatccaacagctacagaatacacattcttctcatcagcaaacagaatattctccaagctagaccacatgttaagacacaaaacaagtctcaacacatttttaaaagttgaaataatatcaggaatcttctcagaccacaatggaataaaactagaaatcaacaacaaaaggaagtttggaaactacaaatacgtggaaattaggcagtatgattatgaatgacttgggtaaaggaagaaattaaggaaatttttacaattcttgaaacaaatgaaaattgaaacccaacataccaaaacccatgggatacaataaaagcagtactaagaggaaagtttatagcaatacacacctataccaaaaaagtagaaagactttaaaagaatctaacaatgtacctcaaggaactagaaaagcaagaacaaaccaaaccccaaattaatagagggaaataataaatagcagagcctaactaaatagagacttaaaaaaacaagaaaaagggtcaacaaaacaaaaggttggtttttggaaaagataaacaaaatcaataaggtacttgctagactaaccacgaaaaaaaagaaagatggtcttaaataaaatcagaaatgaaaaaggaaacattgcaactgataatacagaaatacaaaagatcatcagaaactattgtgtacaactatacactaactagaaaacctagaggaaatggatagattacaggacacatgcaacctaccaagactgaatcagaaagaactaggaaacctgatcaaatcaatagtaacaagatcaaagcaataataaaaagtcttccaacaaagaaaagttcaggaccagatggcttcactgctgaattctaccaaacttttaaagaactaacaccagttctcaaactattccaaaaattgaaaaggatgggaattctccctaactcattctacaaggccagcattattctgataccaaaaccagacaaggacaaggacacacacaaaaaaactacagaacatacggacatagatgcaaaaatcctcaacagaatactagcaaactgaattcaacagcacattaaaaaaaaaaaatacaccatgatcaagtgggatttatcccaggaatgcaagaatagctcaatatagacaaatcaataaacatgatacatacgtcatcaacagaatgaaggacaaaaaccatatgatcattttagtagatacagaaaaataattcgataaaattcagcatctcctccgaattaaaaaactcaaccaactaggcatggaaggaacatatctcaacataaaaaggctgtatatgacagactcacagttaacaccacactgaatcgaaaaaagctgggaagcctttcccttgagaactggaacaagacaaggnnnnnnnnnnnnnnnnnnnnnnnnnnnnnnnnnnnnnnnnnnnnnnnnnnnnnnnnnnnnnnnnnnnnnnnnnnnnnnnnnnnnnnnnnnnnnnnnnnnnnnnnnnnnnnnnnnnnnnnnnnnnnnnnnnnnnnnnnnnnnnnnnnnnnnnnnnnnnnnnnnnnnnnnnnnnnnnnnnnnnnnnnnnnnnnnnnnnnnnnnnnnnnnnnnnnnnnnnnnnnnnnnnnnnnnnnnnnnnnnntatccaaactggaaaagaagttgtattttccttggctgatgttatgatcttatatctagaaaaacttaaagactcatacaaaaaaaaaaaaaaaacctcagttctgataaattcattaaaagttgcagaatacaaaatcaacatacaaaaaaaatagcatttctatacatcaataatgaattagctgagagagaaatcaggaaggcaatcccatttacaatagctacaaaaaaataaaacacttaggaataaatttagccaaagaggtgaaagacctctataaggaaaagtatgaaaccgatcaaagaaattgaagaggagacaaatggaaagagacctcatgctcatggatgggaaaaaattattatttttaaaatggccatactaccccaagcaatctacagattcagtgcaatccccatcaaaataccaacatcatttttcacagaagtagaaagaacaatcttaaaatttatgtggagccaaaaagaacccaaatgccaaagcaatcctaagcaaaaagaatatagctaatataataactaaaacagcatggcataaaaacagacacagagaccaatggaacagaatagagaattcagaaataaatccatatatttacagccaattgattttcaataaaggtgccaagaacctacaataaacggtgctgggaaaactgggtatccacatgcagaagaatgaaactgtacctctatctcactatattaaagaaaatcaagataggccagacatggggctcatgcctgtaatcctagcactttgggaggccaaggcaggtggattgcctgagctcaggagttcaagaccagcctgggcaacatggcaaaaccccacctctactaaaatacaaaaaattagcttgacgtggtaggcgcacctgtagtcccagctgcttggaaggctgaggcatgagaatcgcttgagcacaggaggcagaaattgcaatgagccaagatagcaccactgcactccaccctggttgacacagtgagactcagtctcaaaaaaaaaaaaaaaaaatcaagatggtgtataaagacttaaatgtaagacctgaaacaatagaactactagaagaaaacatagggaaaacacttcaggatattggtttaggcaaagattttatggctggccaagaactcaaaagcacagacaacaagaacaaatagataaactagactatactaaactaaaaagcttctgcatgccaaaactttttgaatgggaagtatttgcaaactatttatctgataagggaataatatgtagaatgtatacaaggaactcgaacaactcaacagtagaaaagacaaaatattaaaaagtaggcaaacacagactgggcaatgtgccaaaactgtctctacaaagaaatacaaaaaaattaactgggcatggtggtgtactactgtagtcccagctacttggtggggctgagatgagaggatcactgagccctgagcggtgattacatcactgtactccagcctgagtgatagagtgagatcctgtctcaaaaaaaaaaaaaaagtaggcaaagaccatgaatagacatttcgcgaaagaagacatacaaatggccaacaggtatgtgaaaaactgctcaacatgactaataaccacagtgagatatcatcttaacccagttagaatggctattattaaacaaaacatgctggcaaggatgtggagaaaagagaactcttgtacactgttggtggaaatgtaaattagtccagtcactatggaaaacagtaagatttctcaaaaaaaaaaaaaacaaatagaattaccattgatctagcagtctcattattgggtattgattcaaagacaaacagtatatcaaaggaataactgcagtcacattgttgcagcactattcacaatagccaagatatggaatcaacctgtctattaacgaacaaatagagtttttaaaaatgtagtatatacacaattgaatactatttggccataaggaaatgtcattcacatcaacattatgttaaacaagccaggcacaaaagataaatttcacatgttcccatttatatgtgggtgctaaaacagtatcatggaggtagagagtagaatgataaataaccggaggctggaaagtgagtgggtgtgaggggggaatgaagaaaggttgcttgatggatacaagcataaagttagatagaaggtgtaagttccattgttcgatacctgactattgtcaccttacaaattattgtatatttcaagcagctagaagagagaacttaaaatgttcccagcacatagaaatgatgaatacaaggtgatggataccccagataccctgacttgatcataacacattctatgcaggcatcaaaatatcacatataccccataaatatgtaaaatactatgtatcagtaagaaaaattgcatgttttcattcagtttccacagcagccctcaggtagctgtttttgtgttttatcccatgtacaactaatgcaagtggattagtttaagtgctcactctttcacacaggaagcagggtttttttctggcttaattttaaagaataaaacattacagataaattgaagttctcctatagtgccttttccaatcccattgcatcccaggcaacctctttaacaaacttcatatggatctggtccatatttttatactgagccaatacagtttagagtttggagtgtaagctctggattcatactgccaggaatacctttacaagttacttatcctctctgtgcctctcttggtacttacctaataaggttgatagcaaggattgagataatttttataaaacacgcgggatagtagctaacatttagaataagaagcactctgtattttgactcttgattgttattcttattacaactgtactatatattttatatgggttttaaaaaatttacagaggggtgattctatgaagttttggttcaacattagcatctcaagctcttcataatcctttttcctatttgttattgagccatatatttttaaatgtttgatctccagtgacagatacagtacctagcacataatagatagtctannnnnnnnnnnnnnnnnnnnnnnnnnnnnnnnnnnnnnnnnnnnnnnnnnnnnnnnnnnnnnnnnnnnnnnnnnnnnnnnnnnnnnnnnnnnnnnnnnnnnnnnnnnnnnnnnnnnnnnnnnnnnnnnnnnnnnnnnnnnnnnnnnnnnnnnnnnnnnnnnnnnnnnnnnnnnnnnnnnnnnnnnnnnnnnnnnnnnnnnnnnnnnnnnnnnnnnnnnnnnnnnnnnnnnnnnnnnnnnnnnnnnnnnnnnnnnnnnnnnnnnnnnnnnnnnnnnnnnnnnnnnnnnnnnnnnnnnnnnnnnnnnnnnnnnnnnnnnnnnnnnnnnnnnnnnnnnnnnnnnnnnnnnnnnnnnnnnnnnnnnnnnnnnnnnnnnnnnnnnnnnnnnnnnnnnnnnnnnnnnnnnnnnnnnnnnnnnnnnnnnnnnnnnnnnnnnnnnnnnnnnnnnnnnnnnnnnnnnnnnnnnnnnnnnnnnnnnnnnnnnnnnnnnnnnnnnnnnnnnnnnnnnnnnnnnnnnnnnnnnnnnnnnnnnnnnnnnnnnnnnnnnnnnnnnnnnnnnnnnnnnnnnnnnnnnnnnnnnnnnnnnnnnnnnnnnnnnnnnnnnnnnnnnnnnnnnnnnnnnnnnnnnnnnnnnnnnnnnnnnnnnnnnnnnnnnnnnnnnnnnnnnnnnnnnnnnnnnnnnnnnnnnnnnnnnnnnnnnnnnnnnnnnnnnnnnnnnnnnnnnnnnnnnnnnnnnnnnnnnnnnnnnnnnnnnnnnnnnnnnnnnnnnnnnnnnnnnnnnnnnnnnnnnnnnnnnnnnnnnnnnnnnnnnnnnnnnnnnnnnnnnnnnnnnnnnnnnnnnnnnnnnnnnnnnnnnnnnnnnnnnnnnnnnnnnnnnnnnnnnnnnnnnnnnnnnnnnnnnnnnnnnnnnnnnnnnnnnnnnnnnnnnnnnnnnnnnnnnnnnnnnnnnnnnnnnnnnnnnnnnnnnnnnnnnnnnnnnnnnnnnnnnnnnnnnnnnnnnnnnnnnnnnnnnnnnnnnnnnnnnnnnnnnnnnnnnnnnnnnnnnnnnnnnnnnnnnnnnnnnnnnnnnnnnnnnnnnnnnnnnnnnnnnnnnnnnnnnnnnnnnnnnnnnnnnnnnnnnnnnnnnnnnnnnnnnnnnnnnnnnnnnnnnnnnnnnnnnnnnnnnnnnnnnnnnnnnnnnnnnnnnnnnnnnnnnnnnnnnnnnnnnnnnnnnnnnnnnnnnnnnnnnnnnnnnnnnnnnnnnnnnnnnnnnnnnnnnnnnnnnnnnnnnnnnnnnnnnnnnnnnnnnnnnnnnnnnnnnnnnnnnnnnnnnnnnnnnnnnnnnnnnnnnnnnnnnnnnnnnnnnnnnnnnnnnnnnnnnnnnnnnnnnnnnnnnnnnnnnnnnnnnnnnnnnnnnnnnnnnnnnnnnnnnnnnnnnnnnnnnnnnnnnnnnnnnnnnnnnnnnnnnnnnnnnnnnnnnnnnnnnnnnnnnnnnnnnnnnnnnnnnnnnnnnnnnnnnnnnnnnnnnnnnnnnnnnnnnnnnnnnnnnnnnnnnnnnnnnnnnnnnnnnnnnnnnnnnnnnnnnnnnnnnnnnnnnnnnnnnnnnnnnnnnnnnnnnnnnnnnnnnnnnnnnnnnnnnnnnnnnnnnnnnnnnnnnnnnnnnnnnnnnnnnnnnnnnnnnnnnnnnnnnnnnnnnnnnnnnnnnnnnnnnnnnnnnnnnnnnnnnnnnnnnnnnnnnnnnnnnnnnnnnnnnnnnnnnnnnnnnnnnnnnnnnnnnnnnnnnnnnnnnnnnnnnnnnnnnnnnnnnnnnnnnnnnnnnnnnnnnnnnnnnnnnnnnnnnnnnnnnnnnnnnnnnnnnnnnnnnnnnnnnnnnnnnnnnnnnnnnnnnnnnnnnnnnnnnnnnnnnnnnnnnnnnnnnnnnnnnnnnnnnnnnnnnnnnnnnnnnnnnnnnnnnnnnnnnnnnnnnnnnnnnnnnnnnnnnnnnnnnnnnnnnnnnnnnnnnnnnnnttgtggttctcaaattttaatttttggttcttctgaattataatgccatttacctatattattgatggaattaaaatatatgtagcctcgttgataaatatctttaaatttattttggttttaaagaattagattgaattaaacataagatgttgtctcatgccattaagcagaaagtgatttttttttttacaatttcaatatctacattttaaaaaattgataacataattttacatattttggggggtacactatgtataatgatcaaatcagggtaattgagatagccatcacttcaaatactgtgtgcatcagagttgcctgaggcacatgttgaaaattcaccttactcatccctaaaaatctctctacacacacagacacaaacacacacacacaaacacacccctatagtatagtggaattcattaggaaaagtgggggaggagtagtttgaagaagcatattaagtactgtgatgcagttttctaaggggaaagaatacctgttgttttcgtaatacaaactacagaaaaatatgttttttgttttgagacagagtctcgctctgtcacccaggctggagtgcagtggcgcaatcttggctcactgcaagcaccgcctcccaggttcacgccattctcctgcctcagcctcccaagtagctgggactacaggtgcccaccaccacgcccagctaattttttgtttttttagtagagacggggtttcaccgtgttagccaggatagcctcaatctcctgacctcgtgagcctcccaaagtgctgggattaccgatgtgagccaccacgcctggccagcttatttttaagcatttgacaaaatattgttaaatatattgagaaacacatgggtagaacatagtaccactctaataacttacagtcagagctcaaacaatgcccataatatatcctttttctttaaaaaattgccctttttctcactttaatgtaatttttttttcatattcctggtgtgtagggtacaagttaatattttgggggaagtatgactgctaagacattaagacttaaaactatacaccgtgaacaggacacaagcatgaatggaagcagatagtagaggccatatgaagttaaaacgagtagcatttcagacatttaatctggttctgagccaagataacttgttaagtaatagcaattaggaggtacgactccactgggcctctttttcagggcatgaaataatcttttattcataattcttttgatactcctatatgataatctaggtagacagcaacattttagagattaaactggcacaagaaagttaaataagtttcctaaggatacacacagcatattagtagggctgagtctaagtagatgcagtaggctcagacgagcaaaatcttttagtcaccagtttgttttttgagtataagttgaaatattaacactgtatactaaaacttaatgatccttgctaaaattacctcttggtcagcatatatatctgatcgagatcattagacaagacttcatctaagtcagtctggggagaaaagtcgttttttagcaccttgttcccttgatggtaaagattatgatgcccaagatagaatcttcttcttttcttgtgctatcaggatttccagcaaagtgttactgtggtcctctttcaagacgagaataccttagtctcagcaggagctgtggatgggtaagagtctatttcttttttcttccgacgagatcttttttatgagattgtgatgaggcagtcacatagtctcattataattgaatgtgtgtgctttcaactgtcaacatagcaagtaccccaactgaggaaaggagctatagatcacattggaaaatacctagttgaaggactcttgctggataattaaatgaaagaatacatgtgtcacgcttagcacattgtctagcacataagagcagtggtagctgctgttgctatcttagaaaagaagctggctgggtagcttgcttgccttatgcaatataatttagtcactaattctcattttgaagagtaaaatttctgttactttgggttttgtctttttcaggtttaagaatatcctaaaagaagaaatctgattctggggatgtaattgacatttctgggagtaatctaactagattgatgatagtaaggtctaatgactttcacatacctgtcatccatgattagtctgaattcttggcttccaaataagtctgctctgtgatgcttgttgattgtgttgtagaatattaattctatgcaaatggagactctttctttttaagtttccttcctattatatctctcaaggcatccttctcttaaaatttttaatttaaaagatgatggcttaccaaactaggatttccattgtgtcctctgggcactaaaaccctctgaaccaaattctcaggcaggaatgaaggattatctaaaggttattagttctgcttgtgaatgactgtgaaagcttgctctgtttgtttccaagaatactgtcatttcatagcaggtctgtgttttcaagttacctttatactagaagtagaggattaagacaattatctcaatagatgaaatgaaaaaatactttatttcacagaacaatttgtttagattatttaaagagttatgtatggagatataaccacagggacagaacttgctacttatgatatcaaaaatatatgcagaatattaaaggcttaggaagtgtattttctaaaaacaatggaacaattactatcggcactcaaccttcatcttccttttccgttctcttagagtaaactccagtaacccatcactgggtcaaatcacatctgtttccgttctgtcagaattataagcctgatattggagacaacagtataagatactttaatttgtttcccaatgaaatatccttactgtacctagttaatgtgccagaggagttagattaaaagtcatttcacatttagtgtagttgaagttgtttggggttggaagaaggtctacaaaatatttatttgccttggtttttaggataatcaaagtatgggatttacgtaagaattatactgcttatcgacaagaacccatagcatccaagtctttcctgtacccaggtagcagcactcgaaaacttggtaagcctttaataggtcttttgggggagataagagtttttgtttaaaaaaaaaaaaaaaggctaatttccagtaacattgatatgaaaaattctaatatgtgaagttcaaaagataaaaactcagaagaatgtttttggtttgtgtatattttggggacaaagaattctgatgatgattcttatgaaatgatctatttttgtctctacattttaacctcagatctactcaccatcatcaggacgtgctaacttaagtttcctttttccaggatattcaagtctgattttggattccactggctctactttatttgctaattgcacagacgataacatctacatgtttaatatgactgggttgaagacttctccaggtaagatattagtcattcaaattctcttaccaggaaagcattatgggctttttttggtaatgataatttaatgggctttcttctaaactgaacttattaagccatatgaggactttggcatctttgattacatccagtgataatttcataagtgtacattccttgtgatgatttcataagttagctgaattgtgctttacatggtgactttattttaatagagagtatctcctgaaattatgccctttggcctatatttagaattctctcaattttttatttaataagctgtggagtagataaagtgcttctgctcagcttttttcctctttaggggctgctggttaaaattagggggctgaaattttcatacccccaaaatagtttcagcctatctcagccttctccttaatgttagaggcccttttatttctagatgttttccccagcctcaccttttttttttcctcaaaactttaaaaatagaatctgatacttaaaactaataaataaatgatagttttaaaaagaaaacccaagtttctcaagcatgctttcctcttttttttaatcctctcccctccctcttccaaatcaccagcctcaggcatgctttaagagagttatttgggttacattatttttaagaacatcaatttcttaagcaacatcttagtagcctggttattcctcatctatagatctttcaaaaacactttgaattccataaccaatcctcagagttacccagtttccactaaagtaaaaagtgctgataaacaagaaatctcaagtacagaacttgttttattttatttatagatagatgtagatatagatataaatttttttttttttttgagacggagtttcactctgttgcccaggctggagtgcagtggttcgatctcggctcactgcaccctccgcctcctgggttcaagcaattctcctgcctcagcctcccaagtagctgggattacaggcgcccgccaccatgcctggctaatttttgtatttttagtaaaggcagggtttcaccttgttggtcaggctggtctcgaactcctgacctcatgatccacccacctcagcctcccaaagtgctgggattacaggcgtgagccaccatgcccggcccagaacttgtcattttagctgagatcttacagaattttccaaagatcaccccaagcaatcttattaggactttagtatcggtggcagcatcatagtctgcatttctgatactttgcactgggtctagttttctctaaacaggagcaatagtatttagaaaagggaagaggtgtttcttttgctattttccttaatggaatctgagcttggagagctgctaatttagttagtcaaataaaatagacttttcaacatctttccttgaaagataaagcgtgatcctgattatattatcagatgtacaagagctctttctatataatttttgctacagtgtggcactgaaaaggtccttgagtttagtgtcctgctgtccaacacttcgctaataatttagtaaaccttttctgtgcttctatttaatttcatttgcgcagatggatagataggtagataggttaatagatcgatttattccttaaaaattgaatgacagctggccatggtggctcacacctataaacccaagccgaggctggcagatcacttgagcccaggagttcgagaccagcctgggcaacatggtgaaacctcatcttgacaaaaagatgcaaaaaattagctggatgtggtggcatgcacctgtagtcctgctacttggaaggctgaggtaggaggattgtttgagcctgggaggtttgagtcttcagtgagccatgatcttgccactgcactccagcctgggtgacagagtaagaccctgtctcaaaaaaaaaaaactgaatgacaactgtgtgtgtgtgtgtgtgtaacgtcttgtaattacttgtccttttcaaaacttctgaatcgatcttggattcgatacttgatctaccatgctttgtattatggtgtttatatgttcataaggatgacttggttggaagtacttgaaaagcccagatcaccaaagcaagattaaattgagctcattaaagccaacatacattttaggaggatttttagcaaggtttaaacatttacagtgcatatcataccagcctttcttagaccagcagagggcaataaatacttacaggtgtagtgggaaattcaggctagagttttccattcatagttgagagttgaggaagattaaaaattacagttttagaacaatgttcagaataaaggagcttgtttattttgcagtgataataggtgtatacaaattgattcatatcctgcctcactttcacagtaaaaatgtctgatgtgaggagtatttgctatgcctgcatagctttttcctttaaagctataaatacaaagttcttttccagctttattctagaaaatggaagagattcctgtgagcacttatgggaagctgttaagtcccctactaatacttttctctctggagtgtgattgttttttcctgcctaaaggtatccttaaattctccaataattgagatttttctcttgtatttcctagtagtgttctgatgtcagaggcctcaggttttgaccttcttaggatagaagaacctgttaagaacatatgctagattgggttacctgcccttttgccattgagagtgagaaggctaaacctaatctagtgccttacatataaacagtttactccactagctcttccaccattcagtctactcaaagtgctggattaaaatgattctcacatcccacataagctattagtaagttttaaccagaactcaaatgatacttttcactgattttttttttccttttcatggaacaaatgtttgaggatctactctgttcaaagcactataaagtctagtgaggaaaaagtaagatataaaatttatcctcaagaggcctgaagtctaaggggaaattagatgaatatattatgcagtggaaaaaatcctaccctgggctggagagagagggtcttataaaggcattttactgcaagttggacattggctggattctttttttaaggaatgttttccctccaatttttttctcttgatattgccattttcgtaccaagtactcagactgagttcatgagattggatctaatataaagcttccttctagggttttgtttttctgccaatgtctagttcccttgtatttgatggataaagctagatcatctgcttcaataggcaatacagtgataaaacttgttagaatatatatgctgtctatatccatttgaccactagaaataacaagagccaagtaatttggtttttttcctctggcagtggctattttcaatggacaccagaactctaccttttatgtaaaatccagccttagtccagatgaccagtttttagtcagtggctcaagtgatgaagctgcctacatatggaaggtaagttgctaaacttcacccacaagtgttagactgaagtattcttgcaaatatttgttctgtccaatatgagataagtttaatgtaaccacgtgctatactattcctgcatcagatatttagtaaaggttgctcttggctcttaatatagctgaaaccttactctactacagaatgtatgacactttcagggccatagcttgtcagaaattgacaatttgtatcctctgtttcaaaaattattaggaaattgagaattcagagggtgataagaaccttaactactttgtcctgcatcctggaaaacatgctatactgactttctgccctatgttttcaaactctcgttcagaatacagtattttgatccctaggatcctgtgcttgaatcacccatggagccttgcacaaaacagaaactcaaaaatatttttatgattaatttattctttattctctccttacaagtagctgatcttcaggccactaaagtagatatggctgctttatcagatttttatatatttaatagcattatttactaatcttttttttttttttttttattgagatggagtctcactctgtcgcacaggctggagtgcagtggcacgatcttggctcactgcaagctccgcctcccaggttcacgccattctcctgcctcagcctcccgaataactgggactacaggtgcctgccaccacgcccggctaatttcttttgtatttttagtagagacggggtttcaccatgttagccaggatggtctcgatctcctgacctcgtgatccgcccaacttggcctcccaaagtgctgggattacaggcatgagccaccatgcctggccaataatcttttaaataacttttttaataacagtagttctaaagtgtctactgtaagctaagaaatttaaagctgtccatttgaagtccagtggagaaaataaaaatgttagacaacaggtagcacttgcttattactgaaaaatgtctcttgaaggaataattaattatggaaatgttctgggaattcagagaatgatcattaaggcattgtttacccatgactaagaattaattatcttctagatttccctgtaacttcataaatgtctttgacattggtgaattgaatgattagagttcacatattttgggttttaaagtcataatgtctaaaacttcatagatcccatagttccgatagtatcaaatcccttctcaagagaaagttatatcattttttatcctgccaagctctagaaagtaatattgctaattttttttaggacaggggtaaaacctgtttagtatgaagcataattcttcagcttaatttcttccaatcctgagggaagtacaaaagaaaagtgatttctatataactggagttgcgaaaatgcaacactactttattaaaattttactaacaatatcctaaatagtcacagggtggaaatattgctctatccaagatgcttctatgttgggcctgcctttttctacaagcatatttctttcttttgttatatttttaaatgcctataaagtatatacttgactccatcacaagatggagtttcctctttataatattcttcttacttgagattttaagtttaacaatgttatgtcgctggcactaatgctctgtcttatatttaaaattttcagtttcaaatttggtcttaatgcttattttgctacctttttcctttcttctttgctcactgtcttgcctatgtttccttctccactttggctcccaacttaactagaggattttattcctaccacaggtctgtatcttttaaggtttgtttcttgttaaaaaaaaaatttttttttccaacatcacaaaaagcatataagaataattcaaaaaatacttatgtattgatcattcttgttaaattattaagttttaattataggtacataattatgtatacaattacatgtgtgttgtatagtttcttgatagtttttaaattcttaataaatttttaaattatatatatacataattatgtgtataattatatattatgtgtatcttgtgtaaagttttcttgacaattgttaaagttccttcctcttctctagtgcaaaggcctttttaaaattttgtttcagggaatgaaggttgtgggaatacttgcctttaaagatatacactaaatatagttggccattgtttctaagccattttcagacaaccaatcagtgtctaccacatacaagggttacccttttttaattcctaggctgggtcacatgtcagtgttgaatgacgtggttcagacgtgatgttcttctgcctgtccacacataactcggtgtacaggctctgatatttgagatcctggcaagcttgcacctcctaaatttgaatttgcctagtgaggtggctcagtttctcttttccatgattaaaaaaaggaggagtggtattttaagagcaattccattcaagctgagtatccaggctgttagattgctcttctacgtgttcaaaaagtcagaattctcttaagtattagaattttttctatgctaaaaagccaaaagcccatgggcacaagaaaacaaaatagaagggagttttgtatcttaagacagaagagaatggcctcttaatcctcactactgcccagcaaagaggaaatataatatattcgggctgatattgaggcccaagacttaaaaagatttaatattataccttttctttttaatttcctaactattgtctcacccccaccccatcctcttttctctggtttgtttctgatatagccactgaatagcatcgaagtggttataaataaactgatttggcatagtcattctaccactgactggtgaaacgttgagcctgacactttaggaagtgtaaatgatctcatggcagaaataaagattagacttggtttccaactgggcagagaagagattttgtgaggaaaagtgctgatattctttgtatgtttcagtacacaaaataactttatgacatctgtaagttagagccacttacttctagaggtaccttcttagttctaggagatttaactttgggattccttgtgccttgaattaaagtctttattttacaaaaagtagaatatgtaagagaggacagtcttctgtgtctgagcatctccaaaatgcatggatataaatgtctcttagacttaatagtcgccttcctacttaaaagggaaaggaagctttaaaaaatgaagttacgtaattatgatagtgttcttataataatgtagggacaataaataaaaatttatttgaataaaaatgaaggatttaaaagccacctgaatctcattagaaggaatgaatctttcttgaagtagtcatactataccctaggatagtcctaaactatcaaagcataaaagttcataaaaacgtgttagacattagtttctcattttaacccataacacgcccttcctcccatttttccttattcagatagaattcatataacatataattcaccattttagtcattttaaagtttacaatggagtagttactattgtaatcacagtgttgtaccaacatcaccactatctaattcccaaacatcatcacaccagaaaaaaacccgtgtcctttaacagtcactctctaatcccctcttcctccccaacacctgctaaactacattcagtctctatggatttgctattctagacatttcatataaatggaatcatacaaaatcagcattttgtgtgtgacgtcttttacttagcataatatcgaggttcatccatgttatagcatgtgtcagtacttactcctttttatgactgaataatatgccattgtgtggatagaccacattttgtttattcattcatcagttgatggacatttgagctgtttccattttttgacatgaataaagctgctgtgaacatttgtgtataagttcttgtttaacataggtttttaattctcctgggagtgtaggaacagaattcgattcctaagaatagaattgctgggtcatataattgtttaactttctgaggaaacttccccccacttttaatgctatgtaaagtgcctggcttagacttttactgtcgtcattgataccttgttaacgtattccaaaatgtttttctaatgggtctctttcttttttctctgaaaccctatagataaatgcaaaaatgtgcatatattctattggtgggtatttagggggttttttgaaacttattttaacccttggtgtacacatttaggttctcctaggtattataatacagaaactgagaaaggaccaatatcatgaaattaaaagctataggcaataagcagggtgaatcaatggaagacaataatgtatttctaccagggatgctcagtaggacttgaggatttcctctcccttctaatttgctgctaccagacctgtttggaccttgggtgaagagaaacttaatcgactggggccatcccaaacagaggaggaaaggaaaatttctgtgactactgggatagttagagacgatcttcaaagtcttttctaaaatatgttacattgtgaaagaatgaattatctctgtgccattgtaggagtaggcagtaagtgagattcctgtagatgtggaaaaagcttcctttctgataaattttaattaactctgcaagacaagttagactctgctctttgtcttcttttgcttttttaattattgcatatgtaccatttaagccaagagaggagtattaatgattgagttgaataaccttatcagtcagtgtgtcagatctcttaaccataatctgggggaatctattaagtttacttagtcattctcacaaataatcattccagagtcacctccactttcttcatacaaatgagccatgattcagagcctcaggaaaatgaaaagagaataacttctctcagccccaacctccttgctcttttgaaacacacatgctaataatagttatgtgtgtttgtactcgttattgtgctgattaattcccatggcctatgaaagagattgacatctcttgaatgagtcagctgtatgatgctgtcaaatgtacataactggtggcatctgatgatggaaaaatatgattcttagtcacatgtacaggacagtacaatgtgacccttctttctgcattaaaatatattaaaatgcgagtgacacttacttgaaaattcaaaacttctctcagaaaattaactgaaatatagttttagaggaaaaaaatgtttttcagaaaggataccaaagtgccatgtaaaatatagtttataccccttcagaatgaaggttatccaactcaaaatgaaggagtataactttgggttttgtaaaagttagtgaccagctctgttgggacaagaggacggtcttcttttggaaggaagaccatcatcttgtccgaagagagctggtagcatgtttcagaaatcttcaggtttcacagttaatttagtgttcctagaagtagctgactagggatctgaagatgtatatgctgtgtaaaaacaggactgagttgtcgagttgactacttaaggatggataacatccttccagaaagtttaccacctaaggaataagggacaatgccagtcttgaattttagtcaaaatatatatggctaggttgtcctgatatgaaataaggactatccttgtgtgtaagctcatgttatttacttattttgactgttttcattgtgttttctcagattagtaacagaaatatttcattgcccattggaaatctgttgtttttttttcctaactatagctaggcaggtctagtggcctttggtaacaatcctaaagctctctaagacacacttctgaattcaaaggcctctatctgggaaatctaatattgctttgctgacttgtttgtttttgattggactaggtctccacaccctggcaacctcctactgtgctcctgggtcattctcaagaggtcacgtctgtgtgctggtgtccatctgacttcacaaaggtttgtaaatgaatctctatagttggtttaaaatgtagatcacaggtttgtaggtttttctaaggtttgttttgagaatgatataaatttttatgtttaagttgagattttaaagacctaaaggccatccaggatctatattcacattactcaggcatattctgcttttctctacccataccataatggtattatgccctgtgaaataaggatagatttctggttccctacagttatttctttcctaaatgtaggattaagttgttaacttaattaaaattttctattaaaatctaagataaaaatacaatctaaggtgagaactagtcttttttactttttagatattatcaatgtagtatattaaaggtaacatcttgacagcccaatttgggttttcacatatggctaacaaaatggtaactgtgaagtcttaacatgttaggttatctattgcttaaactatgtaagtaggtctgaaatgttttagatactccagaaagaagacaatatgcccaccttttaatttttttatagtgacactttaagaaacaaaaaaaccctaaaatgtagaaaggccagaaacattaaaaactatgtatctattggaattgcatataatagtagctcaagttccagtcattctcccaaaccccattgcctctggtctttgagttattctgggttctacaggaaatcttatttctgtggaggtctcccctttcacgtatgacgttttgaggttttgttgcctattgttcccatctgttttttatcttccagaaacttctcatggtctggtctatttgtggcatccctgctagcttccagtattgctgtggatttctccttagtgttaccatttgtgtgctcaacttcatggcagaccttttctttttttttaagtcattactttaatcacccaaaattacatattaatgatattttttcctcatgagattccatgtaatttcttttaacatggagggttgcatcttcatggcacttactaagttgaatgatttttgaattattcagttaattatgttatctttttttcaattgtcatatattatccttacccctatgcatctcaaacatcatatattaattatccttatttcctgtgctcaaaggaaatagcagggctgtttacctatactaatttattggctacttttttaagtcttaaaaataatttcatcccaagcctagaattaggaaagtaaaatatggtttgtgttgtttttgtgtttttaatgtctggcatttggaataggagaaagctgggtttaaattctagctcttccatttgattgtggttactttgggcaaataactttattcccattttgcatatgagattatttgagtacaaagcttttagagtgtgagaattaaataagataaagaatgtaaactaccagacacatagtaggtgctctgcaaataactattgttaataaactatagaagaactgtgagattccaaacatttcatattgaacagttaaatatgtgtatcttcttttggcctcccagtaaggaaaggaaaaagctgccagtctcttgggggccaagacttaagagaacatgtattctttttttctttctctttagtgactgaaatagagaaattatataaacaaatgctggggaacagctctggtaccagtggccatttgccacaagctcttcaagctggactttctctgccataaaaggcttgggaccaagatctagaatagtcagatatttttaaagggacaaaggttattttttaacttctttcagcctagggaacttgttgttttcccagattgctcctctacctatctgaaaaagaatctcaaaaggaatggtttccttctacttgtcacagcctactagagtcatgggccaagtctgatcttgcaaatggtgccattactttagcaatgtggcacaacatgcagaattcagaagaaagttgtagaaattgaatgttggtaacatatactgattgatcatttaacagaagagtaaaaagagtgtcttaactacatattttgtatttatacagaagatgataaagagccagaactttagattagataagaaatgaccagtaacaaaagacatactagtagaatgtatatgaagaataaactaaagagtcagctttgttggaaatctggaatgattcctgaaagcaagaaatggatgtacatgatctttaagatattattttctatatcctgtttattagacaaaataattatccagtcacaaggccttaagacacacctgttttttaatgtattttgaatcttgattgaaatttcttaattcccttcttggtactccctcttagattgctacctgttctgatgacaatacactaaaaatctggcgcttgaatagaggcttagaggagaaaccaggaggtgataaactttccacggtgggttgggcctctcagaagaaaaaagagtcaagacctggcctaggtaaggatatcatatactttccaagttttttatggtttgactagtttagtccgacagtacagagtaataagctagatttgatcttgctttggtatgtttttaaagaaaagcactatcttcttgccattcattctttttgataagtatttccgaagcactactatgtttatcatttacacaaggtactacagtggtggatttattcaacaaatatttcttgaacacccagtatgtgctgggccctgttcttagttgctagggattcagcaatgaacaaaagaataaaaaatcctgaagatgtaaatagagctaacatattagtgtgagaggcaataaacaagataaaaaagtaaaatatatactgtgtcaaataacaataagggcttaggaataaaggaaataggaaagggagaagggcaagggtgaaatatgctatcaaaattttatattaggtgaccaggggggcctcaatgaaaagatggcatttgagtaaagaaagtgaagtagtaagccatatagatattttaaagaagaatattccaggcagataaaagtacacaggccctaaagcaggagcatgcttggcatattttctcttcctcagagaggctagcatggctggcccctagggctgcagcaggcaaaggaaagggagggaatagtagtagaaaatgaaattctgtgagactttggcttttattttgatagacaaaagtccaccagagggtttggagcagaagagtatcataatttgacttttaacttgatcattcttgctcctgtgttgaggataaattgtaagggggtcagggtaaaagcaaaaagctacttttaaaaagccattgagataatccaggaagtgatgatggtgacttagaccagagtagtagcagaagctatggtgagaagtcatccaattttggatatatttacaagacagagccaacagaatatgttgagggatcagatgtggggctatatgggagagttatcaaggataacttcagagattttgcttaagaagctgaaaagatggagtgtcattaacctagataaatatccctgcaggaagagcaagtttgggagggaacagctggagttccatttggacatgttgtttgatatgattattaaacacccaaatggacatgtcagggaggcatttagatgtttaattctgcagttcagggttgaagttgcagatgtgaggttcattatcacacagggtgaagatagctatagatagaaaaaaataggcctggtgtcttggggtaccccgatgtttagaggttgaggaggtgacaaataccattaaagcctactgagcagccacaaccagagaagtaagagaaaaactgggagagtgttacatcctggaagccaagtaaataagaggagagagggatgaacttgatttgatgtttctggtataccaaataaggtgaggcctaaaaactgaccaatggattaggcaatcataggggttatttggtgaccttaatgagtgttgttttggtggtatgatggtggcctgattggtgtcattcatgtatatgacttggggactacaagtatagacagttctttcaaggagttttgttataaaggaaagaagagaagtgaagtggtagctggagaaagaagcagggttgaagtttgctggggtttttttaaataggaatataacatttcacagtgattggcaggatcgtatagagagggggagattgatgcaggggaatttgctggagcaatgttaagcatgaggggatactatctgatacacagtaggagggtaggcctttgccaggaacatggatagttgacccatagtaattggagaaaaggtggaatatataagcatggtgcaggtaggctactgagagatggtggggagagaggtggagagatgagatggccataacttacagaagcttccttctgttctgatgttaaaacatgaatcagggttattaactgcgaatgaggataagggagaaagggagtagagattttagaagagataagaaagtctgaaattgtcactgagagaatagaggaataaatggacaggaaaatatgattgttgggcttcaagagtcaacttgaggctagcaataattaattgaaagtgagcactccacatggttgtgtgtttgctatgcaagtacaagtatactataggtagagagctagatttaaccagggatgtggtttagcaatgcaagtgaagaaggaagttgacagtggatgcaaagaggatgattatgactataagatataaccttggtaaggaggcatattagtccattttcacactgctgataaagacatgtacaagacttggcaatttacaaaagaaagaggtttaatgacttacagttccacatgactggaaaggcctcacaatcatggcagaaggcaaggaggagcaagtcacattttacatggatggcggcaggcaaagagagagattgggcagagaaactcccccttataatattgtcagatctcatgagacttatttgctgtcacgagaacagcatgggaaagacctgcccccattattcaattacctcccaccaggtccctcccacaacacatgggaattcaagatgagattcaggtggggacacagccaaaccatatcaggagggaagtaaggacataatggggccaagggatagtgtaaatgtggtactagcagtggattgaggataaaagattgttggaattgaaatactaaagggagatgggaaaataagtggtgatgagtgggatgattgaaattaagataatggaagatttccaggtattggtaataataaggtaaagaataagtggcttaggagagtgaaaggacaagattatagaagaaggaggtcaaaaaactgagaaaccaaggtattggaaagatcatgtacatagattttttaatcaccataaattgacagataatgttgaagagagtaacaatgaaccaagagcaaaaatcttcaagcaatgagccacccacagtgtggatcctcagggtatcattagatgtgctgtatacttgtacttacatggtaaacacacaaccttgtggaatgctcactttcaattaattactgctagcctcaagttgactcttactggccaacaatcatatttccctgtccatttactcttatattctctcagtgactgtttcaaactgtcttatctttaagcttgagttttaagcttaaagattcattttacttcagccatcaaggcctaaggttaatggggaattgaaggtgagaaagggaaaatatacaggttcatttttctaaggacttatttagttgcttataagatgcagaactagacttcagaggagtcttttgctctaagtctggtttctgtagtctttgatggtgctgccttatttgtttttgctctttgctttttttaatttctttttttcttttctttttttttttttgagacaaagtctcactcttgtcgctgagcctggagtgcagtggcatgatctcagctcacttattcaagcaattctcctgcctcagcctcctgagtagctggaattacaggcgtgtgccaccatgcccagctaatttttgtatttttagtagagatggggtttcaccatgttggtcaggctggtctcgaactcctgacctcaggtgatccacccgcctcagcctcccaaagtgctgggattacaggcgtgagccaccgtgcccagccctaaaaattttttttcattaatttagtattacagtttaataagtcagctagttctacaacagtgaataagataaatagcagtccacagaccctctgcctcatagtttccctttcccagaggcaacctctttcaaatccttttgctgattctttgatatgtatgtctagacctctaaatagttttgtgcatttctatttattttctgcaattttcagctttattaacttctttcctttgtaacatgaggatttaactccctttcctgtgtcccaccactatcaaaccttcatactcctcatcctcctaacacagggtcatgattttggttaaatcaagatacagctcagttccttttagtatgcagttgtccctcaggatccatgggggattggatccaggaacccccaacagataccaaagtccacagaagctcagattcattatctatgatgtagtatttgcctataacctatgtacattttcccatatacttttatcatctctagattacttaaaatacctggtacagtataaatggtatattaatagttgttgtactatatcatttagggaataatgacaggaaagaaaagtctgcacatgtttagtacagacacaaccatcttttttcgtgtttttgttttaatattttcaatttgtagtcaactgaatgcatggctgtggaacccagtatacagaactcaagatatagagagtcaactatatttagagttatgtagtcattaatacaatctaattctagaatatcttcaacacctaaaatgagggttccaatttctcttatgttcttgtcaacatttgttattgtccatctttttcattatacccatcctagcaggtgtgaattagtgtcccattgtggttttgatttatattttcctgatggccagtgatgctgaacatcttttcatgtgcttattggccatttatatattttccttggtgaaatgtctatgcagatcttctgcccatattctaattgggttatttgtctttttattgttgagttgtaagcattctttatatattctggacataagtcccttatcatgtaatgatttgcaatgatttattctgtgggttgtgtttttactttcttgatggtgtctcttgacacatgtaactttataattttgatgaagttcagtttatctgttttttcctttgtcacttatgcttttgatgttaaatcaaagaaactattgcctcttctgaggtaacaaggatttactccaatgctttcttctagttttttagtttaggcctgtgattcgttttgagtttatttttgtgttatggtgtgagttaggcattcaaattttttacatatggatatttaactttctcaccatcacttgttaaagagactattctttagcccattgaatcgtcatggcacccttggtaaaaatctgccaaaaatcaattgaccataaatgtgagggtttatttctgacttctcaattccattgatctatgtatctgtccttattatggttctgcattgtcttcattactgtagctttgtagtaggttttgaaatcctacttctgttttcttcttttatttcaagattgtctcgactgttctgggtctcttttatacaaattttagtttcagcttgtcattgtttgcaaaatagccagctaggattttgataggaattgcagtgactgtgtagatcagttatggaagtattgacatcgtaataatgttaaatcttctggtccatgaacttggatgtctttctattgcctgtcgttatatgtacttttctctctctcattttagaaaatataaaagaaaagaatcatatgaggccattagagaatactgattttaaaaaaaagtcatcagtattccctccactttgacataattttaaatgacatttccagttattttttgaggtttttcccttatacatagagattctttttaacagaaccatagttgtactgaatacgcatttgatttctctcaagccatcctaccacttcagcctcccaatagctgggactacaggcatgcaccaccacgcctggataatttttgtattttttgtagagatggggtttcgccatgttgcccaggctgggctcaactatgagctcaagcaatccacccacctcagtctcccaaagtgctgggattacaggcatgagccactgcacccagccttaagtactttctatgttatcttttttgcaacactatttcaaatactacacttgagtaaatgttccataatttacctagctattctactgtagtttaaacatttgtttcaaatattttaaaacttggggttttttcctccctgaatttagggtcccccttcccattaaaataagattcccaaaggtggaattcttgtgttaatgactataccatttcttaaaatttgtgatgaaaagtatcttgcttttaactatgtacttttagtgtgccattaattatccttagtattagaagccaagtcaccaaaaaagttacatattgaccaaatgtgagttgtaataataacaacgtttagccactattgactcctagcataattattctaaggacctacttggattatctcatttaattatgaaaacaactgaaactgaaggtcaaggaagttagacttgcttaaaatctcatagctatgaagttgtagaaccagagtctataattgaacccttgcagtctgattctagaacacatgctcagaaccactctgcagcactgccttctttagaacctaacagagcaggctgggtgcggtggctcacgcctgtaatcccagcactttgggaggccgagtgggtggatcacgaggtcaggagatcgagaccatcctggctaacatggtgaaaccccgtctctactaaaaatacaaaaaaaattagccgggcatggtggcacacgcctgtagtcccagctactcgggaggctgaggcaggagaatggcgtgaacccgggaggcggagcttgcagtgagtggagatcacgccactgcactccagcctgagcgacagatcaaaactctgtctcaaaaaaaaaaaagaacctagcagagcaaggcaaaagttcaggttaagatcagagtaagagttatgcctagattactccatttctgggtgatgctagggttactctgaagagcactacgaagcaacaacctgacacgggttttcaaaggctggcacactgaccattcgactctctaagccagcttccagccacagatttgctgcttctaatcacattgccatcttgaaaatcatgttcccctgctttcccaagcttctaattgccacgccaacctttcattgctgtcctgggctgcttatcttcacttctggccctggcttgtaaaccccctcagttaacacattaattggaagggtttaagtgctaagacatagcctctttttctcctgccctacttttcccagccggcacctgcttcattgcttaccactctttccctatgttttagccagagatctcatagcactgttgaaaccaatagtcctcaatcttggctatgcatcatagctacttggggagcttttcaagtccgtgtatccccagtgattgattcaatgggactggacctgtatttttacaaagctccaaggaggtctgttatgtagcgaggattgagaacctctggtttaggcattattgagtgataaagttgattatccttatcctaaagagaaggaaaccctacctattctgcctcagttgcttgctgcagtctcacaagtcagcaggataattatagagtcaattttctgatccctagaacctcacctgtatccttgtcagcagtaatgaaacttaacgaacattgtttaataattccttactacgcactataggggcactgggcctaaagatgagtaaaccattattagctgccctcgaggctcacagtctagtctaggaggcagattcaaaaactatagcacacagccattagctgtgtaaacaaggggctctgagaacctacttcccctgtgagaggagagctctgtgggagaagaggaaagaagttgtgaattcttcacagtggagttaacattgtcatcagagccttgaaacatgagaagaatttctgcctggcaaaggaggagctgacttggcaagaaaaccacatgaacaaagaaatgtgacagtacacagcttgttcaggaagcaactagtagtgtcctgtaacgtgatcctagaatagcaaagtacatgataagactgaaaaggcaggctgaggccagatggcaaactcatatagaaagaagctggctgggcacggtggctcacgcctgtaatcccaatactttgggaggccgaggcaggcgcatcacctgaggtcaggagttcgggactagtcttgccaacatggcaaaaccccatctctactaaaaatacaaaattagctaggcatggtggcacacgcctgtaatcccagctactcgggaggctgaggcaggagaattgtttgaatccaggaggcaaaggttgcagtgagccgagatcatgccactgcactccagcctgggcgacaagacaagactccgtctcaaaaaacaaagaaagaagctgcaaactgttagtagactccgtataattcttcgaaggaactgactttaggaagcatttagggcaataactcagtctatgctaccatgtcatcaaatctcatatattgcttaaggtcaataaggagttagtccacttaagtagatgaagtactaaagaaaatggcatgccatatttaaatgtgtaggcccatataatggcatgctatgcacctgttaaaaataatgcaatgcatctatgtgtacttacatgaagagacgtaaaaataaaagagcaaatggcagaacatgtacagatatatatatagtataatccatttgtattttggggttttttaaggtctgatacatatatacctttgtatgtgctaaataggcacagagaaaattgcggaatgcacaagaatgtaaaagtgaaatgaaaaagttgaaaagaggatcctgtttccaccctcttcccctctgtactggttgaatttttttaccattaactttcatactgttataatgtagttactgtttaaaaaacatatacacacacttaaatttgacccagcatttgctaaccttcaaagctaacaaaatttctttgacccccatggaccacttcctctttcaccatgacatcctgaaggaagaggaaatgccccaactttccaacacatcaatttcataccagccttatcagtaaatactccagtgtgtgccatgcaagtttcagaaacctagatacctggtttgtccctgtcccagctcttccttcttccccaatcctgccttgttaatcggcatattataggactcataaaattttaggactttctgccctaaatgtacactttgacccacttaaatggaacagatgactgtggcagctgtgcagtgactattaacctgcaccgaggagtgcagcaaatgaaaacttccttttctgctgaaaaaaatagctgttatcaagctctagagcgttagtgtgagaaccataaccagaggtttcatgaataggtccctgttactaagtccttttcatggcatcttatgacaaaatggggtttttcagtaattatccttattaaaagagcagtatcattttggctggttctaaacatatggttgatgagaaaagtttaggcaaaagtcaatttgtagaatttctctctctcaaggcaagactgctttaggagtgaaaaacacagggtaaaaaaaggacaggataattaactgactaaagtgagtacttgccaatctttatttatgctaaaagagagattgcatttttatatcagcccatcctaaattcagctggatataaatgcaattaggtaattaaactgaattaaaaattatagttaacaattcaaaggctttgtgactgagaaataaataaatacccttgttatttgaagacaggaatgctatttcagcaatctagaaagctcagaaggaaattgagaaagtgttgtctgtggtagggcccgagagggaagaagcatgaagttcataaaaatttgcctgaagtacttgccattgtatgtaaacaaagggacaggtacacatacagaagtcctatttactaagtttgatttgatttacagagagcaagcactgagattctgaatgttttttgccttgtggaaaatagtagtcatttgtaaaataaagtgggaagccatgtgaggcctgataaccttaacaaataattgattgaatggcttcttgtgaaaagaaaaactatctcctttaacagatatagaatctgagtccaaagagataaagggttatgcccaagtcacatagtaagtgattgtgccaggttttagatctgtgcattcctgtttgagagcccctgtgcagtgcctttctgccctagcattgctcaacagtttatataagaatgctaatggcagcgttaaatgtgttgtagaatacctataccttagaatacattgtagctattaaaaatgataaatctgtattaatgtgggaaatgttcacaatatattaagaagcaggttattcctaattttaaaatggacaaagggcctgaatagacatttctcaaaagaagacatacaaatgcccaacaggtatatgaaaaactgctcagcatcaccaatcatcagggaaatgtaaatcaaaaccacaatgagatatcccctcacacctgttaggatagcttttatcaaaaagacaaaatgtaacaagtattggtaaggatgtggagaaaagggaacccttgtacactggtgggaatgtaaattagtatagccattaaggaaaacagaatggcagtttctcaaaaaattgaaaatagaactaccatatgatccagcaatttcacttttgggtatatatcaaaaaaagtgatcgcagtatgtggaagcgatacctgcactccaatgttcactgcagcactattcacgatagccaagatatggaatcacctaagtattcatcagataaagacaatatgatgtatatacacaatggactactattcagccttgaaaaagaagaaagttaatgtcatttgcaacaacagggatgaacctgaaagacattatgctaggagaaataagccagacagagaaagacaaatactgcatgatctcacttgtggaatcttaaaaagttgaactcataggagcagagagtagaataacgtactatgtacttgaaaattgctgagtagattttaaatgttcttaccacaaaaatatatgaagtgatgttagttggcttgatttaatcattctacaatgtatgcatgtatcaaaacatcacattatagcctatatacacaataaaaataaatttgcttgagataaaatattacgaaatagtatatatatagtgatctctccttttttaaaaaatttcaatagttttgggggaaccagtgatgtttgattacatggataggtactttagtggtgatttctgaaatttggtgcacccatcacccaagtggtgtacactgtaaccaatgtgtagtcttttatcccttacctccctcccaccttgagtccccaaagtccattgtatcattcttatgcctttgcgtcctcatagcttagctcccacttataagtgagaacatacgatgtttggttccattcttgagctacttcacttagaataatggtctccaggccaggcgcagtggctcatgcctgtaatcctagcactttgggaggccaaggcaggtggatcacctgaggtcaggaattcaagaccagcctggccaacatagtaaaacccccctctactaaaaatacaaaacttaggtgtggtggtgcatgcctgtagtcccagctacttgggaggctgagtcaggagaattgcttgaacctgggagatggaggttgaggttgtagcaagccaagatcgtgccactgcactccagcctgggtgacagagcgagactccgtctaaaaaaaaaaaaagataatggtctccaactccatcctggttcctgcaaatgccattatttcaattccattttatggctaagtagtattccctggtatatatatacaccacgttttctttatccacttgttgattgaagggcatttgggctggttccacatttttgcagttgcaaattatgttgctataaacatgcatgggcaagtgtttttttcatataataactttttttcctctgggtagatacccagtagtgggattgctggatcaaatggtagatctacttttagttctttacagaatctctgtactgttttccatagtggttgtactagtttacattcccaccagcagtgtaaaagtgttccctttccaccacatccaccccaatgatggccattcttgcaggagtaaggtggtattgcattgtggtttttatttacatttccctgattattagtgatgttgagcattttttcataagtttgatggccctgtgtatatcttttttttgagaattgtctattcatgtccttagcccactttttgatgggattatttggttttttttccttgctgattttaaaactggaaaagttcccttgtcccccttgcagggcgtgcgatgagggtgtggcttccttcttcaatgccccggtgctcagacctctacgggagcatacagatgggcaggctgtagggctccgaccccacagcagtgtctgggggtgaatgtttatagctcctgaagccccagtgggcgtgtgttacagtgtgctcttttagttttgctgtctataggcggcttgtgttaaccagctctattagacccctgccttatcgcaaggacagagggctttctgtatcccggggttcttgccttggtgtaccagaagactcggatcacatgtgggcttggagaatttgagtgcaaggttccactgagcagaagtagctttccgcggatgggggagccagaagggaaatggctttcccctggagttgggcccttggcggccccagttctcctccgactgccccgaccaaactgcatcattccaccggttgatgccctgctggcctgccggcctgcctatgcctgtcagtgtgctcttctgccagcgtgcttctcaacgtctgcttgacgaccagccacttgtgtctttctctgcccatgtgttcctcacaacatccagccaccatgtgttcctgctagggtcttgggggtttttataggcacaggatgggggcgtggcaggccaaggtggtcttgggaaatgcaacatttgggcaggaaatgcctgtcctcacctaggtctgtggggatggagccctagccagggatcacaccttcttctgcccaacacttcccttcccccattccgtatcatttaaagggaccatgctcttcccttcccagcactcccgtatcaatttttttgagttccttgtagattctggataatagtcctttgttggttgcatagattgtgaagactttctcccactctgtgggttctttgtttactttgctgattatttcttttgctgtgcagaagctttttcgtttaattaagtcccatctatttatctttgtttttcttgcatttgcttttgggttctttgtcatgaactctttgcctaggccatgtctagatgagtttttcccatgttatcttctagagtttttatggtttcaggtcttagatgtaagtctttggtccatctggagttgatttttgtataaggtgagagatgaggatccagtttcattctcctacatgaggcttgccagttatcccagcaccatgtgttgaatagggtgtcctttccccacctcatgtttttgtttgctttgttgaagattatttgtctgtaagctatttagttttatttctgggttctctgttctattgcattggtctatgtgcctatttttatacgagtaccgtgctatttgagtgactatagccttgtagtgtagtttgaagtcaggtaatgtgatgcctgcagatttgttctttttgcttagtcttgctttggctatgtgggctgttttttggttccatatgacttttcagattgttttttctagttctgtgaagaacgatgatggtattttgatgggaattgcattgaatttgtagattgcttttagcagtatagttattttcacagcattgattctacccatccttgagcgtaggttgtgtttttccatttgtttgtgtcatctgatttcttttagcagtgttttgtagttttccttgtagaggtcttttacttccttagttaggtatattcctaggttttgcagctattgtaaaaggggttgagttgttgatttgatttgcagcttgtttgctgttgctgtatagcagtactactgatttatgtacattgattttgtatcctgaaacctaacagaattcatttatcagatctaggagctttttggatgagtttttagggttttctaggtatacaatcatatcatttactaacagtgacaggttgacttcctctttaccaatttggatgccttttaatttctcttttctgactgactgtggctggctagggcttccactactatgttgaatagaagtggtgaaagtgggcatccttgtctttttccagttctcatggggaatgctttcaacttttccccgttcagtataacgttggctgtgggtttgtcatggatggcttttattaccttcaagtatgttccttctatgctgattttgctgagtgttttcatcataaagggatgctggattttgtcagatgttttttctgcttctattgaagtgatcatgtgttttcgtttgtttttctcttagagtttcgctcttgttgcccaggctggggtgcagtggtaccatctcagctcactgcaacctccaccacccaggttcaagggattctcctgcctcagcctcccaagtagctgagataccacatctggctaatttttgtatttttagatggggtttcaccatgttggccaggctggtctcaaactcctgacctcaagtgatctgccctcctcggcctcccaaagtgctgggattacaggcatgagccaccgcacccggcctgatttttgtttttaattctgtttatatggtgtatcacatgtattgacttgtgtatattaaactttccctgcatccctggtttgaaatccatttgatcatggtagattatctttttgatatactgttggatttggttagctagtattttgttgaggatttttgcatctatgttcatcagggatattggtctgtagttttcttttttgtcatgtcctttcctggttttggtattagagtgatactggcttcataggatgatttagggagtattccctctttctcttttggaatggtttcagtaagattggtaccagttcttctttgaatgtctgatagaattcagcagtgaatccatctggtcctggactttttcttcttggcaatttttttattaccatttcaatctaagtgcttgttattggtctgttcagagttcttatttcttcctggtttaatctaggagggttgtatatttccaggaatttatccatctcctctaggttttctagtttgtgagcacaaatgtgttcatagtagccttgaatgatcttttgtatttctgtggtattcgttgttaatatttcctgtttcatttctaattgaacttatttggatcttctctcttcttttcttggttaatctcactaatgggctatcaattttgtttatcttttcaaagaaccagctttttgtttcatttatcttttgtattgttgttgttgtttcatttttattaagttctactctggtctttgttatatctttcctcctcctgggtttgggtttggtttgttcttatttctctagttcttgaggtgtgaccttagattgtcaatttgtgctctttcagactttttgatgtaggcacttaatgctgtgaactttcctcttagcactgcttttgctgtatcttagaggttttgttaggttgtgtcacttttttcattcagttcaaagaatttttttaatttccagcttgattttgatttcattattgacccaaagatcattcaggagcggattatttaatgttgcatggttctaagaattccctttggagttgacttccaattttattccactatggtctgagagagtacttgatataattttgattttcttaaatttattgagacttgttttgtggcctatcatatggtctctatcttggagaatgttccatgaatgttctgatgaatagaatgtatattctgcagttgttgggtagaatattctgtaaatacctgttaagtccatttgttctagggtataagtccattgtttctatgttgacttactgtattgaagtcccccactatgagatgagattctatttttgtgtatttcaaggttttgctctaagatttagaactccttttagcagtttttgtaaactatgctggcttggtagtggcaaattctctcagcgtttgaaaaagactttcatcttttcttcatttatgaagcttagtttcactggatacaaaattcttggctgataattattttgtcagctaataattatttaataaggctaaagataagacctttatcccctctagcttgtagagtatctgctgttaatctgataggtttttcctttacaggttacctgatgcttttgcctcccagctcttaagattttttccttcatcttgactttagatagcctgatgactgtgtgtctaggtgatgatctttttgtgatgaatttcctgggtgttctttgagcttcttgtatttggatgtctagatctcgagcaaggccagagaagtttttattcttttgcctttgtctttgttgaattgggttaattcaagagccttgtctttgagctccaaaattctttcttctacttgtttggttctattgttaaaactttccagtgtattttgcatttctctaaatgtgtctttcatttccagaagtcatgattgttttttatttatgatatctatttctctggagatttttttcgtctacatcctgttttgttttatttttaaatttaagttggttttcatctttctctggtgcttccttgagtagcttaataattgaccttctaaattcttttctggcaattcaaagatttattattggtttggatccattgctggtaagctagtataatcttttaggggtggttatagaaccttgttttgtcatattacctgaattgtttttctggttccttctcgtttgggtggactatgtcagaagaaagatctgggactcaatgtgtgctgtttaaattcttttgtcccacagagtgatcccttggtgtggtgctctcccccttccctaggggtggggctttctgagagctggactgcagtgattgttattgctcttctgggtcgagccacccagcagagctactgggttctaggctggtactggagagtgtctgctaagagtcctgtgatgtgatctgtcttcaggtctgtatgccatggatactagcacctgctctaatggaggtggtaggaaaggagtgaagtggactgtgtgagagtacttggttgtagttttatttagtgtactggttgtcttgaatgctagttatactagcactgaagttattacatggacagactcaggacctctggttggccaagatgttacaggcagtagaattagctgttattttctgctttcttggagcagggttgttctgttgaattgctgtaatggcttgaattggttggcctccagccaggaggtggcactttcaagagagtatcaactgcagtagtatagcgggggatataagcttgccttacggtttcctggataggttttcgggcttctcaggcaatgagcagggccccacgagtttttgtcttttgtttacggctaccagggcggttagagaaagaccatctggtgggggcagggatagtgtgtctgagctcagactccttgggcagggcttgctgtggcctctgggcgatgggagtggtggttaacaggccaatggagttacgttctaagggagattatggctgcctctgctgcttcatacacatcaccagggaaataggggaaagccggcagtgacagaccacagccagcaaggccagtctcactcctgcagtgcttccccaacagccaacagaaccaaatttatatccatgcctccagtgcacagggtggagatcttgccctagactacaaaactccccgccgagaaagcaagcagggctgttaggccttgtccatctgcctgccacagcttctgtgctcatatctgcacttcctatttgtcccatccccctgcagattctgcccaggaaaattcacgctcagttgaaatcattacaaagttcagctgaaagtctccttctccctatggtccttccccaattccattggctgccctctccaaagacccctgtgagatagtcagaaatggtttccctggggaccaggagtgcctacagggctcttcctgctgctgcttctacttttatattttgtttggctctctaaattcatttcagttctccttctcccatgatctggatcctcagtgaggatgtgtgcagaagtggactttacccctctcacactgttttttgtttgtttgtttgtttgtttgtttgttttgaaacggagtctcgctgtcaggcaggctggagtgcagtgcatgcgatcttggctcactgcaacttccacctcccaggttcaagcaactcttctgcctcagcctcctgagtagctgggactacaggtgcacaccaccatgcctggctaatttttgtatttttagtagagacagggtttcaccatgttggccaggctagtcttgaactcctgacctcaagtgatccacccacctcggcctcccatagtgctgggattacaggcatgagccaccacacccagccaccctctcacactttggaccttgagagcttgtttggaggttctagcaggggagcacatttactcgtatacccttgactgaagaccgattctcctcttatcaggaatggttgtcctcttcgaccaagcacacagcttcgggagccctctcacactttgggcactcaatttttctgctgtcttgtggattttgcagcagcaagccacttctttcaaaggatctgttaattcttttgttttttctggtatgttcctgcgatagttcttggagccaaagttcactatgtgagtctccacatgctgttctgtctgtctgagtggcaaattagtcctgcctcctatctgccactttccccttaaatcagtctcatttttgtaaagaaaaaagttgagatgtatagtatgtatcacatgcacaaatatagaaagtatgctaaacatggtttacgtaagtgctttaaattttttctctttatgtttttcggtattttgtcgatttttacaagtatatattttataatgggatagttgggaggttggtgacttggaaaagagaaaggaaaatgataaaagggtgtggttggaatcaagtgatgtatacctacttactggcaaattgacccttagatgattaggttagctatgatttttcttgatgagaatttagggactttgtatggctttcacttctgatcttcatgatcctctcctctttttcagtaacagtaacgagtagccagagtactcctgccaaagcccccagggtaaagtgcaatccatccaattcttccccgtcatccgcagcttgtgccccaagctgtgctggagacctccctcttccttcaaatactcctacgttctctattaaaacctctcctgccaaggcccggtctcccatcaacagaagaggctctgtctcctccgtctctcccaagccaccttcatctttcaagatgtcgattagaaactgggtgacccgaacaccttcctcatcaccacccatcactccacctgcttcggagaccaagatcatgtctccgagaaaagcccttattcctgtgagccagaagtcatcccaagcagaggcttgctctgagtctagaaatagagtaaagaggaggctagactcaagctgtctggagagtgtgaaacaaaagtgtgtgaagagttgtaactgtgtgactgagcttgatggccaagttgaaaatcttcatttggatctgtgctgccttgctggtaaccaggaagaccttagtaaggactctctaggtcctaccaaatcaagcaaaattgaaggagctggtaccagtatctcagagcctccgtctcctatcagtccgtatgcttcagaaagctgtggaacgctacctcttcctttgagaccttgtggagaagggtctgaaatggtaggcaaagagaatagttccccagagaataaaaactggttgttggccatggcagccaaacggaaggctgagaatccatctccacgaagtccgtcatcccagacacccaattccaggagacagagcggaaagaaattgccaagcccggtaagtcagcagtggtgggaagatacatttcctaacttaaaaggggccagacacccagatgtctcaagtcaggatgcttttttttttttttaaagaaagaaatctatttattcctagtgctgccaaattcagcacataaatacaaaacaaattttgcatgggccatatttttagtaaaaatgttttatgctaagaaactatttttgtttgtctgaaattcaaatgtaactgaatgtgctgtattttatctggcaactctacttactcccattaaaatccctcctgtcagggtccatactcctcagccctgttgcctgattgaccaaagccttcatcatgctccaggatatcaattcaaaaatatctcccctctcctgttagacagtatgccatcctctttttatagataaagctgttgttcatgggaaagttgccaacatccataagtagatttccagtttgtaattccattttgtgattatttaaaatacagtgaaacttagatacttacaaaacaatttgagtgcaaaatctttctagatttttatgacttctccacaatcttttataatcattttgccacaccacagtaatacttttgacacctatatctattctttttaacattcagtgtagtgtcacttatctttttaggactcatttcattgactgacttaatatttaaattagataatatcagtcatcagtgattgatggcagaaataggtttgtgaaccttgaaaaacaagattcattacagtggtggaggcagaagtagctgagtgcattgggtgagctatgggcaccagtcagagagaataaaaagcttctgttgtttgcatgtgaaggggagatgggttaaggaagtttccactgtacttcacagtagctcttgtggtggcgggatgattgaaatagaatccagaatcatgatcagcatcatctgccattttaaagggcagaagctagataaccaaccttaggccagttttagtttaaaaagtgttcataaccccgacctgctctcatgaagacctatcccataattttagaaaaataaactgatagattttaaagacaacttagtacacaaactgcaatcaagaccttgctgtagaaagtggagaaaaaagacagttataaggaatctttccttctctcaaaattatgactgctctttatccctagccaaaatttctattttttttttcaagggagctggtctcagctatgtgttagcagaaaagtagtttcaatgaaaaactattttcactgatacataaatcttaaaatctttaaaaagtagaaacagtgtgctggtcttgtaatttatttgaagctaacatttcttaaaaattttttacctttatatgatgataatgtcaaccttcagaagagagtaacatcttccatttgaatacctatcttgtttataaattgggggggctgatttattcatttatttcaaaaaggatagtaattgtaacttatttgtttcttattaggagacttagctagtaaatgttttctattcacataagaagtctatgccttctttccctacatatcatctgttaagtttttactatagtcagtacaaatcagccaaaagagacattgccattgaaagtatttggagctgaaagcaggctaaacaatgaaatttctggcagcctaatttaaggtatgccttagtaataacttagtaacagttgaacttcaaggaaatctctgaaatctaaactttcttcttctaggtcaccatcacgcccagctccatgaggaaaatctgcacatacttccatagaaagtcccaggaggacttctgtggtcctgaacactcaacagaattatagattctaatctgagtgagttactgagctttggtccactaaaacaagctgagctttggtccactaaaacaagatgaaaaatacaagagtgactctataactctggtctttaagaaagctgccttttcatttttagacaaaatcttttcaacgctgaaatgtacctaatctggttctactaccataatgtatatgcagcttcccgaggatgaatgctgtgtttaaatttcataaagtaaatttgtcactctagcattttgaatgaatagtcttcactttttaaattattcatcttctctataataatgacatcccagttcatggaggcaaaaaacaagtttcttgttatcctgaaactttctatgctcagtggaaagtatctgccagccacagcatgaggcctgtgaaggctgactgagaaatcctctgctgaagacccctggttctgttctgcctccaacatgtataattttatttgaaatacataatcttttcactatgcttttgtggggttttttttaagtatgtgtaaaaatgtgatgctcagataagtacatttatatcagttcagtgttaaaatgcagtctcttgagttaaagtcatctttattttaaatgcagtgataaatgtcaactcttcggagaaactaggagaacaacaacagaaagctgtgtttgtcttttttctctcaaatatatctcccgtatgagatttcaggtccccatgttttcaccaagcaatctgctatgtcagccaacccaacatcactttctacaggaggttatgatttttgccatttactagaggaagatgttttatgaaatcaatttggggtttgaattcaggtgcagtcatcagttctttaggggctgcaatgttttaaaaaaaataagtcatcagattttaagaaaaaagtgatgatttcttattgatatttttgtaacagaatatagctcttaactgaaaatccagaaccagaaacataaatcttgagtttcttttcatgtacataaaaagcaatagccttttagtatagatagccctgagccaaaaagtaatagaattttctctagatatttaatacagagagtgtatagactgactctaagttaataatgtgcaaaatatcttaaacatccctccccttattcaacaattatgtatcagtgatcttgaaccattgttttatatttttcacctttgtaacctcatggaaagaggctttacatactttctatgtactatttacttagaagggagcccccttccagtcatgaaacttcatttgttttatccatatccctgaggactgtgtagactttatgtcagtttttgtcattatttgaaaatctattctgacaactttttaattcctttgatcttataagttaaagctgtaacaactgaaattgcatggatcaagtaagcatagttttatccagggagaaaaataaaaggaagccatagaattgctctggtcaaaaccaagcacaccatagccttaactgaatatttaggaaatctgcctaatctgcttatatttggtgtttgttttttgactgttgggctttgggaagatgttatttatgaccaatatctgccagtaacgctgtttatctcacttgctttgaaagccaatgggggaaaaaaatccatgaaaaaaaaaagattgataaagtagatgattttgtttgtatccctacccatctcctggcagccctactgagtgaaattgggatacatttggctgtcagaaattataccgagtctactgggtataacatgtctcacttggaaagctagtacttttaaatgggtgccaaaggtcaactgtaatgagataattatccctgcctgtgtccatgtcagactttgagctgatcctgaataataaagccttttaccttatctgatgtccttttctgagctttttgcattacctagaagcagtctacaaaaaagaactatagtagtcaagaatcccttctacttgttcattaaaatgtttattcccaaagttataatctatttcaagctgaaagagcttttaataaaaaacatcttgcttggatcagactttgagcatttaagatggcttggattacttgataaagcagggtggagtgatgtagttctttttctaaacaagtatttccagcacaaacttttccatttgaatacattccaagcactattgctaggatcccgtattagagtttgcttttggctgtttcaacacgggcccttaattaaattttgtgaggatgactgattagtgtcttcaaatgtctcttcatctggactgcacatttaactgatgttggatcaagaccatgtgtagctactcttgtgttgagggtcagcccattatccccatccccagccctaacagcttaaaacagctttaactcccatcttgaaattagcctatggccatgttcataacataggtagtgtgtgggttcaacaaatgctttttgagagcctgtcatagccaacacactactgctcttaagtctgtttttctgcttttcctagtccctagttccttttacattgctcttaaagcaaaggccaagtagtctaacagagaaaaataaattccacaactaagatagtgtgggcaacattttacaaatgtgtgtcagaagacagactgagtgaaaacattgtactagaaaaactgagttaatttcctccctatggcaattcaacacaagtggtttctgcttcataattccataaagggctaaatgtaggcccagttgagctcttgcattagatctcattgcttctcacacaggtcttcacagggaattctttgcctgccctaggtttggatcatgccacattaccaattaacccattactcataaaattctcagggattatggtaaaaaaattggattatgcatcagttctttagatattggttggaagttataggcaggctgaacacattttgttggacttgagttaagtttaatgctttgatgcctggaatacgaccccagcttgttataagttaaccattttgttccctaaagtggtagcaaaacctgttttatttctgagctgtgtttgagtgcaagctaaaaagtgtaggggttgttaagaaatgatataagataaattcagcctttaaaaaagaaatcacctgagcatattaagcagcttgtttatattggtatgcctgcagcaagcatatacatcacaaatgagagatattgtgttattaaagaataggcttacttgatccccaaagttcatcccttgctaagccaggaaagaggatttttagggtatgcaaccaggttcttcactttgaatgtaaaaggtttaatattccatttgtactccatttctctttaatttccttaacttgccacatgcccctttgttttgacattctgaatagtttatattcaagccattttgtgaaatatgaatagcacatttcaaaatgcctttgattggaaggcgtttaagtcagccaacatttacatatcacctgggtgccaagccctgtgtgtgaggcacctggtctgcaaagagttcctttctttattttcagttgccaaaggagtcactttaatacttcagtaggccagagtcagcatttgagagaaacagcaaagatcagatttcaagtcctttgagtaaagttgtttgtaatcagctattatgtagcaagtactgtctagaagcctacttttcctccaggaacttaattcagcagctgcttagaacttttaacttctcaaagtaaaatactttttggatacatgtttttattatattccttataaggttataaataatggttgaaaacatgatccctagtgccacactgtctagctttaaatccaagccctaactgtgtccgtggacaagttacttaacccttctgtgaatgagtttcctaccttaaaatggaattatgtggggccggacacagtggcttatgcctgtaatcccagcactttgggaggccgaggcgggcagatcacaaggtcaggcaattgagaccaccctggccaacatggtgaaaccccatctctactaaaaatacaaaaattagctgggcttggtggttcacgcctgtaatcccagccactcgggaggctgaggcaggagaatcgcttgaaccagggagtcaagtggttgcagtgagccgagattgtgccactgcactccagcctgatgacagagcgagactccgtctaaaaaaaaaaaaaaaaaaaaggatttttgtggttattacatgtaaagctcttaggacagtgcctggcacataatacctaatgttttattaaacagttgctgttagctgttaagtatggagggcaagagttattatctatattcgatacatggacataaaagttcagctcattcctgttccctttccactaacagctgcagtctgcaaaggtcttcacaaatcagaatcaactggtaattaaaaaaaaaacaacaaaagcatgaatgttgcctggacctcccagtcccagcacttttcaaaaggagcaagtaggtctgtggggaaaaatcaagtttgaaattcatgactttgtctcgccaggtacacatgaaaattacggagattatttcatatgtggcctgtagccactgttcaaagagaccataatcttcaaatctatatcctgaactcttaaacaaaccaaagcctttgctcacacaaagcccaccctcccatttcctgactgctgcccccagctctgctacattgtttaagatgtgatcacctttagagaggaagctgcagctgctggtctttagagccaagagccaactcgtacttgcttgttgggctattgtgctctcttgcttatgagcagacaaataaaataggtaaagttcaaaacaagccatgttgctgtctgttagtagtaggatacaaaagaagattcaaacatttcattgaagtataatgaagactctagattctttgctctcacttgatgagattcttccccaggctactctgtttttgatgccaataaaacttgtcattctcacatcagtgtgaaaataccagccctgaaagttagcttgatatttgggtgtataaatccaacattggggtttcagctgtcatctaagcattgaatttatgctgccactgatgctattagggaccctagtttccaatttacaggaacttaaggaatgtggtatgcttttattagaagctggtatctgctcctgcaaatagtcctgccaccttgtatccccttcatgggtttgtgccagttatcaattcaaatgaatatgttaagagctgggttgtttttttcttgataacaaccttgcttacttctgaagtcaaggtctaaaagtaattatacaaatcaaccctttatcaatctattaccacatgatatatgttactgaaacaaaactaagccatctggccttgctatgttgacatggagttagcaaatattgttataccacgtcacttgataatcattcaggatgactgttaatttctctttcacctttcccccatcttctgcaatatattcaaacacaattttccaagaattatttgaaaagaagcataaggaggatttattaaatgtaactgaaataacttattagtggttcaggaactgagaagttaaaatccagtgggcattgttgcctctataagaggcaacattcagcccaaccgttaatgtcaagttggaaatgctgcttcctcaaaagccgttttggatttagacagttttatatgggagtaagagactcagagtccaaaaatcaatgtcttcacaaagaggaagacaagttaaaacgaacattaagatcttgagcgtgattatgataaacacttcccaactccctaattaggtaatgaggtattggccttggagtgctgcacctgtaattaagtatctggctttggaaaactctcctaaaaccaagaagtgtaagtgacagagtctgaagttatacacggaaagcctgcaggataaggaaaattataatgattaggaatagtttctgttccagtcaactctcctgtacaataaattgcacaaagagaggatgctgtttagagcagcttgttaatttgagttatcctgttgtgtcctcttgccttcctgtttacgttgacagcatttctaagcccatttatattctccctttttatgtcattttggccactggactcatttgagtagtgcatgaagccaggattgtgggtttcattcctaaatgggccaattcatttcactgtgtattctgtggccacaggcagcatctcacatgcctgcgctagccagccactccacaaagaggagtggacagagtttagacttagtataaacactagatggaaactcatagtaggtatcctcactacacaacctgaaggcattctcaatgctgcctgtctttcctcttcctgcctgaagaccaaatgtataaacctcttataatcaaagttgtagattgtttcatttagtgcacactcctatacccacttgtaaccctataaatgggtataattattatccccatttttttttcagataaggaaactaaaacacaagttaaataacttgcccaaggatatgtagcaagtggcagcttgtggatttggtctgactcaaagcccacagtcttaattcccatcctagagtgtctgtcccctggccctccccatcaatcaaatatgtgctttacattgtcagtatatttaaaagagaagaactctcaaaatacatttcctactagagtaatatatgaaaaaaatactattccttagaagaaaccattcttaactatagaaggaaggggatatgcaggactagaagctagaatcagtactgagagtgttagaggagcacaggaagaagactgatgaacacagtgataggaaaacaggaacaaaagcacagaagttaaaattagaaaaagtgaagaaaggctttcccccaaatatgacggcagagaatgaagataaagatacacatgccctatgacccaacgattccacccttctacccgagagaagctcacatgcactgggacacgtataaagatgtttgtggcagcatcgtttatgctagtgaaagactggaaataatccaaatgtccgcagtagaatggataaactatgagatactcataacaacagtatataacaatgagatggaaaagaatgaactagctacacaacaatgccaatgaatggttagaatgttgagcaaaagaagcaagaaagaggaatgtatacatacagtatgattgcatttagatcaagtgttaacagaagacaggaaatactagtattgagatatacacatgggtggtaaacagcaaaacaaaatcatgatttgattattataatgaaacagtagttccctctggagggtcgtgcttgggaagtaacatgaaggacttcctaggttatggcaaggttctgtctcttgccctggttagtgattatatgggtgtttgctctataattatatcttgcacttatgttttatacatttttctatgtatgttttatgattcatgatgtttttaaagggttttttttaaaaggaatgaagatcagatagttctctagagaagatagacaagaggtgggcattggggaggcctagatagacttgctaacagttcaaagggaataagctactggagtgagactgtgggtcttcttgatactttctaaggaaaacaggagaatcctctgttccctcaaagcagaaggataaactaagttgcctctccatgtactgtcaggattcagtatattcattcagtttaaaagaaaagaattgtccgttcagcaaagtgtgctgtggctcaagcatggggtttgggattttcatagctgggactgagccagaagacagcaaggggtggccaacagagggaggtcctgcagcgttgccagcactgcagcatttggcagcctgttaaagttccacatcatatgcatttcctcctttctccttcttccccagtcttgtattttctttctctcctcaaggtccaccatcaaatcaatgcagaaatggggcatagaaatcaaattcttattttaaagatacagagggtcgcaaagctagatagtggcagaatccgtgctggtatcctacagtttttgtacccagtcctcttgatctattagccattatcctcaatactttgctattctggtattttgaatattttgaatacctgaatactttgctattcaaaatgtttcctctgcctggaatagttttcccaccttatgactacctttaagcccccatttttaaagatccagttcaatccctccaccacttcctgtaggaattcttcacagattttcctaatatagcttccttccactcagccccatagtgtctggtttcaacactctgacagtgcttagcactttgtcttagaattatttctatatttcctccactagactagtctcctccatatccaactggtcttactcatctctctatacccagtattgtgctggaactggcttatactcatgacagccaattattaaatattcagggattttgtgagctgttaaagtgttagtagcctgatactcagtagtaaatactcagtcatggcaagagtatttacactatggaaggtacaaatcagggtcttttttatttttttgtggagagctagcttaccagcacatcactgcacataccctatcaccacctgcctgcccctgtgcttgctgtagtgcttggcatagtggttgtaagatgcatgaagaagaaaggcaaccagtgaaagtgcagatcaaaaggaaagagaattcaaatagcgtcagctcaggagcccagggaagagaagtttctgagaagtgggtgttcactgctgcagagaggttgatgaagataacttaaataaggctaaattaagcacatctttgtccttctcaagagctacttcagtaggatgatagatatgaaagatggctgggaatgaaaaaaatacaggtggctaggaaatgagcagtagatataaactcctttcaagacaagagaaggagtcttgttaaacagctatttgctgaacatctactatgtgtcaggcattgcattaaacaaagacaatacatgggcccatcctcatcttgctcctggactcacagggcagacaaacacaagaacacaatgataagtgctctgaaggcatgatctgggggctgttggagcacgttaaaatgagcctggggatcccaggaagtttgcatacagaagccaactctgagcttaactctggagaaaaacaaattttccagatatttaagtgaagaattatcctagcaaaggaaatcgcacaatagcatgaacagaggtttgaggacatgagaaagaatgtcctgtctggggaactctaagttattccagtttccctggtggctgcagcagagagaacatgtaaagaacagcaggagatgagactgtggaggcaagcaggggtagggcacaaaggcctggcattgccaccatactgagtttgggctttatcttgaggcactagacaactactgaatgaccaagcaggggacaagcacaatcagatttttattttagaaaagtggttctgtagtaatgtaaagggtagattgcaaaggaaccagacattaggcaggcaacccagttaggagatgtattagtctgttctcacactgctaataaagacatacccgagactgggtaatttataaaggaaagaggttcaattgactcacggttccacatgactgaggaggcctcacaatcatggcagaaggcaaatgaggagcaaggtcacgccttacatggcggcaggcaagacagcatatgcaagggaactcccctttataaaaccatcagatctcgtgagacttattaattatcacgagaacagcacaggaaagacccacccccatgattcatttacctcccactgggtctctcccacgtcatgtgggaattatgggagctacaattcaagatgagatttgcgtggggtcacagccaaaccatatcaggaggtgattgtagtgatccatgcagtaaggaaggtgggcctgaaacagaataatggtgcacatgagaggatgttactgatttgagagatgctcctgaaatggcaaactaaagtcttcttaggtggttatatgagagaggaacctgaaatgagtcccaggatcctggcaccagttagtgggtagatggtgtcctttggaggaatgggatatattaatagtagaaatgaccagattatgggaggaaattatttcccttgtagacacctgtgggacagccagtggagatgccctttaggtagttgtatgtacaggactagaactcaggagaggggtctggggtgggaagaatttaggagtattaggtgtgaaaagaatagttaaagtggagtttatagagaagattgtccagggagattgtagcacagcagttctcaaacttgagcaaacaccccaccagttttttgttttttgtttttatctggaggtctgtgctggggcctgaaaatgtgcatttctaacaagttcccaagcggtgctgatgctgctggtctagggaccacacttcggaaccattagtgtggagaaaggccagcatttaagggtgattagagaaagagctgacaggtgactgagaagctattttagggggagagagtccaggacagagtttcaaggagtaaaacagtaaagtcaagcaggatgaagcacaaataatgtcagttgcttttgatgatctggaaggtaagactggagccaagtggcagtgtcagggaatgggagagagcaagtgcagtttacatttccagagagtttggctgagaagtgagaagaacagacactgagagggtatggaggggttcatggtcaagaaaggacttgggtatgggaaacattagatcagttcatgggctaggagaaagcaggcgagaaaggaaggttttaaagacccagataacaatgaggggttaacaagggaagcaggaaggaaagggactttgccttaagcaggaggaggagccccacctgtgaggccagaggggccgctgaggatgccaggaaaggccagaagaatctaggagggtttggaagaataggtaccctgcaccaagtttataatgtttgtaggcagaagggaaggagccagccagaggcagggcccatgctatgggagaggtgaagcagtagttcagggtcccagaaatggaggcttgggagggatggcatcaggaacagagattggcaaagagatattttagagagtgcccaaaaacgcagttggagttatcacagtgttatgtataatcttggaaatatagacacagtttatgtgtttgtgttccccacagagacagtgccccaaaaagggtatctttccgtgtttggtgctacagaccctatacacaaccccaagagtgcatctctcacagtgcgggttttattcaatggccatggaatttaagaagtgggagtttgactcataaaacaatttatcagtttgtgagagctggaaagtcacagatacaggttatatatatatatatatagatataaattttttttttttttttttttcttgagacagagtctcgctctgtctcccaggctggagtgcagtggtgcaatctcggctcaccgcaagctccgcctcccaggttcatgccattctcctgcctcaacctcccaagtagctgggactacaggtgcccgccagcaagcccagctaattttttttatatattttttttagtagagacagggtttcactgcattagccagggtggtctcgatctcctgacctcatgatctgcctgcctcgacctcccaaagtgctgggattacaggcatgagcc

SEQ ID NO: 673 - DNA, 4083 bp, Homo sapiens
cgtcagtttggcgcggagtttggcggccggggcttacagtggcgggagttggaggcgataacgatttgtgttgtgagaggcgcaagctgcgatttctgctgaacttggaggcatttctacgacttttctctcagctgaggcttttcctccgaccctgatgctcttcaattcggtgctccgccagccccagcttggcgtcctgagaaatggatggtcttcacaataccctcttcaatcccttctgactggttatcagtgcagtggtaatgatgaacacacttcttatggagaaacaggagtcccagttcctccttttggatgtaccttctcttctgctcccaatatggaacatgtactagcagttgccaatgaagaaggctttgttcgattgtataacacagaatcacaaagtttcagaaagaagtgcttcaaagaatggatggctcactggaatgccgtctttgacctggcctgggttcctggtgaacttaaacttgttacagcagcaggtgatcaaacagccaaattttgggacgtaaaagctggtgagctgattggaacatgcaaaggtcatcaatgcagcctcaagtcagttgccttttctaagtttgagaaaggctatcaggatttccagcaaagtgttactgtggtcctctttcaagacgagaataccttagtctcagcaggagctgtggatgggataatcaaagtatgggatttacgtaagaattatactgcttatcgacaagaacccatagcatccaagtctttcctgtacccaggtagcagcactcgaaaacttggatattcaagtctgattttggattccactggctctactttatttgctaattgcacagacgataacatctacatgtttaatatgactgggttgaagacttctccagtggctattttcaatggacaccagaactctaccttttatgtaaaatccagccttagtccagatgaccagtttttagtcagtggctcaagtgatgaagctgcctacatatggaaggtctccacaccctggcaacctcctactgtgctcctgggtcattctcaagaggtcacgtctgtgtgctggtgtccatctgacttcacaaagattgctacctgttctgatgacaatacactaaaaatctggcgcttgaatagaggcttagaggagaaaccaggaggtgataaactttccacggtgggttgggcctctcagaagaaaaaagagtcaagacctggcctagtaacagtaacgagtagccagagtactcctgccaaagcccccagggtaaagtgcaatccatccaattcttccccgtcatccgcagcttgtgccccaagctgtgctggagacctccctcttccttcaaatactcctacgttctctattaaaacctctcctgccaaggcccggtctcccatcaacagaagaggctctgtctcctccgtctctcccaagccaccttcatctttcaagatgtcgattagaaactgggtgacccgaacaccttcctcatcaccacccatcactccacctgcttcggagaccaagatcatgtctccgagaaaagcccttattcctgtgagccagaagtcatcccaagcagaggcttgctctgagtctagaaatagagtaaagaggaggctagactcaagctgtctggagagtgtgaaacaaaagtgtgtgaagagttgtaactgtgtgactgagcttgatggccaagttgaaaatcttcatttggatctgtgctgccttgctggtaaccaggaagaccttagtaaggactctctaggtcctaccaaatcaagcaaaattgaaggagctggtaccagtatctcagagcctccgtctcctatcagtccgtatgcttcagaaagctgtggaacgctacctcttcctttgagaccttgtggagaagggtctgaaatggtaggcaaagagaatagttccccagagaataaaaactggttgttggccatggcagccaaacggaaggctgagaatccatctccacgaagtccgtcatcccagacacccaattccaggagacagagcggaaagaaattgccaagcccggtcaccatcacgcccagctccatgaggaaaatctgcacatacttccatagaaagtcccaggaggacttctgtggtcctgaacactcaacagaattatagattctaatctgagtgagttactgagctttggtccactaaaacaagctgagctttggtccactaaaacaagatgaaaaatacaagagtgactctataactctggtctttaagaaagctgccttttcatttttagacaaaatcttttcaacgctgaaatgtacctaatctggttctactaccataatgtatatgcagcttcccgaggatgaatgctgtgtttaaatttcataaagtaaatttgtcactctagcattttgaatgaatagtcttcactttttaaattattcatcttctctataataatgacatcccagttcatggaggcaaaaaacaagtttcttgttatcctgaaactttctatgctcagtggaaagtatctgccagccacagcatgaggcctgtgaaggctgactgagaaatcctctgctgaagacccctggttctgttctgcctccaacatgtataattttatttgaaatacataatcttttcactatgcttttgtggggttttttttaagtatgtgtaaaaatgtgatgctcagataagtacatttatatcagttcagtgttaaaatgcagtctcttgagttaaagtcatctttattttaaatgcagtgataaatgtcaactcttcggagaaactaggagaacaacaacagaaagctgtgtttgtcttttttctctcaaatatatctcccgtatgagatttcaggtccccatgttttcaccaagcaatctgctatgtcagccaacccaacatcactttctacaggaggttatgatttttgccatttactagaggaagatgttttatgaaatcaatttggggtttgaattcaggtgcagtcatcagttctttaggggctgcaatgttttaaaaaaaataagtcatcagattttaagaaaaaagtgatgatttcttattgatatttttgtaacagaatatagctcttaactgaaaatccagaaccagaaacataaatcttgagtttcttttcatgtacataaaaagcaatagccttttagtatagatagccctgagccaaaaagtaatagaattttctctagatatttaatacagagagtgtatagactgactctaagttaataatgtgcaaaatatcttaaacatccctccccttattcaacaattatgtatcagtgatcttgaaccattgttttatatttttcacctttgtaacctcatggaaagaggctttacatactttctatgtactatttacttagaagggagcccccttccagtcatgaaacttcatttgttttatccatatccctgaggactgtgtagactttatgtcagtttttgtcattatttgaaaatctattctgacaactttttaattcctttgatcttataagttaaagctgtaacaactgaaattgcatggatcaagtaagcatagttttatccagggagaaaaataaaaggaagccatagaattgctctggtcaaaaccaagcacaccatagccttaactgaatatttaggaaatctgcctaatctgcttatatttggtgtttgttttttgactgttgggctttgggaagatgttatttatgaccaatatctgccagtaacgctgtttatctcacttgctttgaaagccaatgggggaaaaaaatccatgaaaaaaaaaagattgataaagtagatgattttgtttgtatccctacccatctcctggcagccctactgagtgaaattgggatacatttggctgtcagaaattataccgagtctactgggtataacatgtctcacttggaaagctagtacttttaaatgggtgccaaaggtcaactgtaatgagataattatccctgcctgtgtccatgtcagactttgagctgatcctgaataataaagccttttacctt

SEQ ID NO: 674 - protein, 673 aa, Homo sapiens
MLFNSVLRQPQLGVLRNGWSSQYPLQSLLTGYQCSGNDEHTSYGETGVPVPPFGCTFSSAPNMEHVLAVANEEGFVRLYNTESQSFRKKCFKEWMAHWNAVFDLAWVPGELKLVTAAGDQTAKFWDVKAGELIGTCKGHQCSLKSVAFSKFEKGYQDFQQSVTVVLFQDENTLVSAGAVDGIIKVWDLRKNYTAYRQEPIASKSFLYPGSSTRKLGYSSLILDSTGSTLFANCTDDNIYMFNMTGLKTSPVAIFNGHQNSTFYVKSSLSPDDQFLVSGSSDEAAYIWKVSTPWQPPTVLLGHSQEVTSVCWCPSDFTKIATCSDDNTLKIWRLNRGLEEKPGGDKLSTVGWASQKKKESRPGLVTVTSSQSTPAKAPRVKCNPSNSSPSSAACAPSCAGDLPLPSNTPTFSIKTSPAKARSPINRRGSVSSVSPKPPSSFKMSIRNWVTRTPSSSPPITPPASETKIMSPRKALIPVSQKSSQAEACSESRNRVKRRLDSSCLESVKQKCVKSCNCVTELDGQVENLHLDLCCLAGNQEDLSKDSLGPTKSSKIEGAGTSISEPPSPISPYASESCGTLPLPLRPCGEGSEMVGKENSSPENKNWLLAMAAKRKAENPSPRSPSSQTPNSRRQSGKKLPSPVTITPSSMRKICTYFHRKSQEDFCGPEHSTEL

SEQ ID NO: 675 - DNA, 745 bp, Homo sapiens
ggcttacagtggcgggagttggaggcgataacgatttgtgttgtgagaggcgcaagctgcgatttctgctgaacttggaggcatttctacgacttttctctcagctgaggcttttcctccgaccctgatgctcatccaattcttccccgtcatccgcagcttgtgccccaagctgtgctggagacctccctcttccttcaaatactcctacgttctctattaaaacctctcctgccaaggcccggtctcccatcaacagaagaggctctgtctcctccgtctctcccaagccaccttcatctttcaagatgtcgattagaaactgggtgacccgaacaccttcctcatcaccacccatcactccacctgcttcggagaccaagatcatgtctccgagaaaagcccttattcctgtgagccagaagtcatcccaagcagaggcttgctctgagtctagaaatagagtaaagaggaggctagactcaagctgtctggagagtgtgaaacaaaagtgtgtgaagagttgtaactgtgtgactgagcttgatggccaagttgaaaatcttcatttggatctgtgctgccttgctggtaaccaggaagaccttagtaaggactctctaggtcctaccaaatcaagcaaaattgaaggagctggtaccagtatctcagagcctccgtctcctatcagtccgtatgcttcagaaagctgtggaacgctacctcttcctttgagaccttgtgg

SEQ ID NO: 676 - protein, 146 aa, Homo sapiens
  VARIANT (1)...(146): Xaa = Any Amino Acid
MSIRNWVTRTPSSSPPITPPASETKIMSPRKALIPVSQKSSQAEACSESRNRVKRRLDSSCLESVKQKCVKSCNCVTELDGQVENLHLDLCCLAGNQEDLSKDSLGPTKSSKIEGAGTSISEPPSPISPYASESCGTLPLPLRPCX

SEQ ID NO: 677 - DNA, 86804 bp, Mus musculus
  misc_feature (1)...(86804): n = A,T,C or G
agagagagagcaacaatgagtctgtgtagggaaaacagtagcttggcatggttgcctaagtagatgctggcctgtgataggaaagttttgtcttgaagtttgtgtggcaaagagactatctggggtatacctaataaacgggttctagggcaagaagggaagtcccactggtaagccatctcttaaaggatctcccagcaagttgagaataaacaaatcttagtgaaacacaagttatccagcacttgggaggcagaggcaggcagatctttgtgagttgcaggccagcctggtctattgaacaagttccaggacaaccagggctatgaagagaaaccctgtctcaacaacaacaacaacaacaacaacaacaaccaaccaacaacaaccaagcaaccagacaaccaaaccaaacaccaaccacaatagcagaagttgtttttcacagcgctacattcttctggttctgtgagtgaactctaattgctgactcatttattgaaagtttatagacatctccaggtttcctgtttcaccctggacatgtgcagccaagctctttctctccttcatgtcaagaccaagtgagtcgtagtttttctgtgtgctttttcctggctttgagtatctgtagctgtttccttccttttcatttctgtttctttttaaaagcttgttctctgtatgtagatttgttttgtctctgcttctctgtctctcattattttggacagaaatgtatcaagtctctagatctcttacagaaagagacactgcctataatagcttactgtttcttccttacatgaacttgtgtatgaatggtgttgataacaaatggcttctccacttgtgaggaaactcgagctgagtaaagcaggtgtgtgcatccctgtggctgcaatcactttcagctgtttgtttagaagaggaaggtcctgggacaggctgcaagctgaggacaaggcagcatgtcctgagcactggtggcaaatgtctgggatgaacctgcatgagtgaccctggattagactctggcccttatcgttccttctaatttgtgttcctccaagcacgatccagtgaatgcagacattagctagagctctgtttcatattatagttggttagagcaaacaggagaatgttatcagtgggaaaggactttaaaagtccagtaatcattagcagtttaaatgtgggagacatgcttctctaagcagagttaataagaaaaccttctctggcaagatttcacattctctgaagtttggactttgctagtaaacttcaagtagatcaaacagttttgctccccaaccaagtctgttggcaaaactactactgtggaacgttttgttcatatgaagagtcacttattgggtccagaggcgaatgaaggacacagtgagttaagtgccagtcacctggtggcagagctgaaaccagaaaaaacaaatctctgtaggtttgtttatttatttatattcacgtgtatgtgtgtgaattctgtgtgtgtacgtgctgttggaaactaggagagggagttcgacctcctggagctggagttacaggcagccgtgagcatgcaacatgagtgctgggaactgagtgagcaagcactcctaatggctgggcccagagttcctgcctgaactcatctccctagtcctggtctagcttccatttcctcactccatggacttgcttgattatacaaacccaaggtagatgaagaaagatggcaatgaactagttattagctatccagacattctgagggatattcctgcctatggaaatgtttttacaacaaatgtcaagaggaagaaaaaacaaactggaacagatcatagaaactcctcagtcgactgtggtatgaacgtcctctgagctagtcctgtgaaacaagaattacagagggatgaacgtcactgttcagatggagaaacagttgaattatctgttaatctctactgttagctctcttaatgtttttacaggataagccattgagcaccacccccacctttcttccttccttccttcctttctctctctctctctctctctctctctcttttctttctttctttctttctttctttctttctttctttctttctttctttctttctttctttctttctttcagagattattcattttaaacacacaggaagacctcaagaaacccttcttttctggttttagattcatgtaaagaaaaagatgtgaaactcagatctttgcaccatttggcaattgtttatatggctaacagctgtttctcttgattctttgtgatagctacaaatcagaaccaggattatacagagacccttgcttttaaaactccaaacagtatagaacatatgtcttttaaaaaggaaataaaatgttttaagaaatacgtagagtaaattttttgaaattagttcttcagctctctaaaaaccatggcattttcagtcagtttatgggatgtagctcaggcaagaagtttgtgaagtgctctgtagtgggtgagttctactgggagaatatttatttttattatcattaaccatgagcatattttgttaatatactactagcatatttaatggaatatttgtattcctttgctcataagtgctcatttggtgtataggatataagataactcatatatgccatttcatcccttctgaattagttacttgttttcttgttgtgacaaagcatccgacaaaaacaattcaaataaggaagggcttattttgtctcacagtcagatcaaaccatccatggtgatggggaaagcatgcagcaggagcttggggcagctcctgcatccatagtcaggaatcagagagcaatcagtgtcactgtttggctggtttacttcttcttcctcagccatagaatggtaacacccacatctagaatggatcctcccacctcaattaatctaacctagaaaatcccccccccccttttagaaggcatgggtccactgtctttgcataaaaagccacagaacttttcccaaaatattccacaagtgagttctataaatgaagtcccagggtgatagactattgggttacggttatataataactgtgtcaaacaggcaatcaaaataagcagaacatactgtattcacgtcactctgctatttaagtgataaaattggggtgacatattcttaactttgtttttcttttcccatttttctgtattgaggtcaccagggctcagtgaacactactacatgtccaactgtggagtctgggtgactgaatagaaatatgtctaaccaattatcaccatcacaagcattctgagtccttggatttctggtctacctgagtaactgctgaactctttgcaggatacatccccagggctcctttctttaaggtctttacttaaagcagaacacttgatgttatttattttctgtgcctgtggcggtcaaatggcgacatgtaggaggcgcttctttcttcctttccaccatttgggttctaaggataaaactcaggttgttgggcttggcattaaacacctttaccaaccgacccaacttgctgatccaagttctagaaattctatggagactgtctttctgcctctgtaccagtctacccatgtgcataattgtatggatggaattctaaagtatcctcaaaaattgctgacctataaagcacccatatctttctcaatttcttctaccataaactatgccctgtcgtgtattagtcagttttgcattaccataatggaatatctaaaacaggataattttatgaaaaaacaaacaaacaagtttcatttacttcaggggtttatcagctaaaagtgcaggatcaattgggctcagtttgatttctgtcagagctgatgctaactaaatgtcatcaaaacctgggctatgtgtgggaggaagagatcacatcttgaaacaggaagtcagagaggctgacctcacagaatctcttctgaaggcaggctcccaatgacttactgacctcccatgaggctccatctcttagtggtcctcagtctcccactgccacacttccaacacattagctttttgggaagatacagctcaaatcattttcaaaccatttcatcttgtgatggaattttgaagtttcagggaaggcctcatattgattggttgtaagacacggagatgatctgacctttcactagaggctaaaatggaagccattgattagaaatgctgcagaatttggcaagtcactactagattactggtggaaagggccatgcactgaagcatgtgggaagatctgaggagctttgaatggctctgattgacaaccggcaaaacccccacgaactttagtgctgcaagcacaggcagaaaattctgccgtcgatccaaatgagcttagaagaagaccttaggctccatgactgggagagtgaccacaaaccctgtcaatatcttgaattttctttgtgattttttttttttcagagaaactagttagggtggatctgagctgagggatatatgagtggtattctaaaccacttagtctccagtactttgctttacaattttggtatttttaaaaaaaaattattattatatctaagtacactgtagctgtcttcagatgcaccagaagaggatgtcagatctcattacggatgattgctagccgccatgtggttcctgggatttgaactcaggaccttcagaagagcagtcagcattcttatccacggagccatctctccagccccacaatgttggtatttaatatgctatagaatgaactttagatacctactggcttacaacccaatcaatcttatgtcttgtctaaagcctttcttctttagctcctttctcattgttattaaagaagagacaaatatatagaaatttaatatttttgttggtctatcagtttaggacataagaccaacaataaattatcagacctaccaaacctatcttgtgggtttaatgtacaatgattttgggctgtttattaattagcatacatctctggagactattcccctcgattgtcctattgattagtttttgtcaagttgacataaactagagtcatttgggaagattggtcctcagttgagtattgcctccatccgattactacacaaaggcatctatagctagagaagagcttgggattgcaatgtatattccaaagtagtatgggaagaaagactctgccactagtgatgagttagatgatcatgctgaggacctagtgaacagggttagtgaccaagctgacagtgttagccagcttctggcattcaaggctactcagggcaaaccaatccctggatgccctccaatgacagagccaaacagaggctacacggaacaggatggagacatcacagctgagccgtgtctacgttgtcacagcactgtgagcaaattactcatctttatgttaagacccaaggtttgacataattgttacaatgcattaagtaatgaatgtagacattagaaaatatgatatgggtaaaagtcatggcttccacataggatttcaaaatgaaaattgtatttggttttttttttttttgagtgaattattaactcacatgagacatagtaaagatttctacatatgcaaggattaacttcttttagggcacaattatgcttctttcttcagagccccctcacatgatggttaggatacaaagtatgggctgcatgatgatgcataatgaaaatgacaaaaaaaaaaaggacaaaacccagcatgtcttaatccaaattgattttgctttactttatgcccccaaatgcccaaatgcttatttttatctttctttagttttctttggggaatcaatttgaggttcctccctcatatcacagtaagtgcacaagactaatgccaagttcacaagtgaccttatggatgagtgctaagttgcaggtgactacatacgttttccagtaatggaagatgagaggatctgtcatcatggtgggttaggtgactcagaacaccctgtagaggagttttccttttgtgcttcatctggtgatagccagtctaccaaggccccccatggagtgggtactctaggatgtccagctgttctcagaagttccaggttcacctgggcaacaagcactgatcaccactaactgtgatgccggcactgtgatggatgttgtgaagctgtgaacataaatgattctaactttaaagccctatttccatggtctgcccacaatggctctagggataaccaaattaaattagtttacttgagcttacctggatcagaaccctgtggttcccccagggttgtgaggcatttggcttcctaaagtggatttcatacaaggctgttgtctactgtcaattgaatttaaaaaagaaatcaaagtaaatattttctctcattcttatttgttttggggttaaagaagatgtggtacccaataccacagggcaggctttgaaggcattttttatctcagatggccaaacaaaccatatgtttccatttctctgagagggcagggaaggttcacttatcatgttcaggcagtctacccaatggcttggcatcatggacgctggtccagtttgttttggagggacaagtcaggtgcactggtaggatagcgtcttaccaaagtgagagtccaaagaatgcttcttaggtcatttgatcaggcagccacacaagaataccacagactgagaggtatatgaatataaggccctttactttattttgatgcagttgtgggggttggaatgtaagagtcacgaagccagaaagatcgttttctggtaaggcctctggtttcctgaatggctgtcttctgctttgtgtccttgtgtctgtgtgtccatttgtccgggtatccgtttatgtgtgtgtgtgtgtgtgtgtgtgtgtgtgtgtgtgtgtgtgtgtcagagagagagagaacgagagagagagagagagagagagagagagagagagagagagagagagattgggaggagaagggagcttgtcactttccttcctataagattgtcttgatggttaatagtggctgtaaggtttacagggtctagagtcaccagagacaagccttgaggtatatctgtgaggatgttataaaggttaggttaattgagcgagaagccccacctgaaatgtggctgatgctgttccgtaggctgtggtctaggaccacattaaagggaggaagagctgagtaccagcgttcatctctctctgcttctggatggttggcacagtgtgaacagccacctcacacccctgttacatgcctttcctatagaggtatttatgtccccttgaactatgtgtcaaaaatgaatacattcttcctgaaattgctccttccaggtatcctgcttcagcaacagggagagtcactaataataaacttatgatcccatttactgaaattacttctatctagggactattggcaaactgctccattgggataggggtagtcaggatttcaatttgtatatcaaggagagaatacaatctaggccctagcacttcttatatggcacatgctaaattaagcccaaggatgtatagataagcttatatgtcaggcgcaaaatgctctcagggagtgcatattaacagtgatgtgataattacaatgctgtgctcaggtcagatgggaagaatgaacccattcagttagagcaggtcagggaaggcttttcagaggagccttagactcagcgagacttttggatgctgggagtggttagaagtattccaggcagaggcagaatcccactgtcagtggtcacagagcagcagcacagtggctgagcagagccccaggtgcttaggggtgtaggaagagcatgggaccatggtcaaggtggtttcagggaagggtactttcctttggaggactgcactaagcagcttgaacttcaccttgtagcaggaattgggaacctgttacacattagacattggatctataatgctcctaagaggttcatgctttcagtgtgtgttctaagccagtggtggtgcttggggggctacggtattttcagggtgtagattgctagcagtgggcttttgaaaatgataactggcagcttattctactcttattcttgtctgcttctggacactcatttgtaaagtcaccattggatacaccagccaccgggaaggacacaagcttgtgaaactgtgagcccaagtaaaccctccttcccctgtttctatcaggtgttttgtcaaaatggcaggaaaaatagctaaaacaatagatattgtagcagcagcagcagcagcacctgctgcagcaacagcagtggtggatcagttttgatttaaaagttcacccagaaagcagctgggaccctgacacaatggtggctaggaccagttagaacaccattaccatactgtggtcacagagcccagaggcaagtgtggtgggcactaccggagatggggaggggatagctgctcatcctattcagaacttaggagttgatgtcagtgtgggtaggggtaggagtctaggcaggatccctctgcttggagactagggagccatcagggggagaggaaactccatgcatgggggtgaatggcagaagactgcgagtgaagcacagcagagagcccctgggactgggaaggctctgaggaaattattgttggcttacctctatgagaaagcggcaaaggaatattgcaaagttatcactattacgtgctgtattttagactaatgtgaagtaatgtgaatcctggggtgagtgtgtctattgctcctggattgggaggatgcccaggagctggctaagaggactctgtaagactgaaacatttggaataggtaatttgctcattgaaatccactgacagcatttttccccctgtgcaaatatgacctaagctctttgagtcagaaaagtttcctaataaataaatccttagtcatctgttgccaagaaaatgaaaaggctttggtatggaatccatcaacctgctggccttgttctcaccctgagacagggcctgcttttgaactcgtgattcatgtaaatggctgaactcgtgattcatgtaaatggcacccttggaattttgggtagggcagggaaacaattcaggagagctagagaatgaaattagatttttttttttttaaagatcagatcagtccttccttgatctaaattctccatctgccctttggtgagggtggagaggaaagcccaggtcagtgggttctgagccttcagttgactgtgactttatgtaattataacaaactccttttttgattttcttccaaaaaaaatatttggcagggtttcaacagaccgaagagaaaggggtgggggagaacaaaaaggagagagaacacagagatacaataagagatacacagtaacatagagacatagacacacagtaagagagctacagatacataaagacataagacacagagagacagaaaggacaaacagaaagagaaacagagagagcaagagaaggacaaacagagagacagagcatgagagggacagacagagagaaacacatatacaaaggagagacagaaagatgagaaataaactcaaaagcagatgcataatgaattttaaattgtgggccccgtgaacttgcagctgacaccttccattagacaggtgacaacttttccttccaccttcctggtcctttcctgggcacccaagcaaaggaaagtaaacccgcacaacagaggcccctgccacatgaccaaggatccagagctctcatctgagtccactagggcaaagcaaggctgaaagctcggggggcgtggtcggccgttcgggggcgtggcctaggagttgggcgtgacttagtgatgactcagcggccccgccccgtccccggcccgccccgccacttaattctgacgcgcgaggccgccgggtgcgagagccgccccgagccggacgggcttcttactccggcgttgcaaccgccgtcggaaccgccctctcgccacctcggtggctaaggtgccgggtaccaacgccagcagcggagcgcgccagggagcagcgcgcctttgtgcgaggtaggctggccccacacttacttctcacacaaagacgaggggcttgcaaggcggccgcccgccgggagaaagcgacgggtgtctgaccccggcctgggggaccctgtcgttggcctgcagggcgggctggggtatgcggtccctcgggcgtaggcgagcagcggggagcctggtggccctgcgctgcttggggaggtctagggtgcagggcccgggcggcggcccggatcgaggggcgccggggcggaggggccccctggagaggggggaatccaggctgctgcttggttggttcattgttgcatcctcggccctgcagacccagaccttaagacccaggctgcagtggctgcgcgccccgggccagatgcccgccttgcctgtcccggcagcaggacagggtcagcgtcccgaagccggctcctacccggcagacaaaggcggggtcgtgctgctttgaaaggtggtagtgacactgtttcctgtctgcaagtaacttttctatgttggactctgctgtgcctcttggagtccggtcaagccagggggtttgggtgatgtcagcgcagaagtccccacatttttgggggactcagtgattgcctcctgaaacatttctggatgactgggaggtaatctggtgtataagagccaagttttgacatgtgtgctggaagtgaagcgtccccagctctctttgaaatgtagagagttcctgttgagaggatgaagtgcacacaccagccatcccaatcccttctcagatttttgtccaggactgctaagtgaggttacttagtcagaatggggggtgatactggaggcgccaacaggggaacagaaggagccctgtttggcttgactttctgaatttgagcctccctgctaacaggtacactttctctaggcatgctacctcactagcatttggacatgttaaagttgctctaaatcctgtcagagatgcctgtctagggacggttccttagtgtttggagtttcaggctttacaactttgaattaataatcatatatatttgtgataaattaaaaaccagaagataggtcactcatgtggccaccacccacacataccctgaggatgaaggtgtatttgctttataggtggcagggaagtttgtgtgtgtgtgtgtgtgtatgtgtgtgtgtgagagagagagagagagagagagagagagtctaaatgaacacattgttaattcctaacctttatacttgtctaaagcatgacatttaataatgataactttgcaatgttccttttactgctttcacagaggattatactaacaacttgttttggaatatattttctcagagctttgccagtaactatttattcagaagggagaggcgggaagatgaagggaaagtaatgtgctttgcacttcactggagataacacaaaagactttatcatgtatatatatatttgtatgggtatatctaaatctatatctgtatacacacacatatatccatatatggatatagatagatatatatcaggagtagcttgggaccgtttaaaaggtaaataaatgtttttactgtgaaaagttctgagaatcctgagaaatccaggatggaaagagctgcctgtagaaagactagccgtgttttccatgtgcctcatgcacatctcagaaagtttgtgttgagaaagtaaaatatgttttcattacagtgaagagtttcgagtgtctaaaaggccattcagctacgtacttggccggtggacatctttgtcattacttatattttccccttgtaaaaattttggtctttgagttctttagtatgcaaagcagaaagaagcctttgagacagccctttagaggcagggtgctcaagagatgatgaagtattctgcagtcatttctgaagcaggagacaccataggaggaggttgggacagtgtgctgtcaggtcccatttgcagtttttcatctgctttgggttccttaatatgcatgcacacttggagtagttgcagggttgtcccctaggtggtgggcagaatattttgccctccgtagtgatttctgttgcttttctagtcatgtacttcctaacagcatcgagtgggatggaaggtccaggaggaaacagccgtgtgcccagtctcatttcctacccctctgagggctttgggctgtgtgagcagtacaggcagcttgggcctcagctcagactttaggagtcccatgtagggctagagctgttgctggagagcccgctcctgaagtacataaaagacttgtactctagagacacacccagagcaatcgagttcttgcccagaaggaaggcaggtgctcttactaattgactaattgctccgagttttgtttaaaatgctgcaagcaaaggaagaaggatttttcatttttcagttttgtttttttcttctgtgagactgagggatagaaaactttttcttccactgaaaggggggacacagactgaatactgtggcttagttggggttattgatgtctaaaagccccttccctctggaacacgctgtgcaggagtggtttgagaactcagacttgggagtttggttcagtgagatctggattttaagatgtttgtggaagtccatatataccttggtgagtctagaagtactggggagagaaactggccagctttggggttcactggttccatactgggaaagctactgtagagtgaagatctatgtatagctggtcccacgggaactactcatagccttgtgtcttccccggtctaatcttttcctcttcttgcttttcctgtttaaagcaatctcttattttctcttttcctttctgtggagaagtgctgggccttttccatctgaacttttcctcacagtgagtacttactgagtgcacttaaagggatgaatgcttttatccatcggtgcctcacccctgaaagaatacatttatttgggaaactgacttgggttacctttggaaatggtaaatcaatgggggctgtttctgaggttgctggaggaggccagacactgagtttgttgtagttaacaagatgaacttggtccttgtggcagagtatgtgaggatgatattttaagaattgtacaaagtgacccccacgttatttaatagctgagactttcagagctgtgaataggaattagcactgtttgatttaagctcctttaggaagaatgagagaaaccacagggaaacatggggaatacgttcctaatcctgtaaggcagatacttgggataccctgggaacatgagttgcccagggctagctgggcatagttgaactaactgatgaggtagactgctgtgttttgtctagaatttggctgggatattgggacagtttctagtgcagcttcattgtccccactgaaggggtcagtagggccatcagggagtcaattgttgtagtgatgtggtgtcctgacttagagattctgagaaatgagtgttggtgtcacacagagatcagcagactacagctgtgtttccctccatttctggaaattctattacagatgaagagacagctagaggagcttgtgggaaaatagatactggcttgagagtgttcccaaactcagctggaatacaggaaggaagaggggatagggctgcatttaaagcagaggaatgccggacagttctagcaaagatgtcactcaaagtggagtatcaggcgacgagcagctgtacagctgggcctgtggttggcctgccgtatgtagtggtgtgtgtgtgtgtgtatgtgtgacttatgtgagatcacaaaggacatgtgcactggcattgatgacagtaatactcactccacactccacaggcatggagcagcaatagagcttgctgcaggggttaaggaggccctcctcagcccccctccttgggctgctgttgattaagcctttgctggtcatgagacacagaaagctttagttagggaatttgcggggcctctgtaagcttcctaagaatgagttattaagacttctctctaacaggagagaatacagcttacagtttgatgacctctaagtaagtcacatagcccctgtgaacttttctaatttgtgaggctaatgtgaacttggtaatactgacctcctatgatgcggtaggtaaagaccatcctgaggcagtggcattccaaggcatggtccctgagacttggccaatcaccaagttgttgatgctttcctgtcagtgtctgtggccttgtaaaagtgcacttaaaagtttgtcatgatagggcgctgagagatggctcagttggtaaagcatttccttcacaaacatgagaacctgagaacggcttgccagcacccatgtacagagcccctgggcaggggatgattgtaatctaggttcagggaggcagacaaaggagagtacctgggtcgtgtgtgttactgctaaccacaggcttggttctgagcagctactctctaaaagtgatagcttgactgaaactttacggctgttgactggaagtccccttttcttctctcctcagcctctttcagctgtcattcttccctttgagtctgtgagcttgactcttggatacttcatagaaatgtgactgtgcacccctggctcctgtgcaatgggcttccttccctcagtatgacaccttcaagattaaggttgtagcatactgtaggctgagtagcattctattgtaagtgtatactatattgatccaaaacctgcaacctgttggtagatagataggtgttcccacaagacttctagaagagaacaggaagcctctatgctattggccttaggggtgatctcgtggctgtgacacccagaacacagcaaaaaacagagtgaatggaccccgtcgaagcagcgcagcaaagctgtgagcagaaaggaaggacaatctgcagagttagttatggttccccagccatttagctaaagagggctcttctccaagtctgtcaagaacttcagtagtgaaaaaacccaattaagggcttcggagcagagtcggcattgcgcgcagccttgtaactgagcgttttagtaaggcagcatgccatgggcgccatagggatgcttgaagagggcagggctccatccctctcttcaccttgcttttcttcttgtcatgttcgctggagcattttaaagattacctggctgtgatgttaggatgtccatgttgtcttctcttcttgcactcaggttttggcctccttcctgaagtgtcataatgaggtctgtaagagtgaaggctattgtttatgggacggatccccaggttgggcagtctctggatggtccttccttcagtctcagctctgaactttgtctctgtaactccttccatgggtattttgttcccccttctaagaaggatccaagtatccacactttggtcttccttcttgagtttcatgtggtttgcaaattgtatctttggtattccgaacttctgggctaatatccacttatcagtgagtgcatatcatgtgttctttgtgattgggttacctcactcaggataatatcctccagacccatccatttgcctaagaatttcataaattcattgtttttaatagctacgtagtactccattgtgtaaatgtactacattttctgtatccattcctctgttgagggacatctgggttctactgcggatgccaacaagagcttgctgacagaagactgatagagctgtctcccgagaggctctgtcagtgcctgacaaatacagaatggatgctcacagccatccattggacagagcacagggtccccaatgaaggagctagagaaaggacccaaggagctgaaggggtttgcagccccaaaagaggaacaacaatatgaactaaccactatctccagagctccctgggactaaaccaccaaccaaagaaaacacatgatgagactcttggctctagctgtatatgtagcagaagatggcctagtcagtcatctatgggaggagaggccctttgtcctgtgaaggttctatgccccagtatggggaaatgccagggccaggaagtggaagtgggtgggttggtgagcagggggaggggagaagggatagggggttttcggaggggaaaccaggaaaggagataacatttgaaatgtaaataaagaaaatacctaattaaaaaaaaaaagaaaaaaaaataagagtgaaggccgtggaagcctgacaccaatgttcctaaggtgtgcactcttgagagggaagggaaaagtcaggtctctaagctgcctgatatatgctaatgagacttaaagacttgcatactcaccggataaaatcccatagtcttcagcgagtacaggttatttatgagtttccaaggtagagagatgaaaattcctatgtcctggacaaagttaagaatgccatcgtggacatctctatgtagatgcataatgtgcctcccctacaataattgatgtcatttgaaataggtatcactgtgggcacaagtgtgaccaaagttcatccgcagtctctccctccctcctcctttcctctgtcctgtccactctcctccacactctttcttcttctctcttcttcagtggttgcacagagcagtatagcatgcctgaaagagagaagcctagactacagcccagcttcctgggagttagtgcatggtttgagacaggctgttgagctttctcctttgttagctgagttcattctatctctctgcctatgttacccccatgtcctttataactaacgatgcatcctatgcgggtcagtggctgcagaagagcatgccctgggtggggagtgtctcagagcatgggctacgccttaggagatggtgtaaggagacagggcctggacagataaggagaacacaatacatttcctataggtcctgctgtggtgaccagttcagctactctgtgttcatggaacctgaaatgttatacactaaagtttgacatgggccgttagggatcctatattcttatctgtgaaatacagtgatagcaacatagttactaccaactcaaaggttttgatcgtgtcctgtgtagtagagtgaaccttgttcattcagtatttaggaatgctgatgtgttctagtccatatggcagtccctaggatctggggctagaacagacttctttggagttagcatgctagtgttgatagacagtaaatgaatacacagaccaggtagctctttcattgtgctgccagggaaacaagcccagctcagggctgcaacctgctggagaggaagtgatgcttttaattgggtgagggtcctatttgagttttgaacaaatgcaacaagtctgtgcaacccactccagtctctctgagtagagcaaaggggctaagatccatgggtgcttgctatagaaggaaccacaagaaggctaatgtggatggagccaggtgggtggtcaggagcaaggcttccagatgaggccctctggtgaggaaacttgctgatacagaccccatgggagggtcctgtgaaggggctggaagagtcaggccttgcctgtctgtggctctggagtgagtcgtggtgcctgagcatccggcacaggcataggaaggttggtagaagtagatgctccagtagctggatcgtatattttgaagatagggccacaatgacttgctaattatttggagttgatattggctagcagaagaatcatgagtgacacatggtcccagacaccaggcaaacgatgatgtcattttctggatgagaacgaatggctgagaattgtctctataatacactgtgctctctgagattagtactgctttactcttgtatcagagatggggaaaccaaggagcagagaaggtgagaggctgtgctgggagaggctgggaagtggagatgggacacacctgagaccctccgccttttcatctcacgttggctccactgtctgcctctgaacgaggatggcagatgggtgtggtttcatgtgaatatatgtctttttcacagcacaccttggttgaaattggatttacatttcattgaatgtacccattatcaatgtatagttccatattttttcataatttgtaggcttggcagccaccatcctgattcagttttagattccacagtcagctcccattcccattctcagctttcggcaaccagggctcactttctgtctccacagagttttccatttcagaaattttggacaaacggagtcatacagtataccattgggttgactttgttcagctagttagtgttttttgagacccactcattgttttatatgttttataagtcatatgcttttaaggggcattcttggcctttcttagaaggatgtactctgctgatgggaaaagcatccttaggatgtaccttaagatgacattaataaaaatagtactcaccgatgcacggctctgtaaacattgttatctttcgtgttcttctaagtgattccatgagggtgcgtctgtggttggtgcttgatcagggaggggcctgaagtgctgagggactaaagagcctgtccagggcgagaggctgaggtaaggtccaggctttggctcttcccatcccatcctgctggactctactgactgcgtatttaaagcttgcacagctcagcttcagagagggctgagaacataggcttgcagataaatcttaatttgtaactttaagaaaagtgtttgttgtggattttcagtttggctttgccccatggagatgatggcatcttaaagcgatccttctatggggcagttttcttaggcataacatcagagtggcaccagattaaaagcacataattatgccattaggcagcgctgcgtgcttgagttatgttttaaatatgatgcttaccagaaatacatttttgtatgaagtaccctgaggctatttatgaatttactgttactggatggaatttaattaggcatcatacatttttaaagatgattatataattgcattagatattctttgtgccaagtacatatttgaacaagtttttttctatctatgtgacattcctattagaagatttcatatcctgtatcgaagaaggattccttatgtattacaagtattctggagttgtggaagacattttcaacaactcattcacagcagtagctcggagttggtcacgtgtgtttagcttgggtaagcactgatgagctgtggctttttaacagccatgagatgtttggaataaggacagactttacacccagattccacccttggtctctgctaagacactcttcgctagctccacattgttctaagtttctaaaatggaattgcagcatggttacactagcttctcaatggtagtatatcttccatcttttaggattttgttgtataatccagcttactagttcacagccacaactaaaaccctacatttctttttagaatatctagttttaagaagaaaaaacaataacaatttgaatttaaaaagttttcctttgacttattttaactgcagagtctgcttttttttttttcttaagagattagtaggtatgatgctagaccctgacaaaaatcaaatcccacccctctggaccccacttgatccccctcaaccctccttgagcctctccctctccaagctcccagaggcagagatgctagaatggaacattgttcaagaggcaaaaatctcagtagcttttcagcatcactgtctccctatctctcaactcccagcatcttgctcacttctgcttcgacctccctgttagaacactgactttttttctacaagtttcagttaaaaccctgggctgctataaacttatttgcaaaagtacctgggtgggaagatctgtaagttttttcttggggttatccccaggatccccctgatttttctgacctcagaggcttccccttgtgagctgagtagaacacaccatccttgcttatttctgttgctaggccaggccctttgcccctttgcctgaggggtgactgaaagtgatgtcaaccgaaaactcaggcaagatgtggggaagcccagaagtctattgaatttgtcactgtcgtttttaatattggcctcatttcttaataatgtgctgtagccttattatacctagtttctttgaagccagatctttaaaatgtatacatgtagtggttccacctcttaaggctcgataatccacagggccgttcttcctcagcaccttcttcctcgtgctgttggttgttgtctagtagaaaggcccacttccttgactgggctgcagtgtgttttgagaacttgttctacaagttcttgtggtctgtaaactggaacttagcaccgctgctctcctgggttcttgctcttagcaccccagctctttagaaagggctaagttgttggtagtgacatctgcttcatgttgcatcatcccaaggcgatgtctgctgtcactcacagcaatgtgaacaatggccattcggtttctgtgttgacagcttgatccttcattgtgaatttcccccattgacctttctcctaacgttgttagcgtctattgatgatggttgcttgagttaagtatttcattggagattgtttaatgagcaagttagcaagtgtgggatgagacctgcaatggccagagtgtccagcaaaccaattgttggagtgacttaaggacagtggggacttaatagagaaaaacagaatggctagactttcccatttactgcatgcaatgtatttcctaccatcaaagttaattgctatttataaatcttattgtgtcaggtaagttttatagtaatattaacttctgtgtgtttatgctcttatagcatatagcatagggtcttacagcataggattacaaggtacagtaccatgtggtggtatagtccattgcccattattttcttcagtagtcagttgagcttttttgatgtttatgaacatgtataaccagactttttaggaaaggcaaggcattaataaacttacaaaggagtggtgctagagagaaagctcagtggcttacctcccttcaaaggattaagtttagttctcacaacctatgttgggtgagtcacagctccagaggatctaattccttctggcttctatggataccagcacacaaggcacatatacacatagagcatgcctgcacacacatgatatacataaataaaattattttcaaaaggggagaatgatgggcttgagagatggctcagctggtgaagtacatgcgaacctgaatgtgagacccagaacccatacaaaatcccagagtgccctgcatgtctggaatcccagtgcaggggaaacaggaaaaggaagataatgggtgctcactggccagccagtctagctgatttgatgagctccaggctcactctaaatataagtaaggtagatggtgattatgaaagacacctgacatcagcctctggccttctcatatacctgagtgcacacagaaccatgtaggcactcactcacacatatacatacatacatacatacatacatacatacatacatacagagagagaatgaatgaatgataaagatgacttcttccaaaacataggagaaatggcagttttcagcttgagtcttacgtggtttggaaagatggaccactgccatgtttccagagtagagagtactccttttaaaggacagtgtcacagcaactgaaattggctcactctccaagcaagctacacgctgccactacagtcagatctggggataccctcagcatttgatgggcatggaaatatattggttcctcctgtgtggatgatcattctcttggtataccatagcgtgcttctggaaaccacattatgacaaggatcatcatcacaacggttctaagagttgggcattcctcccacagtgccttaagtaaagaccatgcttttgactgtgcagttggtgtcaagtaaatcttggctctgaccataaggtattgaaaaaagatgaaacctggaatgatagaagattttgacattgtaaagtgatgctaacaaaagccacagaaagcaggaggccatctgatttaatccatttttgagggggttgggcaatggtgggcaatctaatgcttagatgtttagggagccttcccgagactgcacaactagtggtggttgcttggagtctaaactcacagtagaaaaacaccctaatacctaatgtttatgtgaatactaaatgatataggactataactaacgtgtcttcactaaagcagaaacattccataatcaccagctcacaaatacttgatcatactaacaacagtggtcctgcctctcttcctctcttactattttaatgtctttttttttttgttgtttttgttgaaggaatacagtattttattgccccaaaacattctttccagggccttctgtgtaccctgaagagctgtatgaattttttttttaattggtaatttctcccagcttttaaaaaggcattgcatgagctttgggctgctagctgcttcaagtttcctagaaaatgtctaggtatatttggacggatagtatgttttaataagtatcttgagccaactcacatgcaaaagaaaaaaaaagaaacaaatcgttcctttgatcatttctatttcataaaatcactacatagtctttaaatacttgaacagtcaccaggaaattgacttgggagccaccagggaattgctcatccctttcttttccctacactgggcagttctagacctgaggctttctgaaggtacctctggggaagtgtgtggatggtaggtggggaggaattcaggccctaagtcacccactctggtgagagggagggagagaaaaggtgtctggtgccgacttcctgaggttagccttagttccttgaggcagcgaaggctgcagtcaccccttccctgtgcagcacaggaagctcagagagcttgccccagagctgttcattagactagttaaccgtgttaccagagcgctccaggatcagatggagaacagcatccactcggatacggtttgttctctgatccatgattcatacagtttgtggtaaaatagaaacacgcttggctttgcagcagcactccttagatgtgcccagagaacgcttgtttgctttcagtgcccctaaattacaattctttgtgcacttcctgtttcacagttaatggctgagatctgtgactctagcaacactgttgtttttcactccagtccgtttctgctagaaactacgcagcctgtgtactgtctggaacatgttgcacgcatgtgctttgagaagaacagcatgcatagctgactaatttcaaaaacagcctatttatagtccttcagagtaattgtcagacacttggtctgtgcgcttttgctcacgtcatgtggatcaacatggctttttaaatggagataaattgttttttatgtgtgggtgattcatttgatacttctctataaattcataccccaactgtgtctctgaagtgtgtcactgcagtaatagcccagggaggagttttcaacaattagcattggattcaatatgagatggtgctttagagaacttacaactctgtgtgtgtgtgtgtgtgtgtgtgtgtgtgtgtgtgtgtgtatgtgtgtgtgtgtgtagaaaagggagggagggagagagggctggagggagactatagtgtctgtatatgggtgtggagaccagaggaggattctgaaactccctaatgtattcgtatgcccttgacatagtctcttactgagcctgagctagcctgatagtgagtgagccccagcaacacacttgcctctccttccactgaaccccagagtgcctgggatacagggatatgcatggccacctggctggatacagggatatgcatggccacctggctggatacagggatatgcatggccacctggcttctcagtgtcctcatgcttcatctctccctagctcttactttataaaacgtgctgaagctgtggagtcacacaggacctaaaggactctcgtccttgacctctaacttacaacagcattgttggctgtcacacatggtcttgccttatcatacctagcccatgtgcttgccaccacagagaatacaaacaggaacaggaaacggaagtcactagttactgagctggtgatggttttattgcgaggaagaaatgatgaagtttgaaattctgtgtggaagaatcaggttcctgtttatcttgtagaaagtctaaaacatattaggtattagaaatagtttctcatattatatacaaaagcctcggcatttgtttacacggttgagaactttctttgctgtttctccattttgacttttagggccgagagacaccctgtggttgaatatatttgtgaggtttttgtaaataaatataagagaaatgtgtttttgtagataaacatgagaataaaacatgagttgttctcatggtgggtgactgagacatctcaaacatcaccgtagccctagtcttgcaggcttgtgacatcacttattggttctaacagcgcacaagagagagtaagaacttgatgttgcctagaactgggtgttatgtgagatgcccttttccctcatgaactcaggagttctcatctttgctttctgcccctcaatgagctggcaggtaaagtgtaggcaccatgtctatgtgtaggtgccagtagcaccctccttgtgtatttccccaggatggtgtcatgatgtgacttcgtacatgactgttgacgtggctgtccaatggcatgagacttttgatctcattggtactcaagagaatttgtctcagatttgggctcttgtgctttaagcagtggtagaatagagataagaggggcagagggctcaggctggagctttgggatcatctttgctagggtttctgttgctgtgatgaagcacatgaccaaaaaccaactgaggaggaaagggtttgttgggcctatccttccagcttgctgttcatcatcaaatgaagccaggacaggaacctggaggcaggagctaatgcagaggccatggactgatgctgcctactgccttgctcccatggcctgctcagcttttctcctcccccaataacccaggaccacccacagggagctgagccttcaaccatgaatcaagaaaatgtcctgccaggcagtggtggcatatgcctttaatcccagcacttgggaggcagaggcaggcggaattctgagttcaaggccagcctggtctacagagtgagttccctaacagccagggctacacagaaaaaccctgccatgaaaaaccaaaaaaaaaaaaaaaaaaaaaaaaagaaagaaagaaagaaagaaagaaagaaaaagaaaaaagaaactggcccacagcaggctggcccacagcctgatctcatgttcttagttgaggttctctcctcttagatgatgttagcttgtgtgacataaatctctccagcataaaagctaattgaagaatggaggggacacctctcggcataaaagtgtgggtggctgttagtttgggctgctagatgttgagtgtcttaagtgaccatcattcccttcttatttagaggcagagaatgccaggatgaaggcactgtcagggtcagagttaggaagggcctgcattcaggtttatggatacttcttgctatatcctgacatggcagagaggaaaagtaaaacacttttcttcatcccttctccaagggtgtgaattcatcacaagggctcgactctgcatttccttcacaatgtcccacttccaaatactatggcattttggcttagggttcaaaaggatagatttaggagtgacacaagagacgatctgtggtgtaaccaaagcgatcagtggtttacactccaagggaaggtggcaaggttggttctgagatacaaggaggtgttctgcagagaagggaggtcttcaggggtccaggatggatgtggaggtgaagggttgggagtgggaatgggagaaggaacagtgttggtagaggtcaggaatctagcacataaccaaccagaactggtcacccaaagccaggagagcactgaagctgagaggtgaccttgtctagggtgtttgctgtttctcacaggcctgctacttgagaagtgtttgctggttgagagtagcactatgctcaagcaagtgagatccagggtcccgtgttagtggcaggcggagagcaggaaagaaactagcacagggtcagtatttgtccaggcttgagtgattagtccaggtattgttagtaacagcgtctttgtgcactcttaaagcagtgatgtgaatgtagttgttaaatacagacacccagcgtgcatgcacatggttgcagagagatactcattgcgtgtgtgagtgaagatttgtcccacaggggcttctgtggtgtgttgaccgtcattggagagacctggttgttctctttgcatatttactgtttgaattctaaaagacactgtgccttgtggttccctgagctctcttctctgggtttgttttagatgactgtctgtttgctcagctaatatggaaacttgagtccagcatattgccatgatatctgttattgtagctcttctggattctcttaggagacagtggtcttttctgggagctcctaggagcttagtaaaccccttaagacatagctggctaggactgtatagaaaaggaggcaggggaatgcagaagaagaaggagaggacgctgagttcttttactttccagcctggtgagaattggtttgggaagccttattttccttgacttctgggaaggtaggggtgagggagtgaggtcagcgggaggagtctggggtcctcagagttgcttcttcaggcagaaagtgccccaggcttatggtacttgtggtgcttcaagagtgaggtttttatttgagccgttttatttgaaggctaccatatgtagattattaccatgcccgaggtgtctttgtttgtggtgcaaggggatggaagaccctgggtcctgaacgctgtgggatgggaaagcgttcccatgggacatgcctttcccaccgtggggttgttcctgtgctcacttgattatgcattgaggttttccaggtctggctagaaacaggaatctgttgttccaatctttgagtcccctgtagggctttcctgcttcctgaagttgggctcctgacactgatgtggctgtactcaggcggatgtggggttatctccacgggggctgagtgcgcttcagaacgccctgtctagctcactcccctcagctggtgcttgtcggaagctgagatctgcaggagtagctgggaattcctttataaggcggtgtctccttttgtgtttctatcatttttgtttcacgcatcctgagtccgtttccctaagggccgtgacaccagcaggcctcagggagaaagcctcatcgtgctctttgaatggcatctcaaccatagcatccaagcttggctcctaaaagtgtcccacagggctgaaattcagaaggtcttcttagcaagagatggacttgggtttcttttccttccctctgtagctgcttctagctgaacttttcctttttcctccatctgcttgataactgcaagtgagtctcccgtctccacccaccctatcttgatgatttgggtggagtggtgtgtccctttttaaaaaacaaagcaagacaaaaacaaaacccttaaaacacactaaaacccagaagggcagctggggagtcggtagtgtgtgctcagaaggtgcacccgtatcctgttgtcagagctctgcggtctgtcccgtggttctgcactgcatgccccttattagtaacaggtagacgccctgcagtctggggtgcatatatctggatcttagtgagaccccagctctcgttagccaaggggtctatcctcacttcttttctctttccagtgctttaagttaagacacggtgtgagaggatggaattccactgtttgggtccaccttctgtgtctgcagttcaccaggcaagtaaagtatctatctgcctgagtttgtttccttgcgagtagaataggaatggtgcccttgagtgggttcacagcagtgcagtcacttgccccatgtgcccgtgtagagaaagcactcagtaagacagctggcaacattgcaggtgcttggcactgagagcatgtaccacaaagctctgttcttgaacataggcttgcccgcgtgtttactttctagtcatgtccgagtgagccttctggaaacgttacatgcatttatggggacagcacagctaaggcactttgaagctgagtggtgtgtccaatcgacccacccctccacatccagattcaatattcacaggataataacagtgttattaatttcgaggacagaggtttattctagtgtcccacaaccagaagagtcacaaaggatccgccagcactaagctagaattgaaatggccaacctggacagacatctgctgcaattgtaaacagtatggaaccttacagtatgtcttataccaaatggacatcattttaaaacacttggctggtgtggaaaccttcagggatgcaggaagtaggcgtcccaggcacgtctaggtgtctgtataaggctgcatcaaaagggatgtctctagacattttctagaagagttggtttctagtggtctgaggctagacctgaggtctccacgtataagggtgagtccaagtctggtcttgctgctgctctgtccttggcctggtttccactaatgtcccttcttgtacttgcctaggcctttcctgttccctagctacctctctggaaaggcctgcagaggccttggtccctcttcacctgctttgtttcccgtcctcaaagcttatcaggtacattgtagacagtgtgtgtgtgcttgttattgctggcccttccatcttgtacgagcttgctctgtgcacacaggcatgtggtgtgtttgtccttaatttactggagcctaaggtgtccttcagcctggggaacctcctctcaggctagctaaagtagcaggacatgggctctctagctcttcatccctgaggatggctgaatactcctctgtctcagtgagtttgcagacggaaaggatatttggggagattctgcagaatacgttattttgagatccatcttggtctgaagttaagattctgggagaagtgaattgaaagccaggcataatctatgcctttggcctttaacagcttttttaaaaatagaaattaggaaagtagccatgtgttcattgtacttgcatttgtgtgtggatgaatgaaggatattgtctgcactgttgctctttgttctttagctaagccatgtgggaaatggcttctacacccgtgtgctaggagtttttttcctttccctagagaaaaattggatgctatttttttttcttgcaaatgaaaaatatgtaactttttggttctggacaccaggaagcaggtaattcagttaactttcagacctggaaattacattattcctgacccactttgtgtattggatcctttgactttctaattctactttatttatgtacttgtatagctaacttaatttatatgtacaactcaacatttatagtgccattagttttcttgaaaaaatggcaaaacatttaaaataattttatgttcttacatgggacactgaggatggtccttctgtctctctctttctttcttcctttctttctttctttctttctttctttctttctttctttctttctttcttttccttccttccttccttccttccttccttccttcctccctcccctccnnnnnnnnnnnnnnnnnnnnnnnnnnnnnnnnnnnnnnnnnnnnnnnnnnnnnnnnnnnnnnnnnnnnnnnnnnnnnnnnnnnnnnnnnnnnnnnnnnnnnnnnnnnnnnnnnnnnnnnnnnnnnnnnnnnnnnnnnnnnnnnnnnnnnnnnnnnnnnnnnnnnnnnnnnnnnnnnnnnnnnnnnnnnnnnnnnnnnnnnnnnnnnnnnnnnnnnnnnnnnnnnnnnnnnnnnnnnnnnnnnnnnnnnnnnnnnnnnnnnnnnnnnntctctctctttctctctttctctctctctctctctctctctctctctctctctttctctctctctttctctctctctatctctctctctttctctctctctttctctctctctttctctctctctttctctctctctttctctctttctctctctctttctctctctctttctctctctctttctctcttcctttctttcggtgtagatggtatataaaatgtgtgtatgtctgtgtgtgcacatgtgtttatgtgggcaaatgtgcagcacagtgcccatgtggaggtcagggaacaaccttggggttacttgttgaagacaggctcccattgtctctaatgtgtattccaggctagctggttttaggtttcagaggattctctgccatcttgtcggtggatcactgggacagacataaacagaatagggcagaactgcaggtgggcatagccgtcagagcccattcctaatgacctcctagcctcagctttatatgtatgctaaggattcacactgaactgagccatctctcaagccctgcagccaaatttcttttggagtgagaccacctgacccagagccttgcccatgctgagttatatccctactccttaatgttttgctataaggtattgaattaataattagttaataaacccaatgcagggttgcttcccacctcagtggttgatgttctggaacaaaacacacacacacacacacacacacacacacacacacacacacacagacacacacacacacacacacacacacacacacacacacacacacacacagcctttacattttaacatgccctaagcagaacaatagctgcttaactgcctagcctccgtgctgctagactctacctccctcagataatcccgagttactacttactagtttctgtcttccatcttggctgctcttaactccaatttgtcagccttctgggccacgttttcttaaagcagagtctggggtgctctcctggcttctataccccatggcagcctctgtgtctcctctctcctaaggtgtggtagatctccttcctcttctcctggtccgtaaaatcctgcctctgtctgtcctctccagctattggctgctggcatctttatttaccattcagaaccaactgggggcaggttcccagaagctatacaaaccctcttgtgcaaacaggttttttgggggggcgggaataattagcatttgtaatataagcatgtaattaaggtaatgatgtatgtatgtatgtatgtatgtatgttaacctgaaacatttgatcctcctgtttcagtctcccaagtactgggattagctcaacttgaatttaaaattatgttgctgctgtgtgttttacatcagagagagggtctggaatacagaacgcctgtgtttgcacaggtaggctttgtgtttgtttggctttgctctggatagcagttttatggttgtcaggttgaatgtggtagtagatgctggccagtaatccgttcagctctcatggcttttacccgatttattccaatcgtgagattcttagttactttcccctttgaagttaaatatttaatatttcagtgcggttagaaacctgccttctgagtactattatgattctccgattttgctgtttctaggacttgagattttctccttggtggtgtagtaccttctgtttctggaaccccaccagatgctgtggccatttacaaatgtcagtgtgcataaactacttaggagagagctgcactttaattggtccttaaagttgtgccagtgggtaactattttagctgaaaattaaggaaagaatttacaaaaattagtttacttgttcctttgagtttaatgcttgctacaccatagacatcttcccgatgcttgtgttgggggtgcattcttatgagaggccatggaaatgaatagacaataactttatttccactgtaattctgactctgtctttggatgagttacttttcttgtttctgagatagactacctgacaggaagcagttgcaagaggacaggtgcttttggctcgcagcttcagagggattgcagcttgctctggagtggtgggagatacggtgccctgggagatgagggtgtgatggtgcccttgctttgagagtcacaatcacaaggtccatatttggtgacctactttccacagctattcctcaaatttaaaggcttcataacgtatccagatagtctttccatttggggagcgaatgtccgagcatgtgagctggtgcagaccatttcagactcaaacagtagtagccttacgagaaaacatggggtcgcgttcttaggttttgcttgagtttaaatgaaaatgttgtgtcttttttggggagtctggccgagagatgattacgtgagtgcagatgaaatcactgagcacactctggacagtttggattctgttaccgtcagccctcagcagtgatttatgaggcaggatacacagatatcctttcctgcccagttctcctcattttaatctcttctacaatagtcatagttgtctttactgagaggtgagtgagagagcaagtgtgtgtgtgcctgagtgcgggtgctacagagacaggaagagggtatcatatctccttgggctggatttataggcagttatgagccttcctcacatatgtgtgctaggaactgagctctgatcctctgggatagcagcaagccctcttaacggatgagccatctctccaatcccaatagttaaaatttcattttgtaacaggaattcccaaaatgacttttttcttctacaagaaagtatagttcgtagctttcttgccttctgaatggcttcctgaatggaaaataagtcctgcgggctgctgtggtttattttataaacagggctagaaagcgaacagcctggcaagctcctcatctctcagcaactctgagacgggttccgcgccccagtgaagacttgtcatatttataaaccattattatttcagaatcatcaaaggaaatgtgtagcgatggcagggaagcagcttgcttattctggaattttcttcactgtatttttaacattgaagaaattactaggaaagctttggcaaagtgaagacagatgcgcaaagatgagactgagttcgtggactgcgttaaactcctgagtggggcagtatctgtatgacatgggacaagccggttaccctctggagtgtcttgagggaagctgggggggatgcttcacattaacaaaagctttagatttagaaatggagactttatcattttactctgtgactgctccttactttattcaattttagcatagatgtcagctttaggactatccagttgggaagaattttgactaggagccattcttaaatgagtgtacctctttcaaaaaaaaatggttttaattaactgtacttcctgacctgctgtggtcacagaaatcttaactgtccaaagatgtttaggagacaaagtggctcattttcttccggagtgttatgtgaatagaaggctgtggattaccagtatacattttcttttcttgaaaagcaagttcctttttacccagcagggtcagtgtggatgtgtgctttgataagcacaggttatagcccgagtttaaaggactctatatctgggttcaagcagaaatcatgccgctgccatactgtgagctgaagggcaaacacagtaggcagcatacatttcggaaagaaaatactttctaaaaagttatatagttttaaacatttgattttttatttatgtttatatgtgcatgtgtctgtgtgagtatttgtcatgtgtggtgcccctggagccacaagaggatgccatatcttccagagttatagatggttgtgagcctcccgccacccccagtatggctgctaggagcagagctggggtcctcttcttctcctccatccctggctaccactgttctgtcttctttataaatgtgaccacatgaagggctttgcattagtgcagtggtacaatatttgtttttcatcttactgcaccgagtctgttgttctgaagtttcgtccaggtcatagcacgggtcagatgttttctttttctgggtgaatgatttcccattgtatgcagatagctcattttgcttgtccatttacctggagctggatatttttgcaaggtgtgttagcaatctactttaagacacaaatgcaggagaaaatgggtgacataaccactagtatattatgacacatagatgtgggtctgggttaggacctgttgttttcgaggggggttgggaatggatcttgctgcctttgcctcctgtgcactgggattacaggtacatgccagcactcatggctggagtcccggggtaaaatgcttccttaccatcagggattgactgggaagtgtgcatctgtgtgacctgctcctgtggctgctgtttgcctggtgtctcaggtgccacacaacaatttttttctgagtttttatgctttgtagtgaggcttagtacagggtgatataaacacccaatatagaaaatctagaagctctggctcctacctcgttctatgaaagaagctgtgttccatgaaagaggctgtgtccaattctttattgattcttttggataatttacttttatgaacagcttacggcaaaggccaacaaaatctgttttcatgaaaggccaccaggaagctgcattgtgagtataggatgtcatatttcctttcctgctgtgcacagatggggtgcagagtaatgtagactagtctgatctctgggataaaatggatctggacgcagacttcctgctaccggctggttgtgaccagatatgcacaaattagaaagcaatttcttttcttcttgcagaatttaaaggaccataggtgacttgtgttaaaagtaaagatacattggggaaatatatgatgtaatattattaaagtatcacataatctatttcttttgtttcatgtaaatttacggatatagttacatacggcttttcctgtgggtttaataagtgatttatttgtggtccttatgtttttccttctatctcccgtgttggtcagttttgaatcactatatcacagtctgttaatttgatttactgcaaagagtaaggcctttgtcgtcatgccaactactatcccccgagcgcacgcacgcacgcacgcacgcacacacacatctcctaccaacccaacactagtctgtgggttctcctcagaatgggcagatagcaaaagcaacaaaaaccatggcttgcttttgagatactgagtaagttttatgtaccatgcgtttataacaagtggttcattcttacagagtcagtcaggagtacttacattaggatgcctaaggaaattttacccagccatttgttatataccagataaaagacttttgggggaagggttataattcaattgtgtgggttggcaggggagttgagtgaatgtgattgaattctgttctcagtgaactgggtttttaaattttgttttgtttttctactttattattatttttaacaagcacactgaaactgaaatttgctagccatgtcttgcaggttttgtaacacctttcacattggcagctgtgcagtgcgtgctgtgtggaggaggctgacgtacagaaggaggcacagatcattggcgcagttgctctttaaaaccccacatgtccagtgataaacttgggaggaataggagagaatcacacaggagccaggcagcattgtttgcagtttctagggtctctaatggaactctgaatcccacagtgcactgtgagagcgagcagcatccttgggcatgcgtggtgactgtcctagtgttgggttggtaggagatatagctcaagtctagtcttctccttgtgattggatccacaggaagatctacatttttaagtgagctgtgatgtcatgagcacaccataaggcatgcatttctgatttgccccggagcctgtgcactttataatgtcagggtgatattgcaaggcagatctgaagagccttctgtagttgggcagagtgtttataggtagtcaggagtgattgattcagcatgtgccagatggtgaagcagtgtgaatgttggctgagggtggcatccatccaggactgtgaggaggtctgacttttagctacaaggcgtattgtcacagagtgagggagctgcttcatcaagaacaaatgtttgcttttgtaactaggtttcaattaactgacaatgaggctatttactttccaatagagatgaggtttgcgcatctgactgaacttttcttgtagtgatggggatggtgcatgtatgctctgggtctccaaggatagtagctgctcttggcttggggacagtttggtttgcttcatttgttctggtcttgtgttgtagagtttctgccttctgagacctgtatttgtcgctcttcttggtttccagtggcagagtgttccttcaaggtgtcaggtccttgttctgagtgcctttctacgtcactgtcttggcttgtcctgtgtgctcttctattctgtgttcatgctttctctgttcttgctccatgcccacttctgttcctgtcctgtggtcagccagctcttaccccacctctgtacgctctgctttttggcagcctgcagcctaggagagaataccgtgtctctcacacctagaggcctttggtctgaaaacaggaaatggagaccctgccctgtagtcagtcttctgtctctggctccctagaggctgaccttagccatatgtcttgttagccctggtcctcagtcagcatgaactggggacagaagccccagtttggttgtgactggggtggctctggtatagtgagtctgtgacctgaagacttacttgcacaggacatgtgactttcagaactcacatcaagatgagtgggacacccttctctctaggatgccgctccagggatcactgctctaggtcttgttagtaacaactgcttctggtccaaacttctgagatctcactgttggatggaattttctgggctccctttaggaagggtgagtccaggctgtgctggactccctcataagcctcctgctgtcctctgctgctgctctctcccatgcgttggctctgctgtatcgaatgccccccaatggacaccctggcatcccttccatcctcatcctcaccacctgctcctgtccgtagatggctgagcccagccagagaaagtcactctgtaannnnnnnnnnnnnnnnnnnnnnnnnnnnnccccacccccccacccccgcttcggagggcctcagggcagcctggaaatggaaccctttcctccttggcccacgctctgcacagtgactttgaatgttttctatgcttcccccccccccccccgttaatttattaattcattttcaaacctggtcaccaccccctcctcctcctagtcacaccgtcacatgaattctggagtttcgctctcacatctcattcccatttcattctctagtcagtaatcctcccaccacacacaagtcagacaggtaaatgctgatattgccggttcttcctgctgaccttagatacttctgcctgctgctggaccccaccctcaatttgcatactttctgttcatagttgaagaacagtccctcttaattcctacaaatcacaccactagcctatttttatatcctcatttgtcaaaatatgaatgtgtttaataacatgctgatgtctgttttatatacccttctgtgttttccaattttatatgatttatcatttttaaagtcagagcaaagttaaatgttcttggttgagtgtgtgtgtgtgtgtgtgtgtgtgtgtgtgtgtgtgtgtgtgtgtgtatgtggtgtgtagcacacatgcccaataagcctattattcccttatctatgggttacattataaggaaaacactctgattccaattgggactgaaatactcttcccccccgccctcaacttttctactgaacaggtgagtgtggccttcctatggctgccctgagagtctagctttccttttattttggtagtggcagcgagcgtttccgatgtaagaagtgatgtgaggtgagcttagcacgctggaacagcattgcctttgctcggctctgttctggtgcatgtggaactgtttccttgcctgagagcacggcagaaggtgtctgtctgtcctggggtgagcacggcagagggtgtctgtctgtccggggctgagcacggcagagggtgtctgtctgtcctggggtgagcacagcagaggatgtctgtcctgggttgagcacggcagaggatgtctgtctgtcctggggtgagcacggcagaggatgtctgtctgtcctggggtgatgaggacattcctttatgcctgggaaatgacctgacacgagctggcagccactccacgggttagtgcctgggtcatttgcagtgacaagtgtgttacttcacagttttgttttttgaagacttatttatttttatgtatgtgagtacactgtagctgtcttcagacacaccagaagagtgcatggaccccattacagatggttgtgagccaccatgtgcttgctgggaattgaactcaggccctctggaagagcagtcagtggtcttaactgctgagccacctctccagccccactttacagttttatggctggaaattgaagtggtttcaacaacatgagggctcactctctgcttactactgggtttggcagtagttggcagctgtgtggctgaggcagcattgtcccaaaggagtgcagatcctaggctattgtcctatgctggcaggaatccagatctgatggcagtcacgctcctgaaaatgcagaggtttttcatgttttcctctccttgatttacacctttatgctataattagtgattactaagatgctggaagactccacacagcttccacagagcaagaacaaagcagctttgcatctgacacctgtcatgttaaagccgagagtgcatcatcacgtgggcaacgcttgtgtgctgctgcgctttgctgacgtgtctcccaggatgtgttggtggctttttggccactatggaaggcatggctcggtgatggaaaactgcacgacgtaatttatattctaataatgttttctatgaaaagaccatttgaacctctacttaaaacaatcataaatgctatacttgaccgtatccttactaatcattatccttggaaacaggctaatttaccgtccacccactttagcacaggttctggagaatagcaatgtactctaagaacgcctcgtgctgtctcctcagaagctgaggctgctctttactttcagctccttcttgagtttggagctgtcttatgaagtagacctggcctgaaaggattttcagactttgcggatcggaaggagggttgttattgtattaccataaccacaactgaatggacctttacccttgcctgcctgtgatgctgagaccacggaagatgcacgctcccctccccaccactaacctagatcctggtcactttccctacatgcctctagaacagttcccatcatgccttgtccttctgaaggatctgtcaccacaggtgtctgttactgaccgcatcacaggtgaactgtctaggactctagaacttatgtcagtggctcctctccttactcagccacatttcctgtcactaaccaagtgacctccctgtcagtcacactggttttgcccctttgtgtgcccaggtcctctgtaaagccgtcctgccaggaccggccacagcctgtttacagacgtcagcagagctttccttctgactactgtctttcccattgctcatggggccaacattaggattgagccgtccagtcacccagtcagaggctgtgggacatttaggggcactgaggacatcctattgattgaatgaatgtgttgtgtactgcccagcctgcctggtgaaatgagcttggataggccaaactatggactcagttttctgaagactgcaaaacactaaatccatagctgcatttagttcaaccagggatgaacctaaggtattgaacgtgctagacaggtactctaccactaaactttgctccaccccgaccccagtgctttcctttccagacaaaatctcatgcattacccaggctatcctcaacatactagaaacccaggcaagctgtgaccttgtgatcctgatctgctcagcctcctgagtagctgggattagaggcctgcatccccaggcccgatggcagtggtattgaagtctccatgagcctgccctgtttacatggtgatgttgtagcgcataccctgtagtagttatggccacggtgattgattcacttttaatgtccttatgctaactggtttgcatggcaatacagtcagcatggcctctaagagtacagctctgttgaacctttacaactgagaaactgaccattttctatggcttttttcatgaagtaattgcccaccctttctgtttagcttctgagaaggagaatctgagttcctcgaacactatgtgattctactcagcagggtggattatcagggtgctgatgcattttggaaagggcagcagcccagccccgatggtctgctccacaggatagatgtaccagacgcctgctcagcgtccttcccacctgacctccacctttgccatgttccctgcctgcagcagaggcagtcaggatccactttacactctcagaaacagaggcagaatcacaggaaaatcaggctcaggagttcgctagctagctggcctctaacaatatccccatctacttctggaaatttctatccaactttgttcattttctggcttcttagaaatttaaattacatgtttactaaaagcaagcagtcttttgttagttacaggttttagcatttgtagcaaggccagaacattccctttcatatctcagggtgaaacatttcaattctgtcagagctagagagaggtgttggagttttggaagggtgactgactgtgtttagctaagggaggtgagtaattatgggttttgttctgaattccacagtgtagaggtgcatagctcagggatttcagggatatgagaggatgctgcagatcaagggaggaaagctttgggaactgggaggggactcaagtggagggagcttaaatgtgaactttgcccttttggaattccaagcttcttgactttgggtaggttgctaatctcctgatttctgctactcctcctactcctccatcagtaaggacacaaatacttgctgcatagaactcccagggatttttagagatgagatccaagtgttgcaaacaatgcctacaatgctgtaagcactcaaaagttccctggtaatagagtagtgcttcagcgagccacttgtagaccaagccatgtcactcatggaattactgttacaagtttcaaagaactgataacaaacctattttaagcacagctttgcagtagtgaacaggcccggccaaggtgggtatttcataggaataaatagagactagaaattaatgttttctaagacccgtgaaaactccttctatatcactgtccaccagaacaggatggatgaacgggctcacagattgtgcctttttccatagcaagtttactgagacacttcatcctgttaacagtgacaatagagtgctgtggggatgatttggtgggtgggtaaggcgctaaccacacgggcacgaggacctgagtttgtctccccagaacccatggaaaagctggacactgtagcacacatgcttgcaatcccggtgctcgcacacggagggagatgggagacctaaattgtcagtcaagctagtgagaccctgcctcaaacaaggtgaaagatcacacaaggtgaatggcggctaggaccaacataggagattctcctctgacccgaacatggcacacatgcacgcacgcacgcacgcatgcacgtacgcacacaaacacatgatgaccacacatttgctttctgtatatttggagatacatccatgtataagttagaggtggcctgtgttctcatgtcactgtcagataacaggtgtcacgatgggagaggctccattccaggttaggggtgctaggtgtacaagcggagtttggtagagttctcaagttggccgaggggcagggccatggtgaaacagtgaagtgtggggagcaggatgggcagggtggacagggagggcagggagtggcaggtcctgctcagaggacccactgggcagagccctggcacactattgggagaaagccaattcctgctacagaaagtgtgactgttcccttgtgttgttggctgtttgcacagagctatcaacgctgagtgtcttgggaggtaacagtgcagaggtgtgtgtgttctcaccctgcagttacactggaggctgtactgttttcagcacaggcatggctgctactgaagccaagcatggcctggatgtttccccgtgtgagtctcctgtgagaggagcaatagcgggagtacagcataggcttcagtcatgtgtggatcgaaagcggtcacacactctagtgtccagagcagggctcgcactgcgtcagggctttggcagaggacgacagtgagatctgggttgatgctgacaggctggatgctgactggtatgtttccattttcaacccctgaggcctggcctggccaggatcaattccggaacgcagtatcagcacttgtaattctaagtcttttgtgcatcccttggaaggaaccacttgggaaaccttatcagttgcagattcacaaccaaatcagtggccattgaagtgcttggttcgaacaccaggaaggagagaaccctttagataaacacttaagttaagcgttgttaggtaaagtgtgtgagtgtgtgtgtgtgtgtgtgtgtgtgtgtgtgtgtgagtgtgtgtgtgtgtgtgtgtgtgtgtgtgtgtgtgacagaattttgagaaaagaatgaaatattttatgtcacatagaaatattctatgctttctgtatattcctggtcctttctaggttctgaggagcccagtactggtgtggagctgcactgcaggcataagcctttctttggattcctgtggatcacaggcatatttgcgtgatagatgagaaaaaccagacttctcttgattctcctttctggagaggggaaagtctgtgtctctgaaagatgtcacatatagcctaattgaactgcctggtgtagcaatgcaattgtgtacctgcatgtgtgcactctgtgtgtgtgtgtgtgtgtgtgtgtgtgtgtgtgtgtgtgtgtgtgcgcgcgcgcacgcgtgtttgtatgtaagggtaggttactttctcagggtacaggatccgaggggtgacagctactttgtgctgatgtttcttacccttgggcctgtgctcttggatgaggtcgtgaatctgagttaatgtaagagaaatggctctggagcagatgtaatgagaaacactaatggacaattcttccaagtcattaaggtgaattttttctatctttgcaatgaacagtttaggagcaaaactaaattcatttctttctaatagaatacaaatataatttatagtaaaagctaaaaatgaggtgagataaagccaaaaaaaaagttagtctcacaaaagcaaagattaaaatgcttaaattttatattacaaacactagtctcagataccctgtttattttatagttactctgatatctctgaggggatgagtccaaattcatatgtgttagtacttacatcagtaaattgagttttgttagatttagctgactgtgtcttgtgtcatagtaatatttacttcaagttaaaagcaaacatttcttcatcttattaagtagatttataataactgtgtcctgttttctgaacacttaaatataggctacaggtgcatttttccaaatgaagatgagtactctgggttatcatcctccctattttgagataagtagagatttcttaatacttgagatggactttaaaaaatagttaatgatatatgtaaaagataaaccagggagctttatggttggtgatgatctgcgcgtgcgagcgtgcacacacacacacacacacacacacacacacacacacacacacacacactgtagctatgataacatttaaaatttaaatttattggttttacacgagtgactgcttaccataataagtttccctgaccacggttgagagcatcatacatctatgcatataaacataaatacctacaggaccgtcctgcatatttagcattttagatattgtagatatttagcaaaacaacatcactagcttctcaccttggacctggaaccttccgtagctatggttttgaccatatgtactttaccgtgcatggatttcctcctgtggtgcaggcctcagattcagtgaagagggtgtttgtagccccatagagtcttgcttcagttgaccagtgggcacttgtagcatggagggtccaggactggggaacacctctgatgccttctaccctgcagcccacatagcagcggccagcactgtgagagctagcccacaggacagggagtttcctggtcagttcaagggtgatttctctgtcttttgcaaccaaggatagcattttaaaggtctaatgtttacagttgtttcccacaggaagatgtctttcatccacttagtttaatctagtgtatacacttagcctgcttccagttaatagtcaagtgtctctctatacccactttcttggtaaaggattgaagacttgactaatggtgtagccaggaaagagaaaatgtaaccctgtttggaaaagccctgtcggaacttattagcaactctcctggtttttcctctttcccaaacccaagttcacgcagtcctacaccacactgagactggactgcccggggcagaattcccggcatagttgaggccttacccctattaatttctgccagattccccaagccacaactggcccagtccatttcacaccagcaaaattcgccttcacctcctccctgccctcttgctgactgtgccaaaggcattgttatgtaagtatgccaagggccagtggttttgccagggcactcccatacctggttggtgtcccagactttatggctttctgctgccattgtcttggctttgaattcagcctgacaactttgactgtttgacaaatgttagataacccacctcccttcctttagtaaatataccagtgctaagtattatatgacttgtacctgatggaataggccctatttctcaaggccagtggaaggaattcgtgggggaggtatgcttgaggggtggggcagtgggagggtagaaggagaaaagatagagaagaagtcaactgctgattccagaacaggcaaagccggcttctctgggtagacacaacaagcctgtgtgtggtgacaaagcccagaggacaggccagagatggcagtccgcgcaacaaggctgaagggtgacggtaaggagagctccaagggcggtaggccagcacgagggtttggagatgagcctgggctggagtgctgctctgttcactgcagggacttgggcttgatggctctgcttctcagagggcagctcagcctcagtactgccaaagccctgtctgtctgtctgtccagctcccactgtgctcggcagtgtttactcattgtttagctgtatgcttagctgatctgtggtgcggctggcttgacttgctcggatgctgagacttcttaagctggtttcggtgtgtggtgttaggcatcaaacccaggtgctttgtgggcaagagctatacccctgaggtacacccgggcccatttattaagttctctcttttgctgttactatgttacatttctttttgtcagcaaggaaacactttgtctcctaccatctgtttctctgcaactgtccacgtggcaggacctgggtcctgatgttttctttctgacacctgagcctggggaacccctttgccctttgctgactgtcttagtggaactttttttttttttttttttttttttttgagtttctataagtgagtagcctggaaatgttgctcaagttgtgcttttgcctagcatactgaacactttgggttccattcccagcaacgcacgcgcacacacacacacaccacagttacacagatagaagtattgttttggtattaaacagatcttcgtactgagggggggggcggggggggagcctcacctgtcatctcagcactggggaagctgggactagattaccttgagtttcagggcagcttggcctacagagtgagttggagaggcccatttggactacatgagagcctgtcttatgaaaagaaaacagaaatgcggggcaggattcttttagcaactcgttgtacttttaaaggcgcatggaaacttccagcagagctgctgtttgcagagcatcatctcttccgaaccgcaaatgcttgactttagcgattctgatctcgcagccatcagctccactatgcaaccgttaaacaaccccctctcacagagcagtcacagatgcctttatctgtgtgtacatcagggagggggttaaagattatcgggagaattatatttgttcatagtgatataggtctcctctctccctgatggaagatggaaagcagactggccgagagaattttgttgttttgcttccatttattaagatgttttccaaaagcagtgtcagaaatttacttataaataacaaaacagctacaataaatcaaatgttcaaaagtaacttttcagagttcttaaaatatagtgactcaacacatgcaaatttcttttttaaaaatatttatttacttattagtttaagtgtgtgtgtgtgttggtgtctgtgtgtacatgtgcaatgtgcctatgcagtgaagtcacaccttacattctggatccccttacttccactttcttggctgtcagtgcagccatttgcccctgagcctggctctaccattcatgtttaggtaagtgagacaggatcttctgagcttcaggtgggtcctcagtcttggagtcagtttgggaggtcacagtgagcttttagaagctgaagcgatgggcatgtcagaatgcgcagcaggtaggagaatcatgagacgggtcctttggaaccttaacttcatctaattgtagggtctgtccatgtcactgtgtatagtggcttatacacagaaacatttgaaagtcactgatctgggatagtgtaggttttacccaagtatttcagggtgaatttaattatgcacaggggaagtgctggttactatgtctttcttagctcttttccacagctaactgagtaggctcagagggagcgttctttagaatttaagaatttctgagttggaggccagcctggtcttttccaggacagccaggactacatagagaaaccctgtctcaaaaaaaaaaagaagctggtggttacgatggtgttgttttactgtgtcctccttccttcactgtctcccactaagatctttcaagtcattgtgagccacattcagctgatcccattgtcacatgaagcatgacgcacggaggaggtgaccactcagactgtaatttccaaatttaagtgtattttctttgttctacactaaatataatagttccggatccttcatgatagaatcaagctatgtgtccccaaaagcagatgtcttagaaggtgagtgtgtgtcacgcacacacacacacacacgcacacacacacacagtggacagtaagggaaggcagactaattctgtgaggtcaaataagagaaactagtatcccttctaccgtgaaggctttgaaacgtggggactttggagactgtggtggtaagtgaaggtagaaatgagagctgctgttgaactgataagtcagagggtgaaacggattattacttcaatactgaacattcatagatgaaattaggatccttccctccctacctccctcccttctttccttccttcccacggagtcttgctataaggctcaggctggccttcagttcatgatcccctccccttttcttcttttttcctttgtggtgctgaggatagaacccctggccttatgcagctaggcaagcggggcaccagccctgatggactttcttcctaacaggttacatgcattctgtgtttaagtattttctaactataaaatgaggttttctcatatacttggaatcttattcagtatgatacttataagattgcaaaccagaatttagttccaggttttgttcctttatttgtcttgaaaaaaaaaaaaacttttaaaagaattgctcattcttttcccttatattttttctacattttactttcagcatttgatctctttaagaaggtagaatcattttttttcacattagttttttttttcccccacaagggaagtcatgatacatgcgccctttgttagagaattattttataattgttcatccggaagcaattcacaagttcctttatagccaactgtagtaagggtgaagctggtgttgtgactgtgcagacgtgtcatttgtctgtgtccttcttatttacttagtcaccagtcgtccctatgtttgtatatttaaagacaggttcctttaaaagtaagccctgcctcttgcgacaccaactgtgagagaagtcggagctgagggcaagtctctgggtgctgagttactgggtaatgaaccctgtggcagcaaaggacatggaaacgtgtgggactcggttggctgctgggagggtgatggattttcattgcattaggaagggcatggggtacagctcccactctttacttgctcactgtagctgttaagaaggtttgtttaaggaagacatgttgcacgtagttgaagttggtgtttggctgcagtactgtccgacagtcataggttgacagctgtgccatgggttgctggagtgagcaagtagatggggatgtgttggttcctggggccagagccctaatacccagtaatcagggtgggccacagcctcagtggtgggaggttggtgttttcacatacggtgtgggagggtggagcaccacggggagttgtcttaggtactgttctgtggctctgaaaaggccgtgactgaggcaacacctaggaacgaagaatcgaatcatgggcttgctctacagcttcagaagttagtctgttatcaccatggtaaagagcatgccagcacacaggcagaagtagctgagagttctacatcctcatctgtaggctgggggcagaggggggcaggaacaggacttttaaacccccacagaatagatgtggccttgttgtgggaagtatttgggttctggggatgtgaactcaggttgttaggtttccatgcaagtatgggtactcactgagctgtctctcattctgaattttgaaattttttttttattcagttttggggatagaatttggatacttgcatattctaggcaagattctaccactgagccagaaccccagtgctggagtgttttgtaggcagtgagcatccttccgattcccctaaggataaaggtcattatgccttgcagacatcatggcacctgaggtgtagccagcttattctagctcctcactgcctgtgttccttgtttgctaggaaggcagttgctgttttcctcggtctgatttgcagagttccctgtgccagcctgtggctggatagccagcccggggcttaagttgaatcagcttcttaagttgaatcagcttcaggattgggtgtgtagggggcaggttacccaggccactgtttatagcaaggcagtagtttctgggcgctgaggtgctcttgtctttgtttgtcttgtggctcctcagggcagcctgtgggaaatgggaaagtggaaaggcctggtgtcttaggaagacaggcctgcagagggagtgaaataatgtgtggggttcattctgagaaagagttgaaggagttgacacccctgcggtgttcctgtgcccacattgactacaaatgtgcttacatctggacacctgccaaacctccttcctataaacgggtgtttccacacagtgaagctgaggcccaggaggcttctattgaaaccttcccatccttactgattacagcttttgctatggagatgctgtgggctctaaatacttagaagccatatattgtttctcattttccctttcagctttggagctgaggcccaggggctccttggccaggaggctgctatgtccacgaagacaggtgaacttagtatgagttggtttgttcagccaccagcgtgaactgtgacagactgggtggcttgttcagcatgtctttctcctcttcagttccagaaggctgagattcagacacaagctgtgtggggtctcgctgtggcttgaccactgagccatccctacagctctttgttccttataaggacactaatcctgtcataagtctcgtggtttcctttaaatccacgtacctttcaaagaactcaacttaagaagctctccctttgagggtggattatagacttagctcctttgaattttgggggaacataattcataactgtacatggatgaggctgggttaattttcaactgagagtcattgctgctcccttctcacagacgctatgctgggtccgcaagcccccgacttgctttgtagctaggttgttcacactgttctggacactgagaaaacaagcaaagcctaagggcttcggaaagtccctccctgcaggtgaagagccagtgtggggcttttcctgtcttccctccccttcccactgtgtctacagagggtggtagaggcagggttggacattgcagagaactcaggacgcctatgaactctatgccattttagtgtcagcttcagctccttgtaggcatgttattggaacccaagagtatctcacagtagactctagaagggagaacttcatcttcctggagctgacagaaaccaggaggttgtctctaagaccttgtctctaagcctctctgtattctcactcatagaacccataccgttgtctcacttcagatttccttggtgtgtttctctcagctcctggacactcagggccctgttttactcaccgcagggcgtcagggtctgcctcccagcccgtgtttaggagagaaacatgaagatgagtaaatgcttgggcaagctctcccgttctggcctcaggctggctctgttgttttcttcctaccttgcctttgatgtccttcataactaagtggcaacttgttgttcacagaaaaacccatgaggtagcctgaagagaggtaagtgggaaaacagactttaattagctgtatctgagctgtgtaaataactgttcccgagggtttagttagagacaggcgtcctccaaagatgcagacaaagatatatcccagtctccacactgtagaaacagaaatcaggtctagttgttgtacattctcttactaggaaacattttaagatgtccagaaaaacacataattgcaaccattgtttctggcttgcaaatttcttcttgataattatgaaaagtgaacctttgaactgttgagtatgaagcatcgttctgtaggattcacactgtggttgcaatgcagacttttctgacacggaaacctggaatgtggtagaatgagtgactattgttttaccaggaaggacacaggtggcaaaggtggcaagtttgggattaggttccgggtctttctttaaggctttctcttgtacctttttactcataacttcctgagctggaagtatgtgccacaccatcagtggaagctcccagtgacacgtaggaacttctggaggagtggtctcactgagctttcattagcagggccagcctagccagaaggacctgggttgtcctggaggggaaggtctggccttctgctgtgctgtgtggcctgaaggagccacttgggacctgggctcttggggtcgaggctgggtttgatggtaagagcatcttcaggatttatggaggaagtagagactgagtttattcagggaggggatggaagtgtggcttgtgtcccactttgtaccttcctcaggtcctggagatatactggggtcgagcgtcactgatgcggtttctcgcttctctgggtgtcagtgagactgactctctcttcccccacaaatgcagttgctgatgcttttgaaaaggcaggtgtcagggggatcagatgtaaagtagagatggctttctctgagagatcactgactgaacaccgtagttactcagtctccaggggaaaggggggaagatgactgctgacttcctgcagtcttgaaattgggttcttctggaagcacacaaagctgccatgctgttatcaaagtgtgcatctcatttaaatagattaccaaacataccatctaattattgaccatgatagtgctggtgttagttacggtgccagaataactccaaatcaggagaaaatagatttggaaaaattgggagagcaaccgggagtgagtgaggtggtgtggtgaggtaaaatgtgagctcagggctgaccttgggcttccactctgtcggcctcagtttcctcttctgtgacaacagggaagtggtccaggtctctctgcaaaggttcagccattaggtcctttgaatgttgagcctcttgtttgaatcactttgatgagctgagcccagtcatgaattctctgcattagtattcagttcttaaaagcaggagtgtttgaggctttgaaatcgagtccagcaggaaatttcttctggtctgtaatttccttccactcaggagtgacagggccccagtctgcctccgtcctccatcaggagtttgaggcagtgggatgacttctgattcgttttccctcccaccttgacttctgtgaatataaattggcatggcataaatatttaagcactgcattaatgttcagatgaaagaatcatgcagaaaccagaacaatcaaagtaaattagttaaaatttgcataacgttaaatatggtagcctttgaggcttgtggacagtggttcctggccagccactgcaccatagcaggtagcagagataacttacctgtgcatttggtatttaattgttaatgatgtgggctgggatataataacgggcacttactaataaatctatgtgcagtcctcaaatgtgctgatggggtacccgtctaggcatgtgacagtggagatgctggcactagggaatgttagtagcttcctaaggaaggactgacacacgaggaaggaggagagggtgccttgtgctcctcagttagggcaaagcacaggcaggctcccgaacgccaggtacagagagacacgattagtgcagggtgtgtggttgtagaacgcttactcgatagcttgtcgggctaaatctccagctgcactgggcctcagtttccccatgtgcacagcattacatttatgatccctcaggggttgtgaggcgcacagcacacaggacgaagatgcggaaattgtgattcagattgtgttggacagtctcctgtgtggcttcggctgctgctctggggcttaggtgactgcaggtctctgtgctgagctttcctgcacacagatgaacccaaaacaaagttcaggctagctgggtggtttttcctccacttaattaatcatgaatattgtccccttcattatgttttctagtgatatctaattttatgctgaattatattccattcttagatatttaaataccatttctgctatttcaatatttgaggtcatgctggaatcaatggtcttgtttatttttaagattttattcctgtgatacacatagggatgtgtgtgtgtagggggtggtggtgtctgtacatctgagggcatcagatcccctggagctggagttgaaggcagttatgagctataatgtgagtattttcattttctccttctcgggtcctctgcaagagcagaatgcgctcttaacatctaagccatctctccagcctcctgaggtcaacattcttatctggatgcttctgtcaacatctgtcttttctctagagctggaattacccagtttaagaatgttaatgccttttgctatatattgccaacaactcttcagaaatggagttgtaaaatataccttctcaaaaatagattattaagagtaaactctaaatacagggaatgaggagggaaaaggtttgtttgtttgttttaatgtgtctgggcttaggtgacaggggcaagaatagcatgcatttttagagaaggtaaacacaagtcaaggagagtcagggagcagtgcacaggcggggagcagtgcacaggctggtctgtactttttttttttcagagcagcttttatggttcaaatttgaaggaaagccatgatgctgtgatatatacaatatcgtatatatactataacatataggcgactgtgaaaagcagggtaggccctgatgagctcttcttgccacagatggtaatgtgctgctgccacatggtcacggcctctcttttgcctcagtggaaagctgaggaatgagatgatggtgttcgtgggatcttgttctgcgtgacttatcccttagttatgcgtgtgagtgtatgtctagatgcatgtgtgtacattgagtacagtacccatagaggccagaagagggcgtcagatcaccctggaacatgggttacatacaggtggttgtgagccattcattgtggatgttggtaactgagcatgggtcctctggaagagcagtaactgttgtaaactgccgagccatcactctaccacaaaggaattggtgtttggattgaatgaagtgtaagttctttgttctctttggccctctctagccctgggactcactgcttgactctggtagacagacatagagggaggatagataggtgaggaaaactgaaaacccgctcagaaggcctactcagtgtgggtgtgtaggagggggtcctaaggggcagagtggaggtcctcctggggcctctgtggaatctgaggggagcgctctctattggatgtcagatgctctgcagccctcaacactatgccaggctggttgagtcaatgggtaagttcaactcctctttcatcaaaatgtttaactctcaaaggacctccaggtcatctggcttagcttttcctttgtacagataagtacattttcattattcatttgtttgtttagcaatgatggagatcaaacccaaggacccatacatgccaaacaggggccttaccattgagttatagccccaggaaactgattattttcagttgagcttcaccatgtaaacaagtgaagtttatgttgctcctttaaaaaatgtatttgttattacgtgcgtgcctgtctttgtgttggagggtgtctgtgtgtgtatgcacatgctgtggagctctttggaggtcaggtaacagctctcaggatgagttctctccttccactgtgggtcctgggcatcaagtgcaggtcgtcggctgagcttatttggcttatcttacttgctgagccacctcccaggtcctgtttctttcttcctcctccttttcttccttggtcttctcttaatttgtggaatcaaagagcctaccttggagtggagttggatgctgagagtcctcagctctcacactaagatggcagaactgtagcgggcacatctggtacagacagcagagctgagagccagcttcactctagtcacttcttcggcctggggttgtgggctcaggtctgcctgcagtgctgctgctcacaggggtggctcttcttcctgtgtggctcactgatgcttctgagtagtcttggacagagaatggctctctcctctttatgttttagaaattatctgctagttactgtattgtaattcaaaataattttttttctttttccttgtagtgacggaataatggccagtgctttctttaggagagtgccagtggctctgagcacaccttgtgccttttaccactgggtgacactcttagaccagagtgctgtaccagtggaacccagggcccttgaacctcagacttcttcaaaacactttatgcaggagaaagggacactcttccatctaaagtgcatactggccactctcagacatgataggtattatgtatcagtctgaagcaatttttaaggccagtgagtattgggcaatcaattattaacaggatcatcaattaggcagcctttcagttgcttggaggtttatttagattcatgtgttgcatattaactagctactaattatttcaggggaacatttatatgaacttattattctagtatttattttgcacctgacacaaatctgtgttatctgttggtggctaaaaccttggtgatggcttgcacatactaatggatgtcacagcaaacctttggcagtcagaagacagtatgaggaagttgtttctgtcctttcctcatgttaaatttgggaactgaactgaagtcctcggggctggcacacatgccttttctgctgatccgttctccagcccagtcctgtgtatggacttccactgagccatcttaagaggaagcagagcagttacttgggaaaatgaacacaggttccctgtacagatctctagcaaatagaacttgtctagaacttgtgccaagcacttgagagcaggttagagaaggactttgctcagagcgtgtgctggcctgcctgccctccttgtttcacggcttcttttgtaaacccaaggcccaccgtctaggcttggcatgaatagctcctagtcacattcagcggaacaacatgtggtatttctcaggacaaggaatttggaagagtcaggtctctcctctgctggcttaagaggagggatgacaaaagttagaattttaggatcctgacagaagtatttactgtatcccatggggacagaaagaaatgacagtggcagagtcagagaagaaagaacctagtgaggttagtgactccagtgtattttgatccctcagtatgtgcatcctccagttagtacattgttgggtgacccttagtgtgatacccagtgcagggggtgggtgggctgtggcaagcaaagcaatgtgaatggagtaagacttgaggcacagcaggtctcatgggactcaaccaagggcacaagtaattgacagccccagatttctaatagatggtgtcatggtgtgactgcttctgcttcatgtggcttaggcaagaggcattgtgcttgaggtgggaagaggtggtggccagaggtctttctgctgtgctgttagaatctgtctttgcagagacacaccagagatggtgtactggctagttttgtgtcaacttgacacagctggagttaccacagagaaaggagcttcagttgaggaaatgcctccatgagatccagctgtaaggcattttctcaattagtgatcaagggggaaaggccccttgtgggtggggccatccctgggctggtagtcttgggttctataagagaacaggctgagcaagccaggggaagcaaaccagtaaagaacatccctccatggcctctgcatcagctcctgctccctgacctgtttgagttcctgacttcctttggtgatgaacagcagcatggaagtgtaagctgaacaaaccctttccttcccaacttgcttcttggtcatgatgtttgtgcaggaatagaaaccctgactaagacagatggtatggaaagttagcttctagggcagaggactaagtgttaagtccttgggagcaggagagcgctgggttgaatcttccacttcagttgagataagagggagctatcccatttaggaatactatgttgtttacaaacaagctaggtctttgaaagatgtatggagttttcattgttctggaggatggaattatatgtgggaggaaaaccataagagatgggtgtgtgtgtgtgtgtgtgtgtgtgtgtgtgtgctcgcacgcgtgtgcgcatgtgtgtgtaaggctgctgtgggagagctggatcctgatattagaagtctgcctgacgacctgattatggaaacatgggaaggaggccaggcagctgtgcaccatctcctcgggtgatggatagagatgctttgcttctgggactttgatctgattagattagtagcacattggtttgtctaagacaaggaaggatggtcaggagaaatggagcccagagaggagcaggttggcaattactacttgggatgagaagtgaagagggaatgaggctcctggcggtggaagaggatgggtttcaaatacattgatggacaagaatccaggatggattggttcttcatggaggctttgagaggacgccacccaagatgggtgtgcaataaggaggttagaaggacacaggatggcttctgccaatcggaggctggcatgaaaggtggcacagtggacatgtgcattagcctgggtttgtgtgggtgattgctgctgcagtggcagctagtagggcgaggtctgctggcctgtggcccctcagtctgtgtagtgtccagtactgctgtaaataaagaatgaggtgaggtgtggctgtacactggtcccgaggtgggtgcagaagcccacagtcagcatgttagagcccaagctagaaaagatggcgacggcccttaggcttactgtagaaatggctcatatggcaatgtgaagggagagtttgcattgttttcagatgcaattgtggggggttagggtgtaaggctctggacctgttcttggacacccttgtcactgagggctaagaagcaataagctttggtgcagaccccaaagactggctttctaatgcagcagatgggcaacagcttcaacttggagaagaggctaaggagactgttaactgtagggaagccagaagccaattagtcctgagaacgtttcttgataggatagggatgggagctggaacttgtgcagtgttactgagcagcggaagaaccacattgctgtttttagtgatgcatttcctgtcttggctgcctgtggaccatacttctcatgcatggaccttgagggccatgagtacaggaccttttatctgaaagagcctctgattagcaaagagtcacaacctgccctcagaggacgattgaggaggagggtgtgtcttagggtttctgttgctgtgatgaaacaccatgaccaacaagctagttggggagaaaagggtttattggggttacatttccatactggcatttactggtgaagggagtctggacaggaactcagaacagggtaggaacctggaggctagaactgatgcagaagcggggagctgattattggcttgcttcccatagcctgctttcttatagagcacaggaccactggctcagggatggcaccacccacaatgggctgacccctcccccattttccactaattgagaaaatgccttacagctggatctcatggaggcatgtcctcgactgaggcttcttcctctctgatgactctagtttgtgtcaagttgacacacaaaaccagccagtgcaggatgtttgctaaggcttttccctttgtgatattttctcaagagtcctcagactcagtcatttgctggcctaatccctaattgattcctgggtttgataacccaatctgttgttaggacctcggatgatactaagcaggtattgggctctggcttctatcttcatcacactgcgctgtttccacgtcttcgagtgggctagctgtctggtggccttgcatagatgtgcttctgattgccagggccaaagaagctttctcccactattatacacaccttaaagaattaaataatattaataatatagcttatcatggcattctaaactctgcccttaaaggatctgagacacctaaacattgtctctcatagcctgccatgtggagagtttttatgtatgcatgtatgtatgtgtgtgtgtatgtatgtgtatttattctgtgatcctgccctggcttctgtaggcaagctccctgcctctgagccatatcccagcctggcactggtgtctttttatttgccttgtcttcagatttgtttctaaagttgtctgaatattcaccttcctttctaaatgggcttattcaataattgtcctttactctggctttcctcataattggccaactttagacacggtgtgtttttggcagtgctggctgttgaatggctagaaggtagagggaatacagttagttgtattacccactagcattcttggaaagcagcccaaacttttgcttgctgattggcagcatcacactcttctgatgaagccacagtgcaatctagggtgctacccggacacaccattctccttcctgtagccacggtacagacatgaacagcttgtggttaattggcagtataaattcacagtaacaccaaaactcgatcttacacacacaggcctagtgaacgttctgtctgatgtcagcaacatggaatgtagacttgtaaactatcatagtggctgtcagctcattgcttatctgcctgcgcctttgcatagggtttcatggagcattatacaagcaatgcgtctgtgaggagctcccctcatttctgtttccatccttttggagttccatcaactggtggttaattcatgttccacgagatatgtgggggagtaaatgcattgcaaatgtggactgggtgtacctgcttttctataagacctctgacatttatgtcactggcctatgttcaggacatatatttatgcagagcagattaccaaaaagcccaatgagagaggaggccactcagttgaagagatcggactgaatcaaggagattggggaagttcttgagggtttctaggccttggcaggatgggatccactcagggcctggcctctcggggattttctttctctactttttcactttctgtcccttctctttcacccttctgtgtcaagactggaaaaaaaaatgaacagagccattgacttggttcatccatattaactcatcctgtcagacttgtaggatgcagtcatcatccattttcctggcaccttcattaacggagaggtagatgttgagctggtatgttggggcacggatgggcactgctggcctcaggtgggtcccacaggacttctcatgcttagaacatgccacagctattggattgttggctctgatttccagttaagaaagttgagatgcagagtaagccatttaattaaacaaaaccacataactgttgaatgacctaagcaagggcctatctagggtcactggtcctcaggccagctccttctcattgtgtgcatacatggatggacatgtaatgcatgctttatataatagccagtggaaccttatggaaagtatataaagcagacagaataaaaatgttccaagatgcagtatagtattaacatgcatccattttattctgttaagtttagatgtaggattactatgcctacatttctaatgagatgtgaggccaaattctaatagcattgtaacaacaaagtgattcttagttgatagtctcaacagcagtgttatataaactgtgttcactgaggtgtgtttattatgcctacagagaaggtatccacaagaaagtgccatgtgatgatctgtgtaaccaaactggtattattagcacatggaacaccatactgtagaattgccctcctcccaccttatgtcttcccttcaccatccatgcctaaggtaacatgatatcgaacaaggggttgtttgactgctatttacttaaattagacacccagatggttcttttgtactactggcacctgattggccctgacactggtccagtttatcatggctattggtatgtgctctgactattgggtatttttgattccccttcattgtgccttcatctttcgccatcttctaaatataaagtatgctccttgtttaaaaatacattggtgggggaggggagctgaaaaaaaaactgatgagaaagtgagtttggacattttcccaagaacgtcattatgtggtgtttggacagcaacatattgggagcagatcagttgagattatatcactattttaaatgggccacttgggaatcctagggtcccctctaaccgtcatagagcttggcagaatatgaaaaagtaacactgctgtgtttatgcagataatcccagaggagcgccttttcccagcctttctcctagcagatttgtgtccacaaagggtccttcaagtatttgtcaaatgcttttgggtatcagacgatggctccttgtggtagagtgagtttgtaggttcacctcaaggccaggctgtcctaaacactggcagatgaggccagttccgctggagagagagacttgcactaactcattttcctgtctgtctgggaatccaggggcagagggaggagattgctatggatccaagaagccccttccagttttcaggctgatccacgcctaagtttgccagctactgtcttaagtgttttggggatctcagctcctagcgtttgccagtcttctggagccagtttggggaataggttctcggaaagaatgtcttgaaatacttttagcattctgggagtagttgttgcagttcaaaagttcagttatttgggactgactgaattctgctgtatgtgtacgcatgcatctggtatatacattgccacgtcctgatgcttccagatagaattggatttaaaaaaaaaattggggcaaatgaaaattggcataatctctaaattctgattttcaaccacgaaaggttagtttttttgcattttgtttgttttatgtacagatgtgcaaagatggaccaagaataatagcctgatggtgcagctcagccacaataagtgtgtgttctcttggcttggtggggaaggtttacattgggaatcattatctaactcagaaaagcactgtctgtggccattagaatgcagtgtattacctcggtaatgtggtaggcaggcctttttaactctgccataagggtctgtgtttgtagctttgctggtagaactgtgggatgctgggctggggagagcacttaatagttaaagatgcttattgttaagcgtgaggaccgagtatgatcccagcgtccatagaaagcgttgggcacgttggagtgcacaggcaactacagcactggggaggcagagatggggcggcggcactggcggcgcggcggtggtggtggtggtgttgttttccaaaaattaaaaacataattacaccatggctcaggtacaccactcctaggcagatacccaaaggaacctgtgtctgcctagagacatgttccttgctgctcttctcacaacaggaaggagatggaaagagccaggatgtccatctacaggtgagcagacatagaaacatggtatacacacacagtggaattttannnnnnnnnnnnnnnnnnnnnnnnnnnnnnnnnnnnnnnnnnnnnnnnnnnnnnnnnnnnnnnnnnnnnnnnnnnnnnnnnnnnnnnnnnnnnnnnnnnnnnnnnnnnnnnnnnnnnnnnnnnnnnnnnnnnnnnnnnnnnnnnnnnnnnnnnnnnnnnnnnnnnnnnnnnnnnnnnnnnnnnnnnnnnnnnnnnnnnnnnnnnnnnnnnnnnnnnnnnnnnnnnnnnnnnnnnnnnnnnnnnnnnnnnnnnnnnnnnnnnnnnnnnnnnnnnnnnnnnnnnnnnnnnnnnnnnnnnnnnnnnnnnnnnnnnnnnnnnnnnnnnnnnnnnnnnnnnnnnnnnnnnnnnnnnnnnnnnnnnnnnnnnnnnnnnnnnnnnnnnnnnnnnnnnnnnnnnnnnnnnnnnnnnnnnnnnnnnnnnnnnnnnnnnnnnnnnnnnnnnnnnnnnnnnnnnnnnnnnnnnnnnnnnnnnnnnnnnnnnnnnnnnnnnnnnnnnnnnnnnnnnnnnnnnnnnnnnnnnnnnnnnnnnnnnnnnnnnnnnnnnnnnnnnnnnnnnnnnnnnnnnnnnnnnnnnnnnnnnnnnnnnnnnnnnnnnnnnnnnnnnnnnnnnnnnnnnnnnnnnnnnnnnnnnnnnnnnnnnnnnnnnnnnnnnnnnnnnnnnnnnnnnnnnnnnnnnnnnnnnnnnnnnnnnnnnnnnnnnnnnnnnnnnnnnnnnnnnnnnnnnnnnnnnnnnnnnnnnnnnnnnnnnnnnnnnnnnnnnnnnnnnnnnnnnnnnnnnnnnnnnnnnnnnnnnnnnnnnnnnnnnnnnnnnnnnnnnnnnnnnnnnnnnnnnnnnnnnnnnnnnnnnnnnnnnnnnnnnnnnnnnnnnnnnnnnnnnnnnnnnnnnnnnnnnnnnnnnnnnnnnnnnnnnnnnnnnnnnnnnnnnnnnnnnnnnnnnnnnnnnnnnnnnnnnnnnnnnnnnnnnnnnnnnnnnnnnnnnnnnnnnnnnnnnnnnnnnnnnnnnnnnnnnnnnnnnnnnnnnnnnnnnnnnnnnnnnnnnnnnnnnnnnnnnnnnnnnnnnnnnnnnnnnnnnnnnnnnnnnnnnnnnnnnnnnnnnnnnnnnnnnnnnnnnnnnnnnnnnnnnnnnnnnnnnnnnnnnnnnnnnnnnnnnnnnnnnnnnnnnnnnnnnnnnnnnnnnnnnnnnnnnnnnnnnnnnnnnnnnnnnnnnnnnnnnnnnnnnnnnnnnnnnnnnnnnnnnnnnnnnnnnnnnnnnnnnnnnnnnnnnnnnnnnnnnnnnnnctcaaaacacaaacaaacaaacaaacagcatttaaaatgtataaatctgatacttgttccatggcagccatgatgctgtttttgatctcaataagactctgtaagacagcaaaataatttcctagagacctattactttcacattggataaaatatacttaatatcctttcattttcatgtttcaaaggaagagtcaaagatgattaaagggctctttgaagcggtcagggcttggtcacttcacattctgtagtcagggactgaaccatagttacttttataaatgtattaggatgtgaagaactgactattaagtctaaagtagctgtattatcaataaagcaatacactgagttggggtattgttttttaaatatgtaattatatttcttttcatgaaaaatcatacataaattgttacgtttatttaagatgaaattgtacagccgataagagaagagagaatccacattgtagattccttttgtgagggcatgaagaagtctgtacacaattgagcatattccatgtttaaaggaagaaagtaaataaatgcaaacaactccataaaaaaaaaaaaaaaaaacttactttatggtccagttacttggtcagtaacatcaatatgatgagaatatcttgtgttaatgtcaagaagaaatccctcatgtaaggatacttacttctagactcccccccttactcctagacttttctatcacatctttattctcagccttcttggttgcttaatgctcagtgaagaaccccaccttgcctccctgagcgtatttccaaaggccaaggaagtcatgtggctcaggagcgccctcttctggcagctaaccgctaacccctgacttggttacttcttttaaatactctccatagaacctccatagaatcctaggtggctgaagaagaggaggaaaccagtctttgcaataaagggatggaatgtttcgtgtagatttcagtgcagactaaagagaggaggtgattccgtagttgtcggaggccagagtttaattacagtcaggatgttaggaaaatcttcctgaaagacttggccacgtatctgtatctgattcggcttggtgtaaggtggattagaaaggagcatcatgcctgctaggagcagcagcaatggcgagggcctgcaggtggaggaagggccaaggagagggaaggtgcggtacatagtatttatgccagttcagtcagagcgtgggctttgtgaggacacgtccccacatgatcagaattctgttgtcaggcttcagtaaccacggacaggatggctgacaggaaagagcatcaggtaagaacgtcacagagatggctacttctttgcttttgttgtgggtgcagagtgaaaagccaaggagaagtgcccctatgtagctcccagctcctgtcccagccgctctgtggtaaagccatccaggacacagggagacactacttccctttccagacccctttgctgtagtctggaggagctgtattgcacacaccttctgcttggcctgcagaagactctgagcctgcgcatgggacttgggctgcggggctcttgtgcccaccctctgactccaagacagagaaaatgaagacagtgctggccctgtgcttagatcagaactcatgcaggttcaccctgggtcctgcccagggtcttgtctggtaggagacccccacttgggtgcttctcaccgactgttactgtgggggagaggtcctagaaactctaaaagagaaatcacccacttgtgccccagcatcctggcctacggctcctctcccctgttgctgacagctaccccattctttccctgcctgcctcctccctgaaactttgacctttggagtccctcctgctctgaaaagatgtcatggcttaggatagagaagcaggtccttttatggaagcaggcagcatactttgtctactgattaaccagagtgaatctgctctgggctcttttagacaggttaggctgtagagcggtgccttgtgcatttgagatttcaagcagacagcacagcccctttagccagggagcagtggagctgaagtcaggctggctgtgatgggctcccttactcactatgtgcaaggtttgtatttctctctctgattaaggctgcaggagttctcagttaaaatgtccacagtgttttgggaatgtgtgggttctctgttatgttttcctcatttggtagctctgagccttcatattatacagtgttgcctcaaatatttaattatgatgcagttatagctgcttttatattttaattgacttggtctttagacatttagtagctttattttcatgttaattaaaaaattttttttacaacacttgatgtaaaaaagaaaaaggtgggcattgcagtttggcaaacctgggtttggggattagtggacggcaatttggttttagcactatggcactagcagtataagtaccagcatggtataatcttgtttctctgagtgttggtgtagagtctgagtcttttattcctatggttgttgctggaatcagttgggaccctgcatctgcacgtgccgttcccaaggcactgattgatagttgttggctgtcagtttgcctagatttggctttgatgaactgttagtgacagttcagggcttcatgctgacatggttgcttctctccggtgtctactctggagtctgtggatagatgccctgctctctctcttccctcaacatccacgtagccccactcctccccataactgtctgctgggtggcctccgtgggcagaagttaaaggtaggagctagcattggactaagagcttgtgcacagagaaactcttctcattcttctgaaggcaggtttcatgccgtcaatagtaattcaacatcttctacttatctgaagtggctgggattagaactggggcagaggtggtcctcccccttgcagagaatggacagaaacctacagtcaccccgtatcccggtttatcttgtggtgtcaataccagggaggtggcagtgcagtgctaggcatgaatgtttcaggtgtgactcttcctcccacacagtcccctgctctctgacccactgtatcgcctactaagtgaggaggtagccgtagttagcaatcggaattgtggacttacagagaaagcaaggttgcagtactctggtatagtcaggcccttatctgattttgagtttgaaaatcaaagtctctgaaccaggacaggcaagtaggaatctcctgttaattatcatggcatcttcatctgctttgttctgagcacagggagcagggatggatggggtcagcactaagaatgatcttggtacgcatggtaatcatggcaattactggcaccaacctttgcctgtcttctgccatggggtcagccctggtcctcttgcttcagtctccagagggatttttcttctgtcatgaaatggtactcgcattcacaggcgttcactacatgtccacagccctagttagttacaggtgtccaagaaaggagactttctttctttggagaggaagtctgaggccagaggggttaagtgatcgcccagctctgtcagcacattgctctgctgtagttcaaagacatgttctctttagccacccccactgccactctgcccaaaggggtcttgctcaagcaaggtcacctaccttcccttcctctgctctcagttctagccctgagaatagatggtcagccggaagaggaaacagaccgcccgttttccacgttgactgctggaagttttgtctctctgcaggctcaggctttacggtggtaatgtggactcatttgctgaggttgaggaaaaagctagtacccaagtgtttcttgtgagcttgcttttgagatgtggtggcaggaggtatcctttgtgacttgaactcagggtgtgattggcactgactggagtcaggtcagaagactcttaccttgccccattgctttctagtccttggaggattaatcagtggcatccctgaggtagacaccggaggatggcgtgtcctggtatgacagaccagacatagctcttgggaccttgaccatcagtgaaagaagtgttgacagaataggctgcaaatgaatgtgccttctctttgtgtttcagacggcccccttgagaatattgaccccaaagactcctgtctcattccaagaaacatcatggctgagccagactacatagaagatgacaatcctgagctaattaggccccagaagcttatcaaccctgtcaaaagctcccgaaatcaccaagacctccacagagagcttcttatgaatcagaaaaggtgcgtggtttctgggtggtgtttccttcctccaggaagctttggggtggccaggtttccttttgggtttacaaaggctgcaattgcttgtttgccatgttgaaggcatccttttaccaagcatgggggagctgttgtctctgcaccaagctcctaggtacactggcagggtctgacactgtctcctttcaaatgcgtgctcattttaaggagcacttgcatttcttttgtctgtgcctgtgctcaggcctgtggaggacaacttggaggaatccgttctctccttccaccacgtgaggcctggggattgaactacaagcagagcttggcagcaagtgccttcacttgctgagcccatatgtgcatattgtaaaacttgggtagaagaggctgagttcggggtagaagagagtgactcttcctatgcagaagagaaagactatttcttaattttaagtctctgacattttgggaagtgtaggaatcagatttgagccctgcctgtgctagtgttttctagctgcagagagacgtttctataactattagaaaataataaacaacaatattcttccttgtgtctttattagtttcttttctgtaatattttaaatgttattgtctttctgttaaatttttaaagggatgcaaaatattccctgtcttcttgtgcagtcaatcctgtctctaccccaaattactctgggttctgggacttgggcctactgctgcttgcttacgtgtttaatgcctgttgtatgcagtgtgtgtgttaaggcatgtggagacatgaggtggtctctcctcagtcagtttccgccttactccattttagacaagatgtctgactgaagctagggctttctggcaggccagcaagcctccagtaccatctgtctccatctctcagtactggggaatctcaggtgcttgctccggagaccaggattgtttggtgttgattgtggattcaaggggattcaaactcaggtacttatgcactacacagcagtcactccatccgacagaggcagcttggccaggatcttagggcagttcgaattcaacacggaaccagggaactcaaagtgcacaacctttccacactgcaatgcctgagctaatgtcagcctttgggaacagtgagctagggctgcctgaagagtcacctgtgggcctggggaggtggatctgtgggtgagaaccagagtttagactcacataacctatctaaatgccaggcaaatatgatggcccacctgtataatctcagaacttgaaaagcagaggcaggggctgtggaacaagctggcattgggccagctgaactgagaagcagttccctgaagtgaaatgctgcctcaacagagatggacagtgaccaaggaagacactcagtcaacctctggcttatacacannnnnnnnnnnnnnnnnnnnnacacacacacacacacactcacacactcacacacactcacacacatacacgcacacacacacacacactcacacacacacacacacatgtgcaaacacactgtgtgttcaagtaggcaaagaaggaatgagcaaaaccagacagaaatacaaggctgcttcattctttggaaatgggagacagcttctgttgctctaagacctgtttagcatcaataagatccaagctactagtaatattttagcagaatagtttgttacctataatctagaaaaatgtatgctcagtagaattaggattgacttttgctttattcttccttttcacaaatttctttaaaacttttcagttaacatgcttcttagagattaactgagtagcccttcccccactattctctttagaaaggaatagaggctaagagcagactggctggtcggaagaatgggaacctccacaaagctgcccctcagtttggagacccccaaccccaccatttccccagcacaatgcagacataagctaagcatttacaaaagatgcatagacttgtgttcagggcagcaagcagcagtccaaccacacacttgcttgtactggggccaaacccagtgatggcacagagaactcctgggtagggagtccccagggctggcacaaaggctgtactcagggtggagaactgccctaaaagtgcctcacagggccaggaaaaggctcggcgggtgaaggctgcgcttagtccttacagtcacatagtaaaaggagaaaggtgactctagcaagttgtcctttggcctccatatgcatgttgtgtgtcagtgaccacacaccacacacacacacacacacacacgcgcgcgtgtgtgtgcacatacacaaacccaaatatatgtaataaaatgattttagaaggcttgtaatctcccttattaaatttaaattaagataatatatattcaactacatttaattagtattacatgtagtttgaatttaagatatataaattcaaactacaacacctaccacaagactacagtataactggtgcttctgcagtctgtttaaaggggagagcttgggttaggcattcaacttttaattttatgagtattgatatatttcatatataaaatatgtggcctaaaaccctagccctaattttagaaactggctacactctggctggagatgtgagagttaagagcatgtgctgctcttgcaaggacccaagcttggatcctggtccttatcaggcaggtcacagctatctgtaactccagctgcagaccttacgtctgtcctccttaggcgcctgtactcacatgcacacacagacatctacacatacttagctcagctcttaggattgatccctggacagtcatgaaggggttggagagacttagtaatgtaggcatcagggcttgtaaggacccaccactgtacggctgcactggtataacccagaaaatgttattactagttgaagttacttttgccggtgaactatgggagatatctgaacttaaattattcatataactaaattcttaatcttaaaatgtaattgtctgcagttttatattgagaccttatgtattcataaaactgagaaagccttaattcattattccttagtgatgcttttgggttttgagatggcattttactatgtagcccaggctagcttcctgctttagccttctgagtgctgagattacagtgtgccttcacaccctcctggttaatgataccaggaactcatatgggctgtaactatgctgattaaagatttgatttccttgacaccctgtgtgcagttgtgtatctgttcattcttaatagttgtgaaataaatcataaaatcataaaagtaatctctcttctttcataggacttagatcagttttcttctaatcaacttcctgctattgaaaatagggaaagagaaagttcattgtgatttttaaaaaagtaggtagaaaagatgccagaatcagtgtgtgtgtgtgtgtgtgtgtgtgtgcgcgcgcgcacgcgcgcgcgcgtgcatctgtatgtttgtataattttccaagaagcatgaaatgtgggcttgtttgggtttgtagtgacttgtatggctgtgtttaaagaggaggatttagtataacccacctatgataataaaggatacactgttaaaataacacacatatctctttttttcctatttttattagcaggatgttggttagaagaaaactgatgtaagctctaatgaagggagattacgtttatgattttatggttcatttcacagttgtcaagaatgaacaggcacaaaactgcacacaggagtcaaggaaatcagatctttaattggcatagttaaagtccacatgagttctgtaaggttttgctttttggaaatcattctttaatgtgtattcagcagtgactagctgattaatcagtatgagttgatagaatccttaggaaccattgtctccagagcagatcaatagtcatcacctaggcaaggtaggcagcggtgggatgggggtgtgatgagggtggagtaaagtgtgccttgtagacgagccgatgagtgcacagttgtgcatatatgcatagcgtgagtgtgtatttaatacattttaatatcaaatagatattgtttatggatcaatggtgtaaataaggaagacagggaagaggtaggcaggtccatctagaatcttagaaacctggggctagatagctcctaaaggaaagagaggtgaatggcatgcaatttagaattcctaccagaaagcatgctaacaggagtctgactgttggattgccccaagcctttcatcggggttcgtctgcttgcgtatggttttccccatgtactggctgtttttgtgtgtcaacctgacacagctgcagttatcacagagagtggagcttcagttggggaaatgcctccatgagatccagctgtggggtattttctcaattagtgatcaagggggaaaggccccttgtgggtggttccatctctgggctggtagtcttggttctataagagagcaggctgagcaagccaggagaagcaagccagtaaggaacatccctccatgacttctgcatcagctcctgctccctgacctgattgagttccagtcctgacttcctttggtgataaacagcagtatggaagtgtaagctgaataaaccctttcctccccaactgcttcttggtcatgatgtttgtgcaggaatagaaaccctggctaaaacactccatttgaagaaatggccacctagtttttctctgaggaatgtagagtttccctgaagtctgctctcttgtgtatctcattaagcacactcgtggcgctctgtgatagctggctgcagttaggaggaagcctactccacttcctttgtccttcaggacgcgcttagccttggatgttatctctaaaggtttgagagcctccttcaggtctgaaagatgagaggagagagacttcctcagccatttttctcaactgctgtgccactaaactgtcttcagaacgtgagattagcggctgcagtgtgacttcaggtggatttgcctcctgtcctaggcatcttcatctctcttttgaggatctgccccacccactgtgtaagcatactgctgcctgccttccctacagccctggccttaatgtgcttttattggattcatggactctctcaactctttggaagatgcctttggcttctcttccaggcagtaagtgtctgagtgctattgaagaaccatttggcttagcagtagatactctcctctggctaatttcgtttccatctcttctgcagctcataccttcagttatatttcttttcctgagagatacttccagtgagatgacagtttttcaatcctttctttgcccagaggtcttgcccctcagaataaaccagaactgcagaaggtgatggagaagagaagacgagaccaagtgataaagcagaaggaggaagaagctcagaagaagaaatccgacctggaaatagaactattaaagcgacagcagaagctggagcaggtagggcttgaaaaaggggtctgctctgagaggcagggatgctggatgccaggcaagcagaattccagcaggccagatgtgcgtgtgtgtacccagagagagacaggagtcgaatgcagtgccagatgtgtgtgtgtgccctgagagagacaggagtcgaatgcagtggagggtgtgtgtgtgtgtgtgtgtgtgtgtgtgcgctccctgagagagacaggagtcgaatgcagtggagggtgtacatcccattcaaggcagacactcaggttccattaggaacctaaaagaggcatcagaggccaaagcaaactagaggggctgggaaggtggttcagtgactaaagcatttggtaacagctggacctgattcagatccccagaatctatgtaaatgtggggtggttgtggcatggtggccaccctgtaattccaggacttggaaatacacaagggatccctgaagtaaacannnnnnnnnnnnnnnnnnnnnnnnnnnnnnnnnnnnnnnnnnnnnnnnnnnnnnnnnnnnnnnnnnnnnnnnnnnnnnnnnnnnnnnnnnnnnnnnnnnnnnnnnnnnnnnnnnnnnnnnnnnnnnnnnnnnnnnnnnnnnnnnnnnnnnnnnnnnnnnnnnnnnnnnnnnnnnnnnnnnnnnnnnnnnnnnnnnnnnnnnnnnnnnnnnnnnnnnnnnnnnnnnnnnnnnnnnnnnnnnnnnnnnnnnnnnnnnnnnnnnnnnnnnnnnnnnnnnnnnnnnnnnnnnnnnnnnnnnnnnnnnnnnnnnnnnnnnnnnnnnnnnnnnnnnnnnnnnnnnnnnnnnnnnncacacaaacacacaccgaaaaaaagttgaagtatctctgtactccaagtgttagaataaatttgtttgagaaagactccagaacagctgtgtgtgaacccaggatattcttttaattgttgtcacctctgggtatagtttatagcaacaaacaaagggtccatgcttctgcacagattaaaattcctaaagtttatatacatatatatttttttgaaagttgagagtcttttgaaaagccatccaggacataactaattttttgtgtttgacattcattcagcttgaacttgagaagcagaaattgcaagaagagcaagaaaatgccccagagtttgtgaaggtgaaaggcaatctcaggagaacaggccaagaggtggctcaggcccaggagtcctaggcccaggctgtgtgtgacctgatgtgtccccaccatctctgtaggagccccgtctagacacctctacagtactgttcttgggccaaagtcctgaggaagagaatccagacagctgagaattttgactatcaaaaaaggattgcgtttgatttaccattgtggtagatgagttgtctctgatggttgcaattcccattcgccaaatgaaagacatcgaccagcacacaagataccatggacctgtgtttagaccaagaaagccacaaaaggagtgaaaagaggcaggaagcgggcactggaacacgcaagagggttgtactactcggcctttcttccattccaagtttagtgggacacagagccttccttgttaagagaattgtttggaatccctccttgggttatctgttagattgttttgattgcatcaaaatgtatttcatctgttacatccagtatttgtatttcattctgagaacccagatttccccccaccaccaccacattataaattaagaaaggaggctattactgtttatgtttaattatacctattactttggttgacattgaagttcagaaacaggataagacatttgaacatgtcagcacccatcatgaactaactgtaattcccttaggttcttggcatgacagtatgccagatattgccttttcacttctaagaaggtatatacagcttgtcgattcctttctcgccttgataaccatagcctttctgttccattttagtttgtcatttcttgctcaactattcctttcagttgaagcaatttctcagttctttttcggatgaaaccagagtgtgtaactcaacttctgtgtcccatatagagagaccagctcttttgagttctcctgagagcagtgtagaggagtgtatattaggactggtgatgaggcctttagagattgtatggaatgcaaatagagatctgtttctaagagactttaggggaaggcttgatactttttacattttgaatattttagacttgagctttgaacatctccggcggatggtcacaagtttctttcccttttgtttcctgtgaagatgaccatcttggcgctcttggcatgatgctgttggtaggatgatcctgactactgtgttgcatctctcaggaaaagctgaggtgctgggcaaggctgctcagttccctcttgctagctagcatgctgttcaaagagacatctaagttacaaataatatgaaagttctcatgcaaaatatattttgtactacaggcatgagattttttttggctttttttttcttttttgtatttagtacttctccatagagatgatttaaccagtaatttctacactgaagacttctgtttcctttcatgatgcatagaatagcagatgtagcgctttggaatccttgcttagcacactagatgctagttttctctgggaccacttcagtctggtagtttacaggcccacattcccttccagtctgcataagaagtaagtgggtgataattcactgctagataagaagcctgagagctgagtacagcagagcggattcttggtcctatcagcaagtgctatctaaataaaatatgagacgctgaagataaggtggtttgcccttgaagattggctcagtgaccactttgtcatcttcctttcctttgagaaagaaaagttcattcactgattgttgaaataagcctctccatgcacactgcttagtctttctctatgcatacagaataatgacatcaggtggtagggtgacgagtcggggcaattagacctttttatctacctggaagctagctctggagatgtcctgccacttggcaggatcttcaagggccatcgctagctcccatagaaggcctgatgctgttctactctacaacactgggggaaaagttagctacaaacatgtttgcttcctggttgcactcagaccggcaatcttccttggtggttagtgctgcagggtctatcaaaagacttgtacatacaagaagtgatggcttctgctaggtctcagagcatccggggagcagagcggggcctttaggaatctgctgggaactcactgagaatgctgtcagtcactcatttcttgcacttaacactgcacaaagcctcagtccaaagcctgaggacaggtcaccaactgagcagtgtcgtgctttgagccactaataggggggaaaaggctccatttttccactctgtagttttcttaaaatagttctgtgttttgtagtctcctgctagtaaagtagtattgctttctaagctataccagttgactttattcttctactccaagaatctaaacccatttgagtgtacataatatatataaagggagccttaatggatttgttttcataatttaatattttttgtatttgctcttgtataattgtttttttaatggaaagtattacagaatcgagggtgaaattcttagaaccaaagttattcttaataaaaatcaccaatgcttggaccacgcagccatgtttgtctcgtttgtttaagggctatgtagaccaggaggggaatgttgtagcttccaagcctcccttgggtggctgttctctctgacagcaggtatgtcttctctttgtgcatttgttgaatctgaaaacttacatggcgaacaattccatccccacatatcagtggctctcagtgctgccgccctttgcaggaaagcacacagcattgttgcagttgttgtccttcaggtcacaagacttggaattttaggagctcaggaggacagtagaagatgcctttttggaaggtccagatttttttgtgcttttggatagtaaaagttttaggaagtctgcttttgtgctgtttttgcttactccattgcgtgaacactaccctcaagggagttggaatgctctataaacatggctgtattatactgttgctcttggggaggttcaaatctctctctttgacaggtctcactgtgtgactttccctgggcagatagaagtgaatgtctatttctcacagataggataatgagaatataccaaagaaacgattctccccatttctggctcgatcatccacagggtttgttggggcttcttacaggagtatgggtgattcaacagaagtcatcatcgaaaaggccgccccacataagggctcgtgagagctgcatctgccacagggagagcatcctatcccagcaatcactagttacagctggatcagaagcttgggtttcatgtacttcctaagtcttacatggtgtgtgtgggtcttagagcagcagtgggagcaaggcagaagaatgcctgggatgtgaaaagcgaggaggggactgttggggacagaaaggtactgaagggaaagaggaggcattgcatatgaactgaacatcggtgcttttcttatcagtgacaatactcttattaacttgcataatattttcattgtattagatattataaatatttgacaaccctgcaagggccctgtatactctttttagagacagaacacctatgtagcttacattaaggccctgagctcaatccatacaatagaaataaataaaaatcttttttgtttttttttttaaatacaagcactccctttcaggagggaagacagtctgaagaaaatagccacacaacacacttttactttctattttgatcacttgcccaacttttaagatcttcggaatcttgatcttaaagtctgctttaattgcctttgataactcagtcagtggagtggagaactgtaaagtcccttagagccaatttaagttacactgtagactctaaaaccagcacagaaggtggattccacaaatgagagctgcccccttggagtaactaagttcccagggtgacagttatctgtgaagttttaagactttagactactatatctaaaataagttttaaaattctgttactaggtgtgcatgacaactaagggtgttttatttccaaggttttaagatgaaacaatcttaggagctactaggctcacagttacaattttgcttgatttttctcttgagaaacacatctgattgtcaactagggatgttttcagtatctccccatctgctcatacgctttctagcaacgtattaattcccaattggaatctaggataaaagttacttagttattgaaggtaactttattgttatgggcttcatcaaggtgtgtgtgtgtgcacgtgtgtgtgcgcgcatgccaagtgctgcgggtgttgttgaggacaacagtgtttgtgtttacacgtgttgaatgtgaacccagggagcacactgtctgacctgtgtcctctgagtatctgcagttcccatctccagagtgagccgggcggtggcggcgcacgcctttaatcccagcacttgggaggcagaagcaggcggatttctgagttcgaggccagcctggtctacagagtgagttccaggacagccaagactacagagaaaccctgtctcgaaaaaaccaaaaaaccaaaaaaaaaaaaaaaaaagtctactccccatctccagagtgacagacaggctgtcagccagcctccctccccctgccctcttatttcctcagtcctgtgagtctgcccactcccctgccctgcctcagccaccttcccacataagtcctgcctactggctttctaagtcaattacaaaggaaaacaaccaaatttattttatccccccccccccttttctctccattgtagtcttgacttcaccctgccctcctctgcttcagcttcccaaatgttatcacgggctgacaagcttgccttgtattttctctcatctttcatttttcattatttttccgcctctgagaattattttcctcaaccaaataaacatgtatggtaaatataattacttagatgccccaaacagccagaaccagaatggctggcttagtgtggccgatgttcggggacttgcaaatcaatattcaatacatacttgaatacagtgaccaagacattttagaaataacttagataaacttagtttaaaggtttagcctttggctaatgagaaagcccagtggagtagagttagttgagatatccagcatccacttaaatgccacttaagcatgacagttacctgtaatcttagcccttggaggtagagatatgatccccagcaagctggctagcgggactagctaaatcaggaaactctggcttcaagtgagaaactctccctcaatatatacaatgatgagcagtgaagacaacgtccaacattagcctgtaatctctcgtacaggtgtgaggcacatgtgtgtctgcacacacacaagcctgtaatctctcatacagatgtggggcacatgtgtgtctgcacacacacaagcctgtaatctctcatgtagatgtgaggcacacatgtgtctgcacacacacaagcctgtaatctcatacagatgtgaggcacatgtgtgtctgcacacacacaagcctgtaatctctcatgtagatgtgaggcacacatgtgtctgtacacacacacacaggactgtaatctctcacacagatgtgagacacacgtgtgtctgcacacacacaagcctgtaatctctcatgtagatgtgaggcacacatgtgtctgtacacacacacaggactgtaatctctcatacagatgtgaggcacacgtgtgtctgcacacacacaagcctgtaatctctcatgcagatgtgaggcacatgtgtgtctgcacatacacacacacaggcctgtaatctctcacacagatgggaggcacacgtgtgtctgcacacacacacacacacacacacacacacacacacacaacaagcctgcaaaaatatgaagctttatttctattatttttatattttaaaaattacttgactactactatggccgtgcctctttaacatcctcctcaagtctcaggaaaatttgtctagacaagattacagaaagggatgcccctcagactcactgaaggaggaaggtctgcatttttgactgactttttgcttgcacagagcctgcctggacagttcttctgaatccaaccatgactcacaggccttggtgcaaagccttgagttgttgctttgtcatgggagttttacagcttttctacttactgggcgctcgcttgctgcccttctcaggaacagtgtgtgcctttatttcgcaaggctagcactgtcctgcctttaggatgcattgatcttatccattagcatcgccgaaacgtatgcctttcagattgcaaacttagagggatccgtttgatatttatttatatttgtcaaggagagtaatcagtcctgtgtgaggaattttgggaatacttggctatgtatcaacttgaacatattgatatgatataattttctgtcatgtaggctctgcaatattctctatatttggtactctaattttctttatttctcccttttttatagtagtatttcctatatacccagctaaaaacaaacatatccatatactttttttaaaacctgtatattctttggagaacaagcaagatgcccatatatgcgaatcctctgtcaaatacattggttcttttttctttttttttttattagatattttctttatatacatttcaaatgctatcccgaaagttccctataccctccctccgcttgctcccctacccacccactcccacttcttggccctggcattcccctgtactagggcatataaagtttgcaataccgaggggcctctcatcccagtgatggccgactaggccatcttctgctacatatgcagctagagatacgagctctagagatacgagctctgggggtactggttagttcatattgttgttccacctatagggttgcagaccccttcagctcttgggtactttctctatctcctacattggggtccctgtgttccatcttatagatgactgtgagcatccacttctgtatttgccaggcactggcatagcctcatacgagacagctataacagggtcccttcagcaaaatctttctggcatatgcaatagtgtctgggtttggtggctgattatgggatggatccctgggtggggtagtctttgtattatagctgtttgtttcctgagtcaggctcttggtgtacagctctggctcacctatagcttgctgcataggctaggctagctttgaacttgtagtgagccatttccttatctctccaccaccatccagagttgggattacaggtgcaagccacaatacccagccttatttgtaaagtgttacacagtaagaaaatgtgaatcccaagggcttaaaagggcagaaataaacattaactggaagtattgtattaactcaatgttctttatcattcagataccatgtcttgaaattattggcatgtacaggacatgtattggtaggtaataaacacaatggtttcagcaatccaatatcataaaacctaacaattgatattgccaaggtgagggagtgaatgaataaagagatgataggtgcagtgtgtgtgcacaggaggtggagtcagagggggtgcaacaccagtctgggctttatcaataaagtgaagtgaagcaggctcagaataaacttcactatcctttcttggcccctgcgatggctagacttggttctaactggtaaagagcacttctaaatctatctgggttatttccagaaatagtgggtcactgttgtgaatatgtatgtcactgggatgggacaggacctaatggggcaaaagcacacttgtgcaagcgattcctccctagcaagtgtgtttaagctcctgcccttgtgcccctccccgtaccagatcctacaatcttcagtctttgcttgcaaaccctcaccagcaactttcccgagagttccaggcctccagcctcgattggggctgcagacttgacctcccctgttctaaggctcagcttccaaactgagcagctgctaggttccctgactttgcaacccacagacagtcactgtgggttcataggacctctgctgctgtgagctgacctaccacattcctgattcctgatttgtaaaattgcaaacacgttagttcctttgctcttgagaacttgtttgtgtatgtaagactgtaactagctataggccttgtcatggaaacagttttgacccttatgtggtttctctgctactggaatttaaggtaagttggttctactctggtccttgctggcattgtttatattggctggggtcaaggtgtctgagaacatggaataaatggaagccctgtaatgagatactgctactctctcaggccttggcagagccccagggttgttcagtcaaggtcttcctggataatcccctaccttgggtgatgctgaaacttctgtttactttcttctatggccctgggtagggcctttgtcagattccttggtacttttatttctcctgctagccaaatgcttgagatttaagcctggggaaaggctgacttctgcttcttcctgaggcctcataggagctgtgacagaggctggcctgaatagaattagcaacagaatggaggtctgtgccattctgattgaatagccaaggtccactcactacagcatatctgctgtcatctgccctttgtaatttacttttccccatcattccaggacacagttgcatctggatcagccaggtgccagcaaggagggaaagtgttttgatttaaaaaaaaaaaaaaaagaattgctgctcccaggagggcagtgccttaccccaggaaccagagtcaggggttcctaggtagctggtgtggaactgataagcagtctaggaccatggcatggaaaaaagtcactatgtagaactccagtgagccaaggcattttgctgagtcggtgccatttttaagaagtggtcacagcgtgagctctcttcccattttctgctttcttcctcagcgattttggtgtttctcagagataagcagccatttaactgcttgtacttaacaaatacagatacaagatggcttgctggctccagtgtttgaagtgtgtttataactttgttcagacataagacattgcaataatagtcaataagagttcaatacaatgtcacaggaatgaccagaagacagtaactacagggaaaaattccagcaagaacacacacactaaatcgtatggttttattgctagatgggtgttctctgaaggtgacagtggatgccagcagctcaggtgatataaacaaaacatggattttctttatcttcccatctctttctctagtttcaaaaattaagactgggtaagtttaggggctgggtaagaacctcacttcaaatctccagaatgtaccaaaaagcctacatgattggacacatctctaatcccagcacccttaaagaaacatggaaggtggagagtcagaagacactgatgagagaatccctgaggttgcaagggccagggttacatggtggcagataagagaccctgggtcaagcagaaggcaatgacttacactcgtggttgacctctgatgaccacatgtgcatcatggaatgtgtgtatctgtacttacatatctgaaggcaaggctctctctctctccctctctctctctctctctctctctctctctctctctctcacacacacacacacacacacacacacacacacggattgggtggggagagaggtacaaagaaaagcaggcccttaggattagtagtaacataagacctggattagacagaaggagagcaagtgagcatttcgtcttcccatgtactgcatcctagatgtgcctatggtatatgtgtcagctatctccacaaaccttcctgagggtgtgtattgatttgcttactagcagtgaaattgtgtgctctgccatggcagagtcaatagccaccaaatggtaggctattctgacccctctgcccggccccgctcccaccccgtcctgcatacaggataacatatcatgcccatgcctgagactgcaacattgagctcaattagagccagcaccttgcccttttgaaacatcaaggcaagtccagagacacacattgaaagagtcacacagatgcgataccacgacaaccatgaagggtggtgtgaaaacaatggccacggtgtgagaacaggtcacctcagcttctcatacagctggtgctgggaaacatgccccccatcactacattctctgtgtgccacttagtgggtgcagtgtttgacattcaggatctaataatcctgtagttccccactgggtgctgctgtcactgcagctgtagagaagagagaaatgtagttcattaaaattaagtgagcccaagatctacctggccctatgacacccctgttcgctctccagttctcagggatggggccaggctcactcattgtctgagttacttttccatagctgtgataagatactgcaaacaagacaacttataaaagaaagggt

SEQ ID NO: 678 - DNA, 1122 bp, Mus musculus
gagagccgccccgagccggacgggcttcttactccggcgttgcaaccgccgtcggaaccgccctctcgccacctcggtggctaaggtgccgggtaccaacgccagcagcggagcgcgccagggagcagcgcgcctttgtgcgagacggcccccttgagaatattgaccccaaagactcctgtctcattccaagaaacatcatggctgagccagactacatagaagatgacaatcctgagctaattaggccccagaagcttatcaaccctgtcaaaagctcccgaaatcaccaagacctccacagagagcttcttatgaatcagaaaagaggtcttgcccctcagaataaaccagaactgcagaaggtgatggagaagagaagacgagaccaagtgataaagcagaaggaggaagaagctcagaagaagaaatccgacctggaaatagaactattaaagcgacagcagaagctggagcagcttgaacttgagaagcagaaattgcaagaagagcaagaaaatgccccagagtttgtgaaggtgaaaggcaatctcaggagaacaggccaagaggtggctcaggcccaggagtcctaggcccaggctgtgtgtgacctgatgtgtccccaccatctctgtaggagccccgtctagacacctctacagtactgttcttgggccaaagtcctgaggaagagaatccagacagctgagaattttgactatcaaaaaaggattgcgtttgatttaccattgtggtagatgagttgtctctgatggttgcaattcccattcgccaaatgaaagacatcgaccagcacacaagataccatggacctgtgtttagaccaagaaagccacaaaaggagtgaaaagaggcaggaagcgggcactggaacacgcaagagggttgtactactcggcctttcttccattccaagtttagtgggacacagagccttccttgttaagagaattgtttggaatccctccttgggttatctgttagattgttttgattgcatcaaaatgtatttcatctgttacatccagtatttgtatttcattctgagaacccagatttccccccaccaccaccacattataaattaagaaaggaggc

SEQ ID NO: 679 - protein, 197 aa, Mus musculus
EPPRAGRASYSGVATAVGTALSPPRWLRCRVPTPAAERAREQRAFVRDGPLENIDPKDSCLIPRNIMAEPDYIEDDNPELIRPQKLINPVKSSRNHQDLHRELLMNQKRGLAPQNKPELQKVMEKRRRDQVIKQKEEEAQKKKSDLEIELLKRQQKLEQLELEKQKLQEEQENAPEFVKVKGNLRRTGQEVAQAQES

SEQ ID NO: 680 - DNA, 103665 bp, Homo sapiens
  misc_feature (1)...(103665): n = A,T,C or G
cagagttaataagtaaaccttctctggcacgatttaacattagctgcagtttgaactttacttctaagattggagtggatcacacagctctctcttccagacaagcctggggagcacaacaactaaagctggaactttttatataaataaggacttatgtatataacatgtatatatatttatactcatacatacacacacatacacatatacacacatgtataaggacatataaatgttttatatgtatgaggatataaatatataaatatatgtatttggtggctgagagtgactcccagctaataactagcaaggaaaaatttatgcatatatatttttatacatatttataaatgaatgagcttagaagaggaccttgagctccagacgagatgaactatgagccctgccaagatcttgattttgattttgggaggccttcagcagagaatgcagccgtgccacttctggactacagaaataactatgaattcatttactgttaagtccagaggaaactgaagctttggataagtttcttatccgaggtcaccaggcagatctctttagtcctagcctagccttccttccattcttccatgaacttattttattgcaattaatagaagttaggtgaatatatatatatatatatatatatatatatatatatatatatataaaactggcattcaactagttattaataatataagcattccaaaggatacttcccgctaatggaaatgtctgtatctagagcgaatatcagaaagaagaaaaaaaagttggagcaaactgtagaatgttcacagaaatttggccatttgtattgtatgtcagttatttgaattaggaaatttacagaaattatcttcatattgcttaattgcagagatggtttgtttactcattagtgtcgaccattaagttaccttaatatttttgacaggatgagcgcttaaggattttgttcccctctctttgctatttagagattttagttttaatacacaggaagactctcaggaaatccttttttctggttttggattcatgtaaagaaaaaaacgtaaaatgcagatctttgcatcattcagtagtcgtttatgtgagtaacagctgtttctctcgattcttcgcgatgtgcagttacaagttagaaccaccatttcatagagtccctttgattttaaaattgtgaacaatgaaaagcaagtgttctttaaaaacgaaattaagtgttttaggcagtacatatattaaatgtttggaaaataaaactctcctgaatttttaaactctctagaattggcaaagtactcagttacattatgaaatacagctctgttttggagcttgcaaaatgcttttgtagtggataactactgcaggggacaatactcatctttactgttggtgctgttagcatatttaatgaagtaattccattcctgtgatcacaaatgctcatgcacagaggctcttttaatgaaacagcttatcatctggtttctagcatgttctttcagatttgggcatatcattttgatccttcctaagtactattaatttaaaaaggtatgcatgtgctatatttgcttggcaaaccacacaacttttcacaaagattttccacaaatgagttctctaagtctctttattgaaaggcattatcttcctgagttatggaatattacattaacgtcatacaacaattgtgcaaaacagttaagcaaaataaagggacttctgttatatttacatgattatgctatttaaatgataaaattaggatgccatattcttttttattttttttttgaagtggagtcttgctctgtcacccaggctggagtgcagtggtgtgatcttggctcactgcaagctctgcctcccgggttgatgccattctcctgcctcagcctcccgagtagctgggactacaagcgcccatcaccatgcctggctaattttttgtatttttagtagagatggggtttcaccgtgttagccaggatgatctcaatctcctgacctcgtgatccacccgcctcggcctccggaagtgctggaattacaggcgtgagccaccgtgcccggcctagatgccatattcttaacttcgttttcctttccctattgttttcagtattcaggtcatcaggggtcaatgaagacttggtaaccactgaacggaccatgtgggaattcggttattactcaataagaattccttcttaggcctggttcctggtttactgctgagctctgcatgtgatacctctccaaggtttccaccttctgcctgccctcacattctatgtttatattaaagagcatctgtctgtttgcctgtccttccatctgtcatagaattctaagatagcctccacaattcctggcctctggtatacacacaacttctccagttattcagtcataccctaatctagctattgctgtgatgggattttgcagatgtaaggaaggtctcaagtcagttacctgtcaagataggaagatgatctgggtgtgcctgacctaatcacatgagcactttaagtctgagtctagagccctagatggccaagtcagagattggaagcatagaaggatttgctgagacactgctgactggaagatggggagggccacatgatgaggtttctgggcagcctttagcctttagcagctgagagtagctctcagctgacagccagcaaagaaactgggtcctcagtcctataaccacaaagaactgaattctgccagcaatctgaatgaccttagaagaggaccttgagctccagacaagatgaactatgagccctgccaagatcttgattttggctttgggaggccttcagcatagaccccagtcatgccatttctggactaaaaaaaggacgagtcaatatgtgggtgttataagccactaagtctatggtaagatgttatgcagcaataggtatctaaaacactgatttagaacccaatgcaccttagttgcattatagtcccaaagcgtttgttgttttttctttcccccatctttttcttatttaaaccaaaaacaaataagcagaaattaactattttctttgacctatcagttgaggccatgaggccaataccaatgtattgtatctgtctttgtgggttttatgttgaataccaaagtgcttttgtcttatcatcagaaagatttcccttgagactattgttagcacctgttactttgccctccattctgtagttcctcatgtctgattcagaggaagattatttgcaaggatggtcacaagaattcctcctctcctagtacagcactcaagccctgttgcaatatgactactgcttctaccatcaaggggggtctctttctccaaatcttggatttgggctgaccttgtgacatttttaatggtagaatgtacagacttctatcattcttctagacccataacgctagagctccaggggccttaccacttcctctttcgccctcctggacggggctgttgtgtgaggaagtcctatctagcctgctgagaggccatacaagtggatctgagatgcctgagctgacagctgccatcaacttctggactttgagaccacccagggcaagccagtccctggccaacctcccagttgactgcaaacacatgacagagccaagctaatgccacatggggcagaaataagatatcgcagctgagccttgtccaaattgccaacccacagtattgtgagcaaagcatgtgtttttattttaagccactaaagttttgaggcgatgtgttatacagtcatagataattgacacagaatgagagagcgtggcttaaaaataggattttaaaattaagattttatttctttttgaatggattacgattcaaatgtccacgtacacagtgcaaaatttaagatacaaaagagtatacatgtcaaaacaaatttccctccttgagggcattgttaagtttttctcatctctttggagctcttcagcatggtggtttgggtgtaaagtaacaattttaagattacgcatgaacaaaatgaccaaagtagacaataaaaaagcaacacgtcttattccagattgatttgctttgtatcattttacgtccccaaatagtcatttctgctttgttcgattttccttagggatgaatttgcaagatctccagatgtccaagctaaaggatgaggtcatagtggagtatatgggtgaccctgtaggttgctgctctgaaatggaaaattattatgtatgttttccagtaatgcaagatcagagaatctatcaccagtgatgggttaaatgactcagaaaccattcagcggagtgttccctttgtaatgtaagggaaatcagtatttgtattgaaagcaaatcagtaaagaccctctaagccacctgataaactgtgtcagccccagaacaaaatcttaaatacagcccagcaggctatttaggccactagttcccttgactttttccagagtcctgtctacattcagaatgtgaaatctacagtatatcagactcgggctgagggtctggtgttgcctgttataaccctgggaagtacgaggcttattcattcaacaagcatctatcacccacagagtgatatgttgcagacactgtggtggatggtatggatacaaatggaaatatcaccatagctcataacctttgagtttttatttcctgggatccccccacagtggctccaggggtcccaaaccaaattggatacttgatcttacctgaattaaaatcccactaagattccctagggatgtgagatattcagcctaaaagagcagatttaatatattgatactggcctcctgtcttttatttgaattaataaattcaaagtaaatatttgctcttatttgtttttggtttaaaagaaattatggtacctggtgcaaaaggtagcatcgtgactttgagcctgtaggcatttataccccagagtatggaacgagcctttgtttctatttctctcacggggcagggaaaagaccgtggtcacttatcacattcacacactctgcctgtggccttgcatcacagatgtttgtccaggctactttgtatggagaagtcaggctcactgctgggatgggatttagaatcttgaatccaatgcatctttggttagaatctcgaatccagtgcatgctttttctattcatctgatggggctgctgtaacagaataccctagactgagtggcttaaacaagacatttcattttcccacagttctgaaggctggaagtccaagatcaagatggcagtagggttggtttctggtgaggcctctctttctggcttgcagttggcggccttttcattgtgtcttcatgtggcctcttctctgtgtttgggcagagaaagagagagtggggaaagggacagaggggaaggagggagggagagaggaagagagaaggaaggagggatctggtgtctctgcctccttatataaggccaccagacctatgagcttagggtcccacccttatgaccttgtttaaccttaattacctccctataggtcctgtctccaaatacagtcacattggaggttagggcttcaacatatgaattataggggtatgtggtacacagtttagtccataacacttcccatatgccagatattacattaggcaagagggtataaagatatgtatatatgtcaagcataaactctgggctcacagaggcacatatttacgatacagtgcaataacgccaataccatgtcgggtatgggaggggcagaaaagatccatttagtgtgagcaggtcaggaaagggtttccagagaagactgattctcagagaggagaggagctcttggggattggtgaaggtctgctaggcagaggggaagcccgtggaagagcatgacaaggccatatattcattatttcatccagtcttcatcacagagcagggccacttagcaaatacggcactctggctgagtggagccttggatgtttgctggggagcttcgacttgatcatgtagcaggaagcaggcatccactaaagtgtttcaagcagaggaggaaactgagcatcttgcacctggaaagttcacttgcaccccagaaagttgagaggaaaagcatgtgttagaccagaggctggggccagttaggaaacccctgccaccatattgtgactgagcccaaaggcaacagtggcggtgccagcagagggggagggagatagccaggaattgtgcacactgcacaaaccttggagttgatgccaatgtggggagggagagagtttaggctggatcctaggttttggtttggtgactggtggagccattgtcaagaacagaaacacaactcaaggacgagagagaaggaagaatcataggaaacaccatgtataaagttcatggaattcagcttcctcagctgggaaggagtttctttaagttctctggcagggattccacccctcagtgggttccagggacccagggatggccagacccttacttggctggcaggctgtggcttagagcatggtgtgtgataggtatctttggaataagtaatttgtttaccaaaatccgtaactgatgtgacttttcagtatgactatgacccaaactgtcttagtcagaaaaatttccccataaataagcccttagtcatctgttgccaagacagttaaaaagcttttgatctaaaatccacgaacctgttgtcctttttgctacgctgaaaccgataactgtttcagtccctgattttgtacctgctgtgattcaagtagattgtaatctcagagccttagggttggccagaaaagcacttgtaagagagctgaagaaaaggagatcagagagcaaagaggcggaataaaccctttctttcttgcatatttaaatttccaattaccctttgatgaagggaggggaggaaaatgggtgaatctccaggtcaccgggttttgggtcctggcttgaccgtaaatttgtacaattacaacaaatgtctccttttcctccctgattctgtctgcgttttcttccaagaggaactggcaggatttctatggggacggcctcttagcatcgcagacttgccggggagacggagcccggacacccaggagcgagacgctcttgggtactttgtgtgtgagacagaataagagagagagatgggggtgagcacagagagagaaagagaatgaaagaatgagacagaggagagagaaagaatgaaagagaatgagaatgagggagagaatgagagaaagagagacaatgagagagaaagagattaagggagagagaaagagataaaagaagagagaatgtgtgtgtgagagagacagagaggtagagggagagagcgagggaacgagggagtgagaaaaaaggagagtgagcgccccggagctttgtggctgtgacccacgcggccgccttcccactttcccggtcatccggggccgccgcgctttccctccagccctcgctcccaccgagtcccggaggccgagcgctgcagccccggctggtgcccctcccggcgcggatgcccggcctttctggatctccgcccgacgcgcgcgagccgtggaaggaaggcgggggcggggctgccagggcggggcgcgttgggggcgtggccttgccgccccgnnnnnnnnnnnnnnnnnnnnnnnnnnnnnnnnnnnnnnnnnnnnnnnnnnnnnnnnnnnnnnnnnnnnnnnnnnnnnnnnnnnnnnnnnnnnnnnnnnnnnnnnnnnnnnnnnnnnnnnnnnnnnnnnnnnnnnnnnnnnnnnnnnnnnnnnnnnnnnnnnnnnnnnnnnnnnnnnnnnnnnnnnnnnnnnnnnnnnnnnnnnnnnnnnnnnnnnnnnnnnnnnnnnnnnnnnnnnnnnnnnnnnnnnnnnnnnnnnnnnnnnnnnnnnnnnnnnnnnnnnnnnnnnnnnnnnnnnnnnnnnnnnnnnnnnnnnnnnnnnnnnnnnnnnnnnnnnnnnnnnnnnnnnnnnnnnnnnnnnnnnnnnnnnnnnnnnnnnnnnnnnnnnnnnnnnnnnnnnnnnnnnnnnnnnnnnnnnnnnnnnnnnnnnnnnnnnnnnnnnnnnnnnnnnnnnnnnnnnnnnnnnnnnnnnnnnnnnnnnnnnnnnnnnnnnnnnnnnnnnnnnnnnnnnncccctcgccccgcggcgcccggcgtggaccgggtcgcgccccgacgccagcccccgccaggcagacaaagccggggccggggaggtttgccccgcgccgacggtggccgtgacactgactccagtctgcaagtaacttttcctcttttgcctcttctctttctcccctgttccagtgaacccagcatatggggtggtgtaacacacacaaggagtcctaattcaatttgggttccgtaatttcccccaggcatctttaggtcccttggaggtggcactgatgggtatggccaagtgttagtgttatgtaggggatggtgtccaccacttgtgaaatctgcaagaggaattaggttgagagggtaaactgtagatttcattctctgctgcaaggtaccaagcctgcttccttcctccctcccaaagattttaggcaatgacagcggagcaaagttacttgataggatgggtgcgattttgaggggtcaaagaaaaacggaatgagggctgttggacttcacattcttaaacttgcgatttcttgctatcaagtacatcggttttctcctccagccacgttttcctaacatcactttggaaattctatctatccaagtggctttaagttgaaatagtgtctgggctacctgtccagagaagatttcttagcgctgctggtttccggtttaaaacttttcatgagaaaattttatatattaattaaaaaattgaaaatatatagaaaaaaaccactcatatgctcaccacccaaacacaccctaaggatgaaggcatctttgcttaatttatgacttggcagccatagtgtgtttgtgtgtgtgtgtgtgtgtgtgtgtgtgtgtgggaaaaagggtggggtggtaaatgagagcattactgaccagccacatcagcctaaaatatatttaatcatgataattctacaatattggtatgccacttacatccaagattaatacggacaagttgttttgaaatatattttcttataggtttgcatataaccacctgtacagaagggagaagaaagaaacaggaaaaacaatgtaaatttccactttatttggaagaatgggctgacaaaaaagtttcatggactatatttttgaattcaggagtcatttgggattgacttttgtctttaaatgaaatctttaagctttaaaaatattttaaaggtaacattgtgttctgagattcataagaaatatgtgatggaaaggaattcttgtttgtggaacaaggaatagcagtgattgtacaaccgggtgcatgctggcttcttaaagaccttgcactgagaaagtaaaataagggttttcctgagaatcgtgagttgtgttgagtgtgtatgttcttttaaaataaaatcgttctttagccacagatttggccactggacgcttttgtcattacatacttttattttcctcttgtaacatttttggacttttgaattctctaatatgcaaaatagaggtctttgagacaaccgtttagaagtaggttgatcattaggatgatgcaatacattttgaagttagaagaatctacaagaaggaagttgtggctgtgtccactcaggtgcatttttgttgcagttcctgacactcggggcgctttaatctgcacacacgctcaggggagtgttgcggtgcagtagtagcctgtgagtgaatgagtcatgcatgcagtctgctctgatgatcggcattccttcaggagtcgtgatgtgtttctgtctgcaaaagtcaaacgaagctccaataggaaatgtcacaatctcctaccccaggggactggagatccccttccttgggtggttaaaaatggacttgatttgcgcttctgagaaactgacatgtgaaatcttgttcctgatgtgggaggatggacgccgtcattcattcattcattcatcgaatctttcctttgactgttaattgtttaaaatctcacaagtaaaggtggaaaagagttttactgattttctttgggaatggtggaggggtagaagacttctctcctgatggaaagaggaaagatgaggaatatggcttaatgttattcctaacttaccttctgccccttccctccagaattctgtgtgcaagtgttttaaggaaatgagttgggagtttgggtaagtgagatctagattttgggcatttgtagaagtccccggctatctgggggagttgtcactcttctttcagcctagagaaggtgactatgggtgctagtgtgctgtggggcacactcgggggtgggaaagctgctgtggagtgggatgtcctctgtgtgcatcatggggtcgagtgtggccttgggatgacctcatgagaccttgctgcatttccttgtatagttcccttgtctaatcatggcctatttttgcttttccttcttgaaacaaaccatttttctccccttttcctttctagttcaagaagggctgggcctgacccatctgaagtttccctcaccctaagtacttaggaaacgtgctgaagaggaatggacagtcttacccatctcatatccctaattccggtaccccatcagtgaaagaaagaaagattatttggcaagctggattagattgccatttagttatggtgcatggacaaggggctattttaaggttgatgggggaggctttgcttgtcatttactctccattcaccagacattcagtgcccgtcatgtgccaggcactgggtttactgctgttaacaagactataaggcaggtgaggaggatatttaaagaactgggctgggtacagtggcttgtgcctgtaatcccagtgctttgggaggctgaagcaggaggactgcttgaggccaggagtgtgagaccagcctgggcaacatagtgaccctcatctctacgaaaaattagctgggtgtggcagcgcgctcctgtggttgaagctactcaggaggctgaggcaggtggaatgcttgtgaccaagagtttgagaccaggctgggcaacatagtgacccccatctctacaacacatttttaaaaattagctgggagtggtggtgcatgcctgtagtcccagctaccctggaggctgaagcaggaggatcacttgagcccaggagttcgaggctgcagtgagctgtgatcacgccagtgcactccagtctgggtgacagagtgagagcctgtcgctaaaaaatacatatacatatacataaaaaagaattatacaaaattacacaaaaattgtttaattacagttaagagctgggaagggaaagcactgcttggtgaattaaggtatctcagaaagaatgatgtcaatgccattgaaggtgggggttgggtttctgatggtggaaatgtcagggtgggtgggtgcggcgggccatggagctgcatagggatttgcctagcgcccatcagttcagagcctgctggtaggggcttagctgaacagatgaggtggactgttcagttctgtctggaatttggctgtggggttcggacactttgtcgcttgggattgaaggtggatcgggaaaccgtatggttctgtcccagtgtccttgctgaaggtaaacctcatggccagtagccctgggaagccggttgtggtaggacgtggtgtcctgagctggcctggattccagaagtgaggacttgtatcatgcaaagggcacccaactacagctgtgcccaccagaggttttgttgcaaatgaaaagataagaggaatttgtggggaaagagtgagaagacttatttaagaacattattcggactcagatgagctgtaggaaggaaaacggggagagagatgcagaaaaaggaggtaatgttgctttgacaccaggtgaactcttgactttgggactgactttttgtttttaagtgaaaataaatctttcagctttaaaaatatttaaagagtaaaattgagttctgagattcatgagatgtatgtgatggaaaagagtttttttttttttttttgtagatcaaggaatagcagtgatcccacagcagggtacacgctggcactgagaaagaagaagggcttccccacaaagagggagttgtgttgagtgtgtatgttctatggaaatagaaatcattattcagccgcagattctacattcttttatattccctgaccagagatgttttaccaaaggtgtgagttaagcatatctttttttaaaaaactgtagagatggggtctcactatgttgccccggctgatcttgaactcctgggctcaagtgatcctcctgccttggcctcccaaagtgctgggattatagacgtgagcccccaggcctagcctaccaaggatgtgagttaagcacacgtgaatagtcctaaaacaggccctgtggtctgtagtggtgttgggggcgtgtgtaagtcacatgggttggagacaataatgtttcctccacacagcaaagtcttggggtttctgctgtggcagagagactggggtgtaagaacagcacccccttagaggctgtgagagggcaggggaccctctgggctgctcagcaggcctcttcctggtggggctgcttaagtccttagcagtcgggagacttagaagtcttgaagtggggggggacactgagccccagcaaccctcaggttatgtatgtgttgtcaagtctcccgtagaaacaaggtagaaaaaatgcaggttgcagactggctcttccgaccatggcaggtttaggtgcatgaggttagagggttgtgcctcctcattctctctctcctttctgttgtcagtgctgacttgaattatgctggaacatctccaggtgacagccctgcctggccacagcctgggccagaggagtggagttgctgaacggagcaaggtgctgtaggggaaaggtgtggagctgtgagcctggcctctcagggtgaggatccaggccccagctctttgacctccagcaagtcccgtaaccccttgagctctagtattctcatctgtgaggtcgcctgggttatatgcacctcccatgcatggtggggacatgtggtccctgagatttggcaaatgaggggtgtttatgctgttatgccagtgcccacagcctttcaaaaaatgttctttacaaaatgttactgcgataagagcacttaacatgagatctaccttcttaacagatttttaagcgtatggtgttttattgttgactgcaggtgcagtgttgtagggcagctctctagagcttattcctcttgctgaactgaaaccttgtgcccattgattggtaactccccattttcccccactgcagtccctgacaaccaccattccactcttcaagtctatgagtttagctacttagatgcttcatctaagaggagtcacatggtatttgtccttctgtgcctggcttctttcacttggtcctccaggttcatgcatgctggtgcttgtggcggaactgcttcttttctaaggctgcctggtattccactgtatgtatattaccacatgtgtttacccattcatctgtccttgatggttaagctggttccacaaaactcctagaagaaaacataggggaagaggttcaggacactggtcttggcagtaattacgcggctgccacgctaaaagcacagtcaacaaacccaaaactaaaccagattgcatcgaactaaaaagcttctgcacagcaaaggaaacagtcaacggagtgaaaaggcaacctgtggaatggggaaaaatgttggcaaactacatatccaataaggggttaatatctgagaagtttaagggatttccgcaaatcaacagtaaaaaaatgaagaacccaactaaaaaatgggctaaggacttagacatttcaactcggagtttttttttattattttgtctttttgagacagagtctcactctgtcacccaggctggagtgcagtggtgccatctcggctcactgcaacctccacctcctgggttcaagcgattctcctgcctcagcctcctgagtagctgggattacaggcatgtgccaccacgcctggctcacttttgtatttttagtagaaatggggtttcaccatattggccaggctggtcttgaactcctgacctcaaatgatccgcctgccaatcctctcccaaagtgctgggattacaggtgtgagccaccgtgcctggcctcaactcagagtgttagtaatgcagccggcagtgatgtcaagatgcggacacagggacacttggaggatgggagctttgtcccttgtccccacctgctcctcagtatctcttcatgccttcaggagagttttaaagataactgggttttcatattagaaatagcctgttttattccattcttggacaagagttttggcattgttcctaaagtgtcatagtaaagtgtataggaaagagggctgtcattactgtggtataagcttttctgtgccattattaatatatgggacagagcatactttgtgaaagttaaaactcacgctttatccaagttttaaggtatctggtgaatgctaatgagtttacaaaaattgtacagtcttatgaaatcttgcagtataaataatcacaggtggtttgtgagtgtttaatgtagatgtatcaaaattcccatgtcctggaggaagttgagaatgccatttgtgcatatgcgtatgtagagggggcttcataatattctttcccttgtaacttgattctatttgaaacacataaaactggtcagggttctttttcattttttctttttttagtggatgtgcagggtaaagtagtgtatcggaaagagagaggcctagacttgaaagattttcagacttttaagcctaagcttgccatgaatgagtatatgacttttgagcatgtcattatttctgtttcccagcgtcgtcttctataaaatggaaatagtcacactcacctacttcttagagttgtcttagggtgagatagaagcctgcattctttatgcctgcttgtccttctagggaatgctctggaattggaacagcatgtgggccaccccttaggataggtgactcttagaaggtgagaggaggcagggcgtcgggtgtgcaagagaatcagctacatcatctttcaggttcctgctgcggtgggtgaattctgttattctgtgcccatggaatgggaggtgtcatagaagtcatagacatcagacgtagagtttgacctgagtgagtcagttgccctcttggggtttgcatattcttacctgtgaaatgcagtaataatactggtaatattattattatcatcaatgaacagtttttaatcatcttatatgtggccaggcatggtgtcaagttctttatgacatttcttcattcattcagcaactatttaatgaatgctgccatatgccagtcatcgttccaggctctggggatcagtgggatcacgggctagcatggtggctgggacagacagactccctgcctgcatggagtttatatgctagtgcatgacagaaggtaaacagatacatggatgaggtgattcccatggtcagtgctgtaaagacaactaagtcagttcagggggctggagtctggtgggagagcaggttgtgtttttattaggatgaggctcctccgaggaggagaatttgagatctgagtgaggcaaggggatgagcctcgcagaaacaagtgcaaatatcagcccagtggctggcaggagcttgctatggaaggaatggccagagggcctgtgtgggaggagccagcggccagggcaggaagagagctgtgcagtggggtccaaggaggtctggcaggccacggtgaggacgtggctcatgaggaagccacaggagagttctgagcagggcgtgcaggagatggaccttgtattttgtcagtgtgtccctgtggttgtggagggccacggggactgcagagggccaggaatagaagcagggagaccagccggggtgccgctggtgagatggattggagttgatacaagagagaaaggcattgtgggtgacacctgctcttttggcctcagcctttgggtgaaagatggtgccattgattgatatggggagactggtggaggatgagctttatgatgttcacatcagcctctggacttagtgttgttttattcccattttacagatgtggagaccaagggggagagaagtaaaaagtttgccctaggacctggccaacaaggtgaaacctgtctctactaaaattataaaaattagccaggcgtggtggtgcacgcctgtggtcccagctacttgggaggctgatgcaggagaatcgctcgaactcaggaggcggaggttgcagtgagctgagctcgaaccactgtactccagcctgggtgacagagcaagactccctctcaaaaaaaaaaaaaaaaaaaaaaaggttgccctaggaagaagctgagccagaattaggatccaagtctgatctatgcccaagtcttgcgttttcaatcatttttgctggactctgtacatatctgcatttaccctcattgcgagattgatacgaaagtacctgcagaaatgcttgggagatgcatctgttttgttgttagcatagctttattgcggtataatttatattccatacaattcacccattatatgtacacagttgtgtaatttttagtaactttataagggtgggcagcctccccccagtccagtttttagactttgcagtcagttccccctcccacccccagtcttagttaatcagtgatcttttctcttatctgtagcgttttgcctttgtacaggtagaatcacagtgtggcctctctcttgggtctggttttgttcatgtagcatagtgtttctgaagtccatccattgttgcctaagacatctgcttttaaggaaccttcttagagtttgtcatctatcataagagataccctgtgctgatgagaaaaaggtccactgagatgtgccttaagatgagaataaaaataacagtggccagcatttcccgagcatttgttatatgccaggcacagttatggccattattttctgtgatttctagaaatcagttgtagaggcaccaaccaatgcagttccatgagaggtgccatgatcagtgtttttcaacaagggaggttaaaagcttgctcggggttttaagagctgggatcagacttgggccttcttctcatggagctgtgtctttactgcttcttcacacgcccttcaccatgtgtttgaggcttgtgtcttcgtagcctcacaaagagattgggattccagttggagaatgcatttgccagttttgtttttttttgttttttttttttttttggcagggtcttgctctgtcatggaggctggagtgcagcagtgccaccatagctcactgcagccttgaactcctgggctcaagggatcttcccacctcagcttcctgagtagctaggactgcagagcgcttcaccactctaatttttaaattttatattttgtagagatgaagtcttgttctgttgcccggttggtcttgaactcctggcctcaagcaatccttttgcgttggcctcccaaagtacgggtgtgagccaccgtgcctggctgaaaattgtagttttaaggggaatatttgtactgaatttttattttggcattaccgtatggagatgatagtgtcttaaagtgatccatttgtgaagtattcttaggcatagtgtcagaatggcaccaaattaaaaacacataattatgtcatcaggcagagcctgtgtgtttgagttgttttaaatgttgtgtttaccagaaatgccatttttgtacagagtgccccaaggctgttaccctattaatgaatggaatttaattaggcatcatgcatttttcaacatgtttatctaattgtattatgtataatacattttactctcgaacagttctatatctaaacggtattttttcctgccacatatagtctatattggaagatttcatagttttgtattgcagaggagttctttgtatatcccaagaattctgaaattttggaaaagattttaaacaccttacacactcaagtagcttggtaagagctggttacataattttagccatgataagcaataattttcttttttttttttttgagacagattctcagtctcgtcccctggctggagtacagtggtgtgatctcagctcactgcaacccccacttcccaggttcaagcgattctcctgcctcagcctcctgagtagctgggattacaggtgcccgccactgtgcctggctaatttttgtttatttgttaatttttatttttattagacatggggtttcaccatattggccaggctggtctcgaattcctggcctcaagtgatccgcccacctcagcctcccaaagtgccactgcgcccggccagcagtaaactttcttgaataagaattagtgttacactgggttctacccctggttgctggtagaacagtttttactggtgtcacatcttcctaaactttctcaaatggaattatggtgtcgttaaacttatttttcacgtttagtatgtttttctcttttaaggatttttaattataattttagtttactagttcaaagtagcaaacaaaaaagctttttatgttagaatacctagttttaagaataaaaattaagaattaataatattaaattttaatttaaaaagacttcgttcaaatctttgttgatctctttatctgggtaggaccccagggaagtctgccattttttaaaatattaacccgctgaatggtgggcctttgaaatgagtgaaagaggtcaaccattgttccatatttgttgggcaattccaggcagtgcagtggccagttagaaatcctcacgacttgagctggaagcctgggggaaagtaggatttgggggcagaggtaggtactggaatggtgcagtgaagaagctgttatcttccgttgccaagggactctgttcagctttaatctgtgtcctggctggacggtgcatgtcagctgcccaggctaccagtgtgcagggcgcaggagttagaagcaggccccagtctgtttctttttccattccagaatcgcttctgactggcacatgccttgaagagaggagatattatcttgcaaaactgatccaagtaaaattgaaattgcagggagtaaaaattgggctgtacatgtaatgcatgcactttatgcaagttatgcctcaattatatatttttaaaaagatacacgaaaaacaaagccaaaccacaaaacccctgggtagaaatgcaggattagacactgttaaggatgcaaaatctaagccacctgttaggtgttgtctctttttctcccctttcacttcagaggtgccttgttttgattcacgtgataaattgactctggacagacctgtgattttatgcttttttatgtgaatggctttcccatgaagcctcagagttgctacgaacctgctggcaaaaatttccagcaaaggaacctgtacatttccgcactagtagccccaggaactgcctcttcctttgccaaagctgaatcatcttacctgagggtttcttggtcctgagctgggtgtggcccagccattcatagcctagtttctgtgctgggccctgacctttcaactcggggatggctgggcatgcagtttgggaaatcagatggcacgggatcggggaagcccagggatctgctgaacttcccacctccccagcattgatttcatcccttattcacttagaaatggcttttcttaaggaccaggatttgaacaaagtctgtccaatgcatttgatggttatgccttttaaagctgtatacatatagaacagttcctttacccccaccccttccccccatgctattgacttgttgaaggaatcaggtcacttgttccgtagaatgttccacattctggatttgggtgctgggtttcttttaaactcatcccgctagtccctgtatttctgtaaactggaagttatcatgaaagcttgatcagattcatgtgcagtgtttttggcaggattaatttgttggtatcatctggcttaacgttgcctcagcttaggaaaaggtctgactgtctcacgtgtagtgattctaaaactgagcgttggggtcctgtggtgggtggcagcttgaccctttcatttcctcatcgatctttctcccaatgccgttagcattcatcgatgactgttgtttgaattaattatttcattagagattgttgattcttctctcttaatgagatggcagtgagcatgagatgagatttaaactgaccagggtatcggggaaaactgacaacattgatacagcttaggggcatctacagaattaacagaaaaaagcaaagattggcttggctcttgcagttactgtgagcgcctcctgttattaaagttaattaccgtttgcacggtcttctgtggatgttaccctgtcaggttaattttgttatttaagtcttgagttgcagcaatattaaattctgtgcatatgtgctaactctcttttttatgtaacttgggtgcctgttcacctaagttaggagagaatgacctaggtttaggaggtagaattccccgtgatggtgcagaccatgatagagagtatctttttcaattgtcattttaaattttctgacttgtaaggagacattcatgctcagtcttttcttataaaagatcagtcattgatgagtttaagataactagaggagaatgatacatctgaaatagttttgtgttttcttctgcaaacatacagaagaaatggatcttttttttttttttttttttttgagatggagttttgctcttgttgcccaggctggagtgcagtggaacgatctcggctcactgcaacctccgcctcctggattcatgtgattctcctgcctcagcctctcaagtagctgggattacaggcacgtgctaccacacccatctaattttgtgtttttttttttttagtagagacagggtttctccatgttggtcaggctggtctcgaatttctgaccttgggtgatccgcctgcctcaccctcccaaagtgctgggattacaggcatgagccactacgcctggctgagaaatggatctcttaatggcacctctcaacttcattgttaagagtgtttggagagggtagatacttgaattgtttctgttaggaagaaattgagagttcctttgaaagaagcatgatcgtagcgaatgaatttaatttacatatgctccatcagcaccaggctgcacggtgacatactacatccgcagtttgattttgggacaacttccatacttgaaggctaccagaatggaaatatattgattctaactatcatgggcaagcctgtcttttgccacaatgtgttgtttgaaacctatttgttaaaaggatcattataaagtaggttctaggattcccatagtcacagtctcattctgaggagtcgtgctgttgaccaaacacttgatttcatataaatcatggctgtgaccaataagtcctaaaagaaagatgtgaaaactagaaacgtggaagagtttgaaatcataaatgttgcttctgttgtcagagaggtcttgagcttggagaagccatagaaatgaagaggtcatctaatcaagattcttcatttttggtgaataaaccaacgcttagatgtgttaaattgcttgcccaagaccacgcagctaatgatttgtagagttggaaccaaaactcatcctggaataaggaccattagtacgttaagtgtttcttttgaacatgttaaatgcttcttacatgcatcatttttggatcctcatgacaaccctgtgatttaggactgtaattggttttattttctgaggaggatgttgaggcatagagacattgaatatcttgcccaggatcacccaggactgagatatattcactgcaaagaatgtgcttttcttttttttaatttttaaaatttttaaattttgctttatgttctgggctacatgtgcagtacatgcaggattcttacataggtatacatgtgccacggtggtttggcgcacccatcaatctgtcatctaggttttaagccccgcatacatttggtatttgtcctaatgctttccctccccttgcccctcatcccccaagaatgtactcttattcaccctatggtgtactgccttctgattcattcagtcattcatttcttccttgttattattattactgtttaaaattcattatttcgtgttaaaggaatgccttattcctaacagcccagaaacattgcctttcaaggactttccatatactcttaaaatctatatttttaaaaacctaccagctctaattattgcagatatagtcagtggaaatcactagctataataaatgttatttgaataattggtaattgtgcctggcttactagtatttgaaaaagctttcagattatagatggttcaggactcttataagatgtctaggtaagtttgaactgatagtttctttcttttgataaatgtcctatgccaacctacagctttaaaaataattcctttgaccattcttttaaaaagtcaccacttactcttttttttcttttctttttttttttttgagacagtctcggtgtgtcacctaggctgtagtgcagtgatgttatctcggctcactgcaacctcctgggctcaagtgattctcctgcctcagcctcccaagtagctgagaccaccggcatgcaccaccacacccggctaatttttgtatttttagtaaggatggggtttcaccacgttgaccaggctggtctcgaactcctgacctcaagtgatctgcctgctttggcctcccaaagtgctgggattacaggcgtgagtcactgcgcccagcctcaccacttattctttaaattcttggaaacatcatgaaggaatcaacttgggatgggtttggagccctccttctctctcttcttcctccttttcactccccttcagtaacagtaacatcctggggagctctgaagctgagatttcataaagatcagatgtgtttttgggagacagcgtgtgtggggtgatgggtggggaggagtggaggtgagaagtcaccctgtggcatgggagaggatgtttgatgttgattttctgagtgtcagcctcctgtttctcaggacggttggttgactgtctttttctctacttgcgctgcccacaaagagccagatgtgggtgcctccgggggtttatgggacccacttacctgtgtgaagctggcttacagagaggggagaatgggtagaccctggtagcgtccagggagactttcacgtgggcgtggtttgtactctgacccactggtgactttaaacaatttgtcatcaaataccacagttggctttgcagctatctggtatttgtgcctggagtaggtttgtttgttttgttttaaatgcttctaaattacaattctttgtgagcttcctgtttcctacttacagctgaaatatgtgatgactgactctaccaggactgcttttttccccttttctgcatttgtgctggaaacagaacagcttgcacgcacagcctggagcatgttgcctgcatgtgcttcttggtggacgtgagcacatggctgactaatttcaaaaaccgcctatttatatcctcttcagaagcgctgtcagacattaggcactctctctactaacgtcacgtcgattaatatggattttaaaatggaagtaaattattttttactcatgggtgagtcattagatagtcttttttaaatatacatcccaccatttctctcaagggtgtcacactggtaattgtcccatgctggagttttcagcagttatcataggattgagtgcaggaggaggctgtggagaacacctaaccctctgattttatagatgaaatgacagcccagggttgctgaattactgagagctcaaagctccttggtgcaaatctaggactagagctctctcctcccgtagcttcgaattgagcacagtgtcctttactgtcacccaccttgcctcaccctacctaccccacatgctggcacttgccaccacaaaagaataaaaacaaggacaggaaacaaaacttcctagttgctagggttgtggtgacgattttatagcagaaaagaaaataatgtttaagatatgtaatcctaaagaaactgtctttttttggatgtttgtgtaagacaaattcttattcatactaatggaaagtcttaaaaacattaaacatgaaaaatagttgttcataccatgaaaataagcctaggcatttatttaaatgtatgagaactatctttgtcgactgtgtctgttgtccacattttgacttctagggctaagcaacttcccgcgattggataaatatgggagttctttctaaataaatatatgagaatatatttctgtgcataaatacatgagaataaatacatgagtacctgcattgtgtcttacactgtcattatcctcaggcttttttcagatgtatgttgtcatttattagttccgacactggcgcattagaaggacgatgaactttttgctagatagacctaggcggcatgtcgtaagtgcttttatcttggtgagttcaagttttctcatctctgcagtgtgactattatcaggcaggaaaagcacctggcacagtgcctgtacacaggtgtgaacagaggttagtgtctgctcccccaaggtggtgttgtgatgtgatgtcatacgtgattgtttacactctcacctgatgggcgagactattccattctcataggactcaatgagagagagtttgtcccaggattggggtgaatgtttcacctatatcatcctcttgggccttctccacctgaaatgtagcctagtttgataagcagtggtagaatacagagacaggttaggaacctggtgggggtagagggtccatactggagctctgggatctaattggagagtggaggagcgaccctgggctcaaaggtatggctgtcttcatccatttgggctgctgtaacaaataccacagacggggtggcttaaacagcatttatttctcacagttctggaggttgggaactccaagatcaaagatgctggcagatttggtgtctggtgagggctcccttcgtgttttgtagaaggccacctttttgctgtatccccacatggtggagagggagatcatctgcctggtgtctctttttctaagggcactaatcccattcatgagggctccacttctatgacttaattacttcccctaagccccacttccaaatatcatcacgttgggattagggcttaaataatatgaatttatggtggaggaggaaaaaatattcagtccatagccatggccaaggtgagcagaggcttcaagtctatgggcaggcaggattctcatctcatatatttttttcttttatttttaaatctaccacagagacgttctttgctacaggtaggattcttaaaagcaaagcagtgttctgaagagaaggtgggttttcagtggcctgggatggaggaggataaggaggatgtgagttgtagaagtgagagtgaggctgaaggtcaggaattgaactagcacatgaggaattcgggtcaggaggtcaccagtaaccaggagttgacagtgatgcggactcagtgcccttgcccaggtattttgttgcttgctgggttcctgtttatgcaggagctgattgctggctgggagcacccctgcacgcccaagcaagagggatccagggtcagcagttagtggcaggagaaccccctgagggtgccttgtatgcagggagagtgcatttcctgtttggtttgggacgagcctggtccaggtgtaattagtaacagaggcttcctccttactcagcaatgactgctgtggtcgacaattaatatggtcaccctactcacgagtacttggttgcagagaagtatttgttatgtgtatgagtgaagatcctgaccaaagatttgaccacacaaggttctgtggtgagtccatggtttacctgtctcatgggcggagcttggctgcctctctttgtgtacttgttatttgaattccaaagaacgttctgcgccacacttttcagagctcttttctcccagtgtgtgttttagatggccgtctgttttgtcattgataagctaattctgtaaacctcagggcagctgcacatgcagcatctgtaattgcacctctgtaattggctggagtgctcgagagactgtacttgcttttcctggcgccccccagggtccgtggcttcacctaaaggcttggtggcagggactggtgagagagggaagaggaagacaggagggagaggattcttggtcttctactcatcggcctggttgacaggggctgggaaagtctgattcttagttgactgccgggaagatggggcttgcgagagtggagggggctgaggtggggtccaggtgttactagtggagggtgtccaggttcttggcattttgaacaaagaattggacaaaacgcacaaacaaagcaaggaaagaatgaagcaacaaaagcagaaatttattgaaaacaaaagtacactctacagggtgggagcgggctgggcataggggctcaagagcccggttacagaattttcttgggtttaaataccctctagaggtgtccctttggttacttggtgtacaccttgtgtaaatgaactaatggctcactattggtctgattggttatttgaatcagcaagaggggagcaatcagaggctgaagcgaagttacaaagttacaccctgtgccaacatctgattggttgcaggaagcaaccaattacaggctgaagtgaagttacaaagttatactcctgtgcaaatgaagacttggcctgtgaccagcctgattggttggaagaggggaccaagcagaggtcctttcagtttcacctgccatgcagaaatggtgggggttgcaaggggagtggcctccggtccttttgttacataggtgtggaaagttggggttatccttttgatttagttctaggaagtcagtgtgaatcggccttaggttccctgcctccagcccctattctcctgcctcacagggtccgtatcttggagctgtttataattgtagggagagcactgcacgtgtgttcctggttttcttttggtgtggtttctccatcccttttgggaggagttgatgcacttccttgaatttctgcaccaactattttatttggatcacagcatcttacaggctgttgtcatgttttgagacttttttgtttatggtgaaaatggagcgaaagactctgagtgccgagggccatggggtgcgaaagcataattctcatcggcagctggacctcggaggtccttttccaccttggggttttcccctggtcacttggttatacactgcgtttttccatatctggttggcaactctgaggacagggacccttggcatcctcatctttgtgtctctttagggtcctatagggcttaagtgcttcttcctgagtcattgctgctactcagctgagacaccaacgagctacccagatcagacccagagtgttgctgcttatttaggtggcagcctcagggctgggcatcaggagggcctgtcttgcttggtccctccatcagtctttctttcggacccagtatgtctcagcatctggatctgccggagtagctaggaactcctactgaaaggcagtgtttatttctgtgttggtgtcattttagtcccacacttcctgaactcaaaaccctctttcctaagacttgccatgaaacactcctatgaacaacggtggccacgagtccctttcggggagagtgtcgttttgtactttgtattgtgtcccaggccctggatcctgaggggtggccttgggtctaggagagcgctcaacagggttcgcctatagaagattcttccggtgaatggacgaacttgtggccttgtccagtggtttcttttcctttttccctgtagtttccttccactgtcaacttttccccctccttcatagcagcagatgttggcaaggacgtgcccagattagttaggcccagcctcttcttcttcctccgtccccacccaccttacctttaggactggggtggggtgatgtgtctggccacaacttccgcgaccactttttaaaaaaattaaaaatggagagccacgccacatgcttgtgacttccacaggtgaaagaatactcagctctagaagggcggaggtgagtgggtggtgacttcccgctaaggtgagcttgggtcctgttttcagagttctgtggtctgtgctgcggtcctgcgcttcatgtcatctgtcactaaggtgcagcagcagctactttccctgcagtatcttcatctccgactctgccccgcgagggccctgactctcaaataagacacaggctgtcctgttagccaagcagaagggatatgtcctcttctctctccctgggtaacttctgccagatgaagaattttcctccttctggtttctttagttggagaaatagtaatagtatgatttatcaggctctggaatgagactgccgggcccaccttccaggtctgccgtttaccagctttggctttctttctttcttttcttttttttttttttttttgagacagagtctcactgttttgcccaggctggagtgcagtggcgcgatctccgcttactgcagcctccaccccgctgggttcaagcaattctcctgccttagcctcccaagtagctgggattataggggcacgccactctgcccggctaatttttgtatttttagtagagatggggttttgccatgttggccaggccgatctcgaactcctgacctcaggtggttcacgtgccttggcctcccaaagtgctgggattataggcgtaagccaccatgcccggcgagtttcgtctttcttatcaataaaataatagtgcctccttcatagagttatacagtaataaagttggtgtaagagtagtgtgcctccatggaataagtactcagtacaacgttaaaacatgtgggtaggctgggtgtggtggctcacgcctgtaatcccagctctttgggaggccgaggggggcagatcacaaggtcaggagatcgagaccatcctggttaacatggtgaaaccctgtctctactaaaaatacaaaaaattagccgggtgtggtggcaggcgcctgttagtcccagctactcgggaggctgaggcaggagaattgcttgaatccaggaggcggaggttgccgtgagcagagattgtgccactgcactccagcctgggcaacagagtgagactctgtctcaaaaaaaaaaaaaaaaaaagaaaagaaaaaacaaaaacaaacatgggtatgtggttgcaataacttacacttcgatgctctggtactgtttttagaaagaccattatttatctcccagaggtgtggtcacagtttattatctaatcaggattagagtgaattgtttgaaaacttagtgtatatttacggggatagcaaagaaggatatttgaaactgaagtatcctagcaaccttggatccctttggtaacccatggcaaacaggctgctgctgctattctctgtggttgaagacagggttttattcttatgtgccataactgggagtgtcaacttttgtcacaaagaatgtgtcaacaatatgccaaagttgaaactgtcaacttgggcaagcatcctatacaattttaaacaataccaaattctgtacagctgtctccttatgataaatgggcattgattttatttatatttattttatttttttgagacatggtcttgctctgttacccagtctggagtacagtgatgtgatgtgaccacagttcactgcagccctggactcctggactcaagtgatcctcccaccccagcctcccgagtagctgggaccgtgggtgtgcaccaccacgctcacttgagttttactatgtttttgtagaaacagggtcttgctatggtgcccaggctgttctccaactcttgacctcaaacagtcatcctgccttgaccttccaaagagctgggagtacaagtatgagccaccgcgcctggctgggcattgattttaaaactgctcctggcgtggacacctgccggtgatggcagccagaattagatgtctgctgggaacatcctgatggctggatgaggctgtggcagggatggctctgaacgaacgtctttcaggccagttaatttttccactgcatttggtggcctggaactctgacacttgaatcaactgcttcttgagttgtggaatgcatctgaggctgagcctgacccgggttccagccgcttccctcgtggcaccctaccgcagccacattggcctctttgctgttttccctaagcagcgattcaggtgcttgcccagggcctctgtgtttctccagatccctgtcaggaaaacttgggccaaatgtgctgcagaggcctccgggccaccctttataaatgcgacatctgacgcgcaacgctctcttactcagctcttgttatttttcttccgagcactgcaccagaccgattgcagatatgtgcgtgctcatttgcaaattgcctgtcctcctcctcccctggcccggccgctagaacctacatttcatagactttgggttttgtatctgctgtttccagcagcagagacttgctttagttcttgctctgatttgctgtaacttcaggtgcattcagccaggtgagattgcttattgaacttaccaaagcaacagagtaagagttctggaggttttaatcactgtgctctcaataagccaacagaaggaaatgatctctgggaagaacgttctgcagaatacattacgttccatcttggtatgaagttaggatcctgggaggccaagtgtgaggatcctgctagcattttctttcagtgaattaaaatgatttaaagagcagtgaattaaaggctaggcataatcctatgtctttggcctttaacagttttttttttttaataaaacacagctatgtgttcagtatgcttttatttggcatgaatgaataaaggcttttgtccatgctgtagtgcgctgttccttgtgtaacattccatgtggaaaacttcttttagacaatcataccatgatattttttcttttccttgagaagatggatacttatttttttttctaagaatgtatagtatgtacctttttatttttggtcctggcccccaggaaactcaaaaccacacttaatacagagatctggaaattatattagcccttgtgtgtaccacttgctgtttcttttgtagggtggccttgacttacttactttttttttttggcacggagtcttgctctgtcgcgcaggctggagtgcagtggcatgatctcggctcactgcaagctccacctcctgggttcacgccattctcctgtctcagcctcccaagtagctggggctacaggcacccaccaccatgcccagctaatttttttggatttttagtagagacagggtttcaccatattagccaggatggtcttgatctcctgacctcatgatccacccacctgggcctcccaaagtgctgggattacaggcttgagccaccgcacccagcctggctttctaatgttattttatttacctagttgaatgtatgacttttttttttttttgaaatgaagtcttgctgtaacacatgctggagtgtaatggcatgatctcagctcactgcaacttctgcttcctgggttcaagcaattcttctgcctcagcctcccaagtatctgggactgcaggtgcctgccatcatgcttggctaatttttgtatttttagtagagatggggtttcaccgtattggccaggctggtctcgaactcctgacctcaagtgatctgtcctcagcctcccaaatgctgggattacaggcatgagacatgtatgacttttaacacactccaaatcttttttggaaggaactagtgaatgacagaacagttttatcctcctcttatctcctaatatggggtattgagtaacaaacttggttttgaaattctgttgcccttgtgtgcttttacttgggtaatgcaactaacagaaatttctggatttgcttaagtagaatttccatttctttgcttgataaagcccagggttgcaattttagggcagttaccagccaggtagagaggtaggaacggttttgagatgaccctctcactggtttcctctgtttattctaattgtgagattttggttactttgcaatagagggtttagatatgcactgctttacagcaaccgggtaactggcttctgaagattgaatatacggtttcttcagcattgctgtttccaaaagagtttagtttgttttcattcattgacttagtgccttcctctgttcaaggaattctactaattggtatgggtgtttccaaatgatgcttagctggccgacccttctttggagaagcttacatttaaaaaaattaattttcacaattggtatgtcaaattggtaattatttcagaaacaaattaagataacatcttagaaaatcaatttatggacttgagccgagtgcttcatacaacgaatgggttttttctaggtgtttgtcaccgggaattttcctgagaggcttgtatatattaatagaaaaggagtgtagcttttttttctcttcgttataatttaggtaaagtcttacaatgtgtgaacaaggctgtcatttttagcttgcgtttgaatgaaaacatgctatactttttggagaccctgattgagtaatcagtacttggggtagtgataaaccacaggtgagctaacttgcggcattctttagattaaaatttgatcgtcattgtttgttcccaacaatgatttgccaggaatggtatgcatacttctcttctgccccattcttccttgttctaatctcttcttaaatagttctgtttttcttttgctgaacaggaattcccaagtaaataattctttcttgtgaccgagggtgcagttggtgaggtcttcttgccttctgaatggccagtagctgcttccggactccggaaaatatgtcgcaaatgaagactgctatcactcactctataaacaggaccagaaagtgagcaatttggcaaggtcccctctctcggcaagtctgatggatctcttttttttccccagtgaaggcttgtcatatttataagccagtagtgttatttcagaatctccgaaggaaatgtgcctccgtgatagggaagcaacttgtttattctagacttttcttcactatatttctaacgttgaggaaattactcaaagaggtttggcagagtgaagacagatgagtgagactggattgagtttatggaatgtattaattcaactgatgtttgttcaactccaaatgaaggatccagcatccagggcacagataagtgcaggatattcgccctcagggaacttcctgtcattagggaggctggcacctgcttgcagttaacagaaatgttagcgtagttgctcattctgcttggaagcggagttcgttaccatttcatttaatgaacttttccaaatggaaagaaagctttgtacccgcacgccctggctctggatgtggaggttgagagccctgtgaagctcttatttaaacatgaaaatgggtgtcagctttaggactaagttccactgggaagaactgggggaagggagccatttttaggtggcattagccataccacctttaataaaaaacttcgtgtaactcaatgtatttcctggctggctgcagttacagaaatattaactgtcctaaaatgtttatcttaaagagaaacgacttcagtattagagaatgcacagaaaactagattataagtaaatacttttgttcacattgggggttaaaaacattgggcctgcttcatcatggttattaatgtggacctgtgttgttacgttataagcagaggtttacagatctgagtttcaaggcttggcacttggaaatgagctgagattagcgttagagaacaaggcctctcctgccatcttgggagctgaaatcccaggatctcaacctgaaaatcaggggctaacactctgatattgatctgtataccttcggaaatacagtttttaaaaagaaacaatttttaagactagaacatttttttttatttcctcgtactatgcaagtttatatacgtagctgtaaaaggcaaacgtaagctcgcttttttaaagattcacgtgaagctgttttctttccgtgaacggaagagtttgacagagaaacaccttggtaagcacacatcgagaatacgttattagaacatgattctttctccattgggccccatgaggccaagcagaaaaatccagcaatagaatgcaaatatgagcatgctttctttaagatgtatcataaactgttttctgtcagagaatggaaggatttgacagagaaacacctttgtaagtacacatcgagaatacgcaattagaatattgtctcagttgggccctgtgaggcaaggaggcatatccagccataaaaggcatgcatgttttctgtaagatttcatcataagcagtgttctgtcagtgaatggaagcatttgaatagagaaacttctttgtaagcatacattgacaatatgaagaaacaattattgatcaaaaaagccatgcattattatgtattttttccattctgcttgtaatcagtgttgctgttttttcgtcgtgtttaatagaggcaacacattactgatcccaaatactctgggaagatttaatctaaaataccccttctctattcagggatctgatcatttctgttcttaactaggttttcattggtattctcaacttttctaataaaacggtttttgggacttgcaatcttctttcattttgtagtaagtagccttattcctgttttatagatagaaaaaaataaagtacaaagatgtgtttgcactgttagaattctaatgccacagaatactactgtaaatgtttggttccaattgtgccagttttactaatatcacatagtacagaaagccataattttgtgagagttttcccactgttcactgctttctaactcagtggctttttgttgttgttgttgttgttgttgttgttgttgttgtttttgagatgtagtcttgcactgttgcctaggctggagtgcaattgcgtgatcttccctcactgcagcctccgcctcccgggttcaaatgattcgcctacctcagacttctgaatagctgggatgacaggtgcccaccaccacgcccagctaatttttgaattttcagtagagacggggtttcaccatgtttgccaggctggtctcgaactcctgacctcgtgatccacccgcctcggcctcccaaagtgctgggattgcaggcgtgagccactgcgcgtggccaactcagtggctttttaaaaaatcgtggtgaaatatacacaacgaggtaaaccattttaaccacactgctgtgcaaccatctccaccatccatctccagaactttttcatcatcccaaaccaaaactcggtacccataatacaattcctccccattcccttctcccagcccctgggaagcagcattctactttctgtgagtttgactcttctagggagctcatataaatggaatcgtacagtacttgtctttttgtgactggcttatttcgcttagcgtgatgtcttcaagacctgtctatgtggtagcatgtatgacaatttccttcctttttaaggctgaaaaatgcctaatatctgtgttgtatggatagaccacatggcttattctttcatcccttgctggatctgactcagtgtttttatactgagggtcacagcccgcattttaaaacgtaaagtagattaggaaatgtgtgcccatatggggtatttgtattgttttgtgagcccgtgcacacatgtgtctgtctgcattgtgatgtaaaatgtttttctggttgtcagttgctgttagaaaagtttggaagctgtaccctaaagatcttttagatgttaggtttccctggcccctgtgcctgcgtgagctcctttgtgacgtgtgtggtattcccttggtgtccaggccatcacacagtgctttttcttgactgtgtttgtattgctctccattgaaaagcttcttggccgggcgcagtgtctcatacctgtaatcccagcactctcagaggttgaggcgggcagatctcttgaggtcaggaattcgagaccagcctggccaacatggtgaaatgccttctctactaaaaatacaaaaattagctggtgtggtggcacgctcttgtaatcctagttactcaggaggctgaggcaggagaatcgcttgaacctgggaggtggaggctgcagtgagccaagagtgcaccactacactccagcctgggcgatagagcgagacgccatctcaaaaaaaaaacaaaaaaacaaaaagcttctttagcgtgtgatccccagtacagggaagtacaagctacttaaactagaaattctaaaaaatatgccacctgctttattcagtgcaagaagcttaacccctttagtgcttattattgactcatacagataacttagttttatgagctactttcccaatggtcggtaaagtcagtgttttcattaaaggtcagtatgaaagactgttaataaaggaggtcatatttcttttcctggtgtgttctccgatggggcacactgtaccctagggtaatatgatttttggaataaaacaggcctggattcaatcatcctgttatttgctagctgtggccaattatacacgaattacgaagagatttcaccatcttcatacagaatttatagggccatatatgacttgtgttgggggtggagatgctttggggaaaagtgtgaatgtaatgttattaaaaaatcaagtaattttatttcctacccttcatactaacagtataattttgtaattctttttctaggagttgactgaaatgtactaataatctgtgagaggtctgtgtgctaagccttttctcagtctcgtctcttggccaattgtggtccattggataaaaacagtatgtctggcctgctagtctgatgggctgccaagaggtggacagttgtgatcagccacatgggctttgttctgacacttgggtgacggtggaagctcctgattggcaggaactctgcaagtgtatgtgggagcagtgtttcccaaatgctgtttgcccagggcacatttgtactggtttgcaaaatgtcctactgaagatccttgttaataatgtgtaggttaaaacaacaacaaaactagggttcagttttgagatattggatagattatatccaccgtgcatacatattgtgatgtctcagggtacagaatgtaaagagtaacagttcactcttacagattcagttgggaataactgtgtcaggatgcctgaggaatatcaccttgttatctatttattacatactaattcaagattttttctcagggtggcatgcatattcagtagtgtttgtgtattgtactaaaccctgttcttactgaactgagattttgcattttttataagcagagcttggaagctgaacccttaagtgtctaccctggtcttgtggcatttcatgttgagagcaccaaaatattccctgtgtcatgggaagggtagattatgagagaaggagcagaaagagcagataaactcctgggccctagggtggttttttttttttgtttgtttgtttttatatcatgtatccacaatgatcatttggaaggaatccaagtgaatcaagtgtgagtcaaacagcattgtttatagatgctgttgtagtctgttctatgctgccgtagtggaataccacagactgggtaatttacaaagaaaagaaacttatttacttatttatttattttgagatggagttgcccaggctggagtgcagtggggtgatgcagcttactgcaacctctgcctctggggtccatgtgattctcctgcctctgcctcccaagtagccgggactacaggcatattccaccatgtcctgctaatttttttttttttttttttgtatttttagtagagatggggtttcaccatgttggttgtctaggctgatcttgagctcctgacctcaagtgatcctcctgccttggcctcccaaagtgctgggattacaggtgtgaaccaccacacccagccaaaaatgtgtttcttatagttctggagactgggaagtccaaggtcgagggcctgcatctggtgagggccttcttgctgcatcatcccatggtggaaggtggaagggcaaaagaggaagggggccgaagtcttccattttatatcccacttccacattaacagcattaatccattcatgaggtggagcccttatggcctcatcactgttgcattgaggattaagtttcaacatgaactttgggggacagagtgaaaccatagcagacagttttcagagctttccaccaagcctgtttctctccacagtgcactgactgagcagggctgcggcactgggaggtagctggtgtctgccatgcactgggcttggtgcaggagttgaaatgtacttgtgggccagatgtcaccaagtgggcgtctatatgtgcctctgcaatggtaattccactcttgctgctttgatatatatttgctatttcctaataatatagtaataacaatctagaactggaaggaaactccttgttttagaggggaggatccttcagcccagagatcatacagatatagttgggcagagttgggactggaactcaagtcccttctgcttgtcgtttttttccaatctaatatatatgtatatctacatacacctatacataacatatatacacacacactctaatatatatatatatatatataaatttttttttttttttgaagagatggggtctctgtgttacccaggttgaaatgcagtggctcttcacagatgtgatcatagtgcactacagcctcaaactcctgggtacaagcgatcctctggagtagctaggaccacgggtgcacaccaccgcacctgtcttccgccatgttaaacataacccttccccatagaaaattcttagcacattttataaagtgggctgtgatgccatgaatcccagcctcaggagggccattctgattggtctcaggcctccatgctgtaggtgttgtggtgatgctctaagaagtgcgagaacttgtcctcctccaattggaggttgactcacgcatgcttcctgcagtcaggttgtgtgagtgttgcaacctggtacccacccagggctggagagtctgcgtgcatatttgcttacaagtagaggagctgatttttttacagacaagtacatttcaccagtgctgccagcacgttctcttggtctggaaggtcagtaactggtaccagagttggtacggtttgtttttcattgtttgctctggcttctgtgccggatgaggtcattcagttgcatacagttcctgctttcagaagttgctagagtgtttctctttgaacttgaactgtggctcttttgatatccagaaagagagttctttgtggggatggttaattcttgttttgggtgcttttcttcaccgctctaaggaactaccacagtcagaaggtgcattcttactgcgatctttttatttgctaccttgggcttaaggagcctgcctatatctactgaggtgaggttaggtcagtctctgtaaccgttcgtcacttaggccttgatgggtgacatggatggggatgacttcctgggctaactcttctcttgctaaaggatgatttttcaccaccttgaatgcccatgattaaaacataaacaagaaaatagatatctgaggtaagaataaacactgggacttttctatggctgttgaataatgtagtccttctctagaaaatgttgtgtgaacttagacttgttaacagaatagcagacttgtatgagactaaataaaaattatatgttgttatagtgagtggtattgaatagtgtgtctttgccaggaagagagctttgtaataggctgtgtcttgtgtagttgtgaactatttttttttcctaaaatttcttcagatgccaaccatgtctgtcaaactctggatgagtcgccttttacttagctttttaagaactctttttggattcactaacttttatctgcattattttatccatgctctattaagtgtctaggatcctgataattatgcattttctctgaagatatctatttccagtaaaatttgactatctagtgaagattgtaggcctgataatatattttgaagtgcttgttatgatctgaatgtgtgtgtcacccccaaaaatgcatatgttgaaatttgaaccccttatgttatggttttaggaggaggggccttggggagtcctgagaatgggattagtgcttccaggagaagagacaggagagcttttttctcactctccctgctgtccaccatgtgaggacacagccagaaggtggctgtgtgccagtcaggaagggagccctcaccagacacccgatctgctggcaccttgatcttggacttcccagcctctagaattgtgagaaatagacaagtgttgtttaaggcccccagcctatggcagcttgttatagcagcctgagctaagacatatttgattttagcaaaatagcacttgatttgaaagcattctgctcattgccatcacctcctccttcacagttgtggattaaaaaaaaaaaaaatgaacacatgaccacaacaaaacactgatatgtgctgagtttaatttacttcttttttttttgagatggagtctcactctgtcatccaggctggagtgcagtggtgcagtcttagcccactgcaacctctgcctcccaggttcaagcgattcttctgcctcagcctcccaagtagctgggattacaggaactcgccaccatgcccagctgatttttgtatttttagtagagatgaggtttcaccatgttggccaggctggtcttgaactcctgaccacaagcgatacgcccacctcagcctcccaaagtgctgggattataggcgtcagccactgtgcctggcctttaatttgcttcttattccttggttaggattagggagagaatgtcttgggtggccactgtggaaacagcatttccagtacctgtcggtacttgtctaaggagatttaatgctctccttcctcttgggcagtcattctcacagtggctatggcttgtcttgctacatacactgtgtaaccaccctgccctgctgggccttggtgtacacagatattgggtaaaaatctaatgttgacctagataaacatcacacacacacacacacacacacacacacacacacacccaccacatttttttggtaggtacgttttcaatgtcgtttcatttcagaaaaaatatgggctacccttatattaacataggacactcaattaccttgtatgcattcacatttatttacatacagtttttttctgtagcaatgataaatgcaatcctaagtaatattggcttaatatttggatgctttaatttataaaagctttccctttctatggctcatgacagtgatttatatatttattggtagctctgttttagaaaagcgactgagttgctgggtgtttctgccctagtttctggtttccgggaacctctgggctcgcccagcctgcctggttggctgttggctgaggctggccaaggttcttgaaactgttgacacctgtgaagctctctgtccatctcagtaggcgcgagagtcccagatcttgtttggggaagcacggccttgcattgaggagggagaagggaagaaagaacttgattatttcagagaagagacagaggaaccttggtttccctcaaggtcttaagtctggagtacctgtcacttctgctgacctgtgagctgactgtgtgagggctccacccctccagtcctggcctatttccatctttcccaaaacttgagaggaaggttacactgaacagaagtacctgtgttgttcttgagttgaggaatttttttctgctatatttttttctaaatgatgctaaagtttttgctggaacaatatgttgagtctgtctagcttccggaggacttagatcaccacatgttatgatcttaacgtaacacatgtgtgcatgcatgcatgcacacacacacacatatgtgcacaatgcaaactgcagctcaccacaacacaacatgtaccctccccttcctttcatggggataggataactcgaatcttccttctgacttttattgtcaagaaatattttctacactctctatttctatatcagttgttggcagttatatctgcaaacccatgagggttttctggattcagataacacacatcatttgtggaatatgaggaatttaaggagactcgagggtgggcaaagatttgaataaacatcagaacgaggatgattatttgtgaaacagacctttgagaattgagttccaagagcaacagacctttcgatgagaaccaaaaaattcattctgtagctcagaaaattcctaacttcatttcttcaggataaacatgtcattataccaaatagcaatctcagtgtgttaaaatctacctatgcactgtgtcccacagacatcgtcagatgccagctctcctggtgttgccatttattatgttgccgacgattctgggatttaggatcccaccttcatgccctgtctctccccctccttccaggttcctgggactgctctttgcctcccccttccaccccaccctctctcccttcccctccagcctcttccaccaggtgctgtgctcctgccttgggatcagccagctcccatgctgcctccttccccagtatcttcacctcctggtctaacccagagatcagccacccttctcctacccgagtatcttcacctcctggtctaacccagagatcagccaccctcctcctacctgagtatcttcacctcctggtctaaccctgagatcatcagccagcctcctcttacctgagtatcttcacctcctggtctaaccctgggatcatcagccagcctcctcctccagtatcttcacctcctggtctaaccctgggatcatcagccagcctcctcctccagtatcttcacctcctggtctaaccctgggatcagccagcctcctcctctagtatcttcacctcctggtctaaccctgggatcatcagccagccttctcctccagtatcttcacctcctggtctaaccctgggatcagccagccttctacctgagtatcttcacctcctggtctaaccctgggatcatcagccagcctcctcctcccccagtatcttcacctcctggtctaaccgagagccactctccgagttcagtgctgccttggctcccttgggaatgggagtgcaccttctcccaccctgtatgtgccttgggatctggaggcagggcttaggttcctgccctcatggccacttttgggtcatgacccttcccctcgctgctgctttgagccttgtctcagtcgtattctgtcctctaccctcagtgctagcatttcctggtcgtagctcctcgttcgttccttgaaagttttggcccctggctcacagtcatctgctgcaggggtcagtatttgtcaaagctcaccggggactccatggcagccggagctgagtgaccagcagcctggtttgcctgagactggagtggcagcaggagctttttgggatggggatgttcagtctgaggactaaggagtttcacaggacgcaggactttcagtgctcaaactaggaggaggaggttaccctaaaaagacactgttaataccaggaaccgcttctgagctgaaatccagagatcccactcaccagaagcttctgtccttcagctcagctgacagattacaataagaacatcagatttttcccattccaggtccctttccaacccctctgctcctgctggactttgcctctgcttttgaattccaacatttcagcgatgcgcttgtcaacgcactggaatcccttacttcactctcctgggggattgggcggcccacccatgcctgtccctggacttctgagttctgccagagaaagttacacagttgcctctctatgatcctgatctctgcctcaccagggcctcaacactgcctggaaatcagattttcctcatcaaccctcttcctctccataatgacttttccaacctcctccacacttcttaaatctctaggttcatactgagcccatccctcctcctctcatttcactctcggcagattatctttccacagctcacgggacagtggtgcgaaggccattctctgaccttcccactgcccctttgcaaatccgcctgctcttgggcctgtacttttctcatttttctgtttatagtgaaagaggaatcttatttattctctagaaatccatttctgcaccaccattctctcccacctccaatttatttatttttatttatttatttatttaatttgagacagagtctcgctctgtcacccaggctggagtgcagtggcacgatcttggctcactgcaagctccgcctcctgggttcacaccattctcctgcctcagcctccaaagtagctgggactacaggcgtccgccaccatgcctggctaatttttttgtattttttagtggatacggggttttactgtgttagccaggatggtctccatctcctgaccttgtgttttgcccgcctcggcctcccaaagtgctgggattacaggcgtgagccaccgcgcccggccccacctccgatgtaaacctctctcctggtatttccttctcatgagcatttacaagtgctcaggtctctcctatcttacgacaaaaacagaacccaagctcttcttggaactctcctctttcagtgaccactttctctttccttctcttgatgaaacattttgagagcatgttctactttctgccttgtactattacctactgctacacagcaaatgattgcacactcagtatcataaacaacctgtgttggttccctcaccagttccgtggctcaggagcccgggcacagcctagctggtttctgtgcttcaggctctcaccaggctgctgtccaggtgggcgccagggctgtggtctcatcagaggctcgactgaggaagagtgtttccaggctccctcaggtcatgggcagaattcatttccctgcagttgtgggacgtgggtcgcctgcagttccatgccgcacaggtccttacttcctttcagctggcaaggatggaagattgcagcatgatggcttcacaggagtgacatctcatcacctttgctatcttctgttgttagaagcaggtgacaggtgaacagtaggtggagaggaatgtgggatcaccttaaagtcactgtgttacctacttattctttcattcccctttcactcctcaatccattagattctgttttttatctctgctactttagtgaaactgataccagagggtcaggattggctacaaaattttctgggcccagtgcaaagtgaaaatacagggttctttgttcaaaaattaagaatttcaagatggtaacagcaaagcactaaacgaagcgtagggcccctcaggcatgggggctgtgaaggtcccatgcccatgaagccagtgctgcagagaggccttaggtccgccctgctgcgagttccacagggccctctggttgtgttcctgcttggcctctcagcagcatttgccagctgggatttaccactgtggagcgcatcctcctctgtgaaacatccccctgccctctgagcgcctgagacactctcccctgggtttccttctctcgctcgattatccccttcagcctcctttgcagcctccccttcctctccccacccctttgtatttgggtattttgaggacacttttgccaccctgctgaggaatatcagcagtttcagccgcttcgtttgctgtaggattttggctgtcatatctacgtatccagcccatacctaacttgtgagctcaagcacctatgtcagtgcatcctttatagtcttgcatgctttgcaggtatctaaaatgcagtgagtctgtaacacatttccttgttttctctgatccattgaactggttcttcctcagtgtcctctatttcagcacttggcctcattctttccccggggagtctgggtttgtatctgtgtgctaaccccaggcttgagtcccatctttcttctggctcatcttgtgctccaagcccatgcgcctatgtctgccgagggttctccccttggactgcatttcatcaaatgctctccctggacttctgtggtctgttctcatggtgacctcggcttcctctgttaaaacccagcacacttcattgctactcctttgtcgaatgcctgcttcccccagtagaaaataagctatgataaataagtccacgaggcagggagttttactgctttatcctcagtgtcaagacatatgcctggcacaagctgtacactcaataaatacgtgttttaatgaaagagtttgttttaattttcagcccaattttttaaagaattaaattgattttttagagacagggtctcgctattttgcccaggctggtcttgaactcttgggctcaagtgatcctcctgcctcagacttccaagtagctgggattacaggcatgagccaccatgcccagcccagcccaatttttcaagtgtgaccattttgttgttttagaacgaaagtgtagaaaatactatatatggaagagtaggacaatggtatagtaggattcctgttcttgagatattagaaatatctgtaatgttataataggtttgggcctttcagttggattgttagtaattagaaagtaaagctgtaacaggaaataaatgggtgtttccttatttctgttgcgatctgggcactaacaggtggaaggaaactggtgccatttgccctgcagaattcacagaattaacttgtgcaatttgggtgggaggaagtcaaaataggtgatgattaaccatggagatgagtgtatttcagatactgtcatctgaatcagtttgcccttaccacagcaaaaatgtttttataatattttatcttttttttttttttttaaacaaataagtggtgaggtagtcatggtgagagatctgcatctctgattcttgggggcactgtttcctcacaaacctgcagtatctgctttgaaaactattttgatatagaatggtgaaatggatcaagtatttgggggcctaattattcagagactaaatgtggccggaagaggaagaattctacccaagaaagctgccgctgatctgctcaacgtctcggagcagtctttttttaagcagaagtcagtaacaagcaaacacaatgtcaatggatttattaatctgttaaactcttcattctgttacctgctgggtctcaatctttttgacctcaggacccctttacactgttttaaaaaagtatttgagaatcttaaagaacttttttttggttatatctattgatattttactatgttaaaaattgaaactgagaaattttaaaagttcactcaaaaataacaaacaataataaacctgttacatactaataaaaaggccatttataatgaagaataaccttactaaaacaaaaaaaagtatgagatgaatgtttcacattgttttatttatctctttagtgattttttaaagtgaaaaccaaaaaaaaatttagtgagaagagcgacattgttttccatttttgtgaatctgtttcataaccagctttgatagaaaatagctgtgttctcatgtctgcttctgtaatcagtctgtcggggtaggttgttttgggggtcatgtatgcagaaaatctagtttcacacagttacatcattgggaaaggccagagaattgaaataaccttttcagataattacggacattcttccttgatactacaccaaaacctgatgagtggtagtgtctgaaaggttagttacaatattctgaagccatagcaatgatctttcctactctgttacattaaaatttgtctatcttgcattttgaataggacgatagaggaatagttaagtcacctataatacattcatgtaatggcagattttgcagccatatattgaaaaagttattacaggtaaaatgcttacaaatgtaataaattatctatttaatatcccaattttgctaaaaaatgaaaagaggtgtgtattgtattagttgaaaggaaatgtatcaaaatataaatattttaaatgatgcattcatgggggaaattttctttatacttttctgtattttccaaattttgtgtgatcagcacattgcttttaaaatcagaagaaaaaaaataagtattttttgttacgagagaaatgtctgttaaactgtttccctcatctgtaggttgccttctacgtgtaaaaccccagtatttccaatttgagtggtaacaaagatctgttttctccctcaagtttttatttgtttaacagactatcgtaacctttctgtggctgttttaagcttcacagtttttccgctttatttcagtagtaattcattgattgaatagacaagttttgacttgttcaagaaaagttgcataaattaaactttcacatgtagcagagacataatttgctttttctcatttctgttatagctcaggcaagttctatttcttatctaagtgaaatggcaaaagaatatcttgtcctatgggataacagagctactctcatggttgagaaataacatggaaattagcatgcaatcgacttctgagttattgtgtctgagctgtttgccagtggtgtgagtgtcacagttttatggctggaagttcaagtggcttcagaaatgcaaagggcagctcacatctggggattagttccctgcttacccctggatttagaaaggatgtttgcaactaataatgtggctgacgtggtattgtcgtaaaggattgctacttccagaattttgtcttttgtggacaggcctccaaatttgatgatcatctgttttcctgcaagtggaagatttcatcatgtttgtatttctttgttttacatttcttatgatatagttgataattaagatgcctacagaagctacaaagcacccacaaagcaggaaattagcaactctgcctctaccacttgtagtaaagcttgaagacattatcactgacttctccagctgaatgtattgttctgtggctttagttaaatgtgtcagtgactctcagggtttagaatctctcccaagactgtttaggaaggtgcatcaccctttgaagtgtagactgtgatggaaaactacttaattgcatattctaatattgttttagattaaaagaccattctgtcctctgcttaaaacaattgaggatattatatttgagggcatccctactggttaatatcatcattacatttgaaaatgttcaaatttactttccatcactaagtatgagttgaactttttggagtagaaaatgcactctaaggccgggcgtagtggctcacacctgtaatcctaccactttgggaggccaaggcgggtggatcggttgagatcaggagtttgagaccagcctggccaacatggtgcaaccctgtctctactaaaaataccaaaaattagctgggcgtggtggcacatgcctgtagtcccagctactcgggaggctgagggaggagaatcccttgaaccctggaggcggaggttgcagtaagccaaggtcatgccactgcactccagcctgggtgacagagtgagactctgtctcaaaaagaaaataagaagaaaatatactctgagtatacctaatggtttattctcttttattgttgaatccactatttacatttctttctttcttttatgtattagactggactaggaaaggtttacagatctaaataaggaatgaggagtgttattatcattgtattgccatgaccacaaactgcggggcctctcgcccttgccctcccccctgtggttttgagggtaggaagccttaccataacccagttcctgatcatgccgcctccctgccgcttacctggtcaggcctcttcgctgtccctacctaccccaggcctctgtgtttgctgctccgtctgcccgaagctctttcccttggtagcccttggctctgtccctcacttccttcaggtgtctgctgtcttctcagcgcggtgtttcatgaatatccacaatagtgcaccctgccactccattgccttacctgtatttccctgcatggcactttgcacggcctgatattatatttccctcggtttgtcagttggctgcctgcccctgaatgcaggctcccaagagggcagtggctttgtgtcctttgctgctaggcccatgttgttgtgaacagtgcctggcacttaatagacacagactaaatacttgatgaattaatgggaggatgaattcaccagattccctcttgtgggtgactctacacaagatggcatttactcgccaggtgtccggctcccttcaaaagacagagaatgatggctggtttcgttgtagcttgactcagtggcacaccctgtgcctgacacccagttgacagatgtgtagggaacaaaattatgacgggatggccacacagttggctgtttgtactcattgctgccagctgtctcccagaacagtcatctgctctgtagggggagaaacagggacatgaaaagccctggaaggttgtcaggaagcaattttaaatttctaatatgtaaacatcggggctttggcatattttgaaccattttgatgataggaatggaggtggtaggagccaccctgattaagttcttgttgagaataaactggtgcaccagacatttacataggctgaatcaatgttgatggcagccgtgtttttaatccatgggcctaaaacagtgtccctcatacctgtctcttgctgaggcccctgtcgcaggtgagccatgtctgacttccgagccttccatcgactgctcagtccacgtcttcagccctatttcccaagcttacctagtgagtcctccttgactcaggctggttcctccattgtttctgccacctgcaggccattggtgctccttgaataccctgtggtgtcatcgctgactcgtgcctccagggctttcccgctctgacggctctgtgtttcctattgcttcatatagcttgcttctgaattagcatgcgatatgtgacactcatatgttatgtatcttggtttagtttttacagaaagatgaaagactcttaaaagggatcttggagttgttcttgtacatcttttatatctcctaagcctttgatgggcacttgttccaaatgggaaagaaaaaaaagatgaaaaaaaaaataagccacccagaatgcagatgggacaaactgttggtgttagagcatggtggtcacccaggcctagagtgtggggtacacaaggaccactgaactaaaactctctgatggtctggatcaggctattgagtagagcaacgggttgtagagtgcctggcacgcaggttgcaatgagattggggaagcaagggttgtgcgtttgttaattcagagattgtatgaaaatggaaagaattaggaggaggttgaggtttatactagtattattctctccacatttagagaaggctcttacagttcctttaatccaatactacacaaaaaagtcctctgagaggccgggcgcggtggctcacgcttgtaatcccagcactttgggaggccaagacgggcggatcacgagatcaggagattgaaaccatggtgaaaccccgtctctactaaaaatacaaaaaaaaaaaaaattagccaggcgtggtggctggcgcctgtagtcccagctactcggagaaggctgaggcaggagaatcacgtgaacccaggaggcggagcgtgcagtgagccgagattgcgccactgcactccagcctgggtgacagagggtgactccatctcaaaaaaaaaaaaaagtcctctgaaaactgagtgagaagctgcgggcttataggactgaagtttggtgctgaaattgcttaggggacccttttcagttgcctcctctttttttttttttgtaagagaaccgggggatttaaatctccctggtatggtttccattagaatggaagctctttggcaggtctgccaggaccatttatcaccttgtccctggtactcagacctcggtgctggcaaagctgggctcatgaaggctggctgcgcaggtgggtggctggctcacgcgcttggtcctggaggtgggggagaagagatggtccaccaaatggttcttgcagttctccccgtcctgccctctggacatggctgtgttgcggcacaggccgtgttgtacttgtggctgatcttgatcgattctcttctctgctccctgtgctggagctagacaccaggtgtttttttttgttttttttttttttttttgaagttccacaggtgattttgatgtgtgagccgtggttgaaagccacagctggactgcgttggaagggaaatggaggtcagcttaggccagttggttcacatggaaatcaacaaaaccagcgtggctttgaaggatgtataattctgttactctttgttggacccacacaactcagcagttgaaatttattattagtttttttttctcctgcgttttcatctcctaatttgggctccccttcatatagagcttttggaagcaagtaagaattcaagttcatcaggcacattttcactacacctggcagaacatattaaggtgttgtgttttataaaatccagccagaaactataggtggtctccagctccacacacttagcaaggcccctgctcaactccccacccaaccccagttttccagtccttcctgcgttcaccagaggcacagtcaggatcaccttagacgctgagttcagaaatggagaaggaatacagttaaaaaaaaaaatcaagatcaggtgagcagtagccagatggcttctccacacaactctctttctggatgcttctggaaattgccatccaattttggtcattcttttggctgtataataattcaaacggtgctttgtgaataagttaccttttaaaagttatgcattttagcatctataggaaggtcaaggaattattttacacctcagggtgaaataatttaattaggtatcttgtttaccctgagtcttctgaaagctagagggagcaaattggagcttttgaaagagtgtgtgtgcgtgtgtgcgtgtatgtgtgtgtgtgcgtgcacgtatgtgtgactgtgcgcgtgcacgtatgtgagtgtgcgcatgcacatgtgtgtgaatgtgagcacgtgcacgtgagtgtgtgcacacacacactggtggggaggcaggtgatgatgggttgtgtcatgaatgcccaagtctggcggtgcatttaatggagtagtccagggaagcaggaggaaactgaggaacagggagggcaagcttgaggaattaaggaattacctggactcacggggaggagctcaaaagacgaattcgatctttttctaaaaacattttaaacagtagtttgcctgactccaaatcaggaagagacagctttacctcatctctcctgcctcctagcctgtgggctccattagcaagggatgaactatcgagtaagagctggcactctggcatcaggtagacctggctgggacctggctgggtcctggctaggccccggctaggcccctccaatggcatcaccatgggcaggctgctaatccccctgggcctcagctactcctccgtcaataaggataataatacctccctcgcagaactgttgtgaaggttgagatgaaatatgagagtgtttaaagcagtgcctgggatgcagtaagcacttcgaatgttaaccagtagtagcagtcatatttttgtggattacctgggaaccaaaccgtcatcgttgatataatttctattaccagttttaaacagttaaatgacaaagaatcccattttaatcaagacattacagtagagcacagacccaacctggttgggtacttagtagggagaaatagaggctagaaattaataattatgcccaataccagtgaacagctgttttcgcactgtgaccagtttagtacaaataaaaatgtttatagactgcatcttttctccatgcacaatttattgaggtatttcatcactttaacagatgataattgaacatttagaattcctagccttgaagatccagcgaggtacaaaccagaaatggccctggcccctaggtagctaaatatctagaggggagaagatcaaaaacacacatggggctggcaataaattaaacaattacagatggtgagagttgggaaacaagcttaggacagagactgaccacggagggacccgtgttggattgttgatccgagaaggtgatgttgaaatacagactgagaaggtgaggaagagccaggggtcaggagaagtgtgggaagggggctggcttgggagggtcatgcgctccaggtggggacatcatgtgcaccaagacatgcagcccagaaagagtttggtgtgttccaggaatgaaggcaggcctgtgtggctaaggcgcagggagcaaggtggcggagagactggcatgaggcatgagaagcaggcccaggtcagatcaggtggggagtgagggccgctgccagggcattggagaagctattgagaggccctgacaatcccatggggggaaagtccattcttagtgcacgtttcctgctttgaactttttctattcaataacgaaaagctgggtgctatatttgttttagccacaaaactatctgggtatctttgagaagtggcacttgctgaggtggccttctaaatctttgcctgctgttccatggcaggatgccttgtgaagccaggtgtggcttgtggcctagatggaccagggagatctcaagtgaggggcagtagcacggagcacacagtaggtgtcagtcaagtctaaacgttgcgcacggctttgttttgtccagagctgagctctcgttaggtcggggcttgacaaatatgaatattgtggcctgggctgctctctggcatgctgagtgctgactggtgtatttcctttttcagccagagaatcctggtcaagccctgaacagtccagaaactctgaggtcagcatttctagatcttctgtgcatttgggaggagtcaccattgatgactttatcaattgtaaatttccgatatcaaattactggccttccagtcagtcggttctgatgacaggaaggacgagggctctggaaagtcactttaagctagtcattgttagtcaaatagtgctgtttttgtatatcgagtattgagaagggaatgtgcttggtctgtcttctctctctgcttcgtcacctgccagtcctgagggccccaggcagcagtgcagctttaatgtggattcctatggatcagaggtgtcctagggctcacgttgttattctgcattgcacttgcagccaggtaaaatcagatttctcctgtttccccttttgggggtggggtgtgtggatttgaaaggcctgtcacgtgtggcctgattgcactgcccagtgtgtgtgtgtgtgtgtgtgtgtgtgtgtgttaaagatgtctgcaagtttagcactggcctgtcctgattagtgaggacctctgattgcctaggccagggctcaggtgagaatactttgatgctgaggggtaaacttgccttctgaaggcacagagcctcctgggtggcagagcaaggactgggcctggcgtttctgacgtttagacctgtgttctttgataaagccatgatgtttaattgtggagaaaatggttctgcagcagatgcagtgaggaaacaaataatgcccaatttttccaagtcactgaatcaaatctttatctcagaagtgaacattttaagagaaaacaaaatttatttcttgctaatggcgtgggaacaacttatttaaaaaaatgagagtgagcaaaataaaactagattaaagacagaagtaaaatgtttagaatagtttgttttataatcaggcattaaattatgtcagtgggagtatgattccaagttcataatgtcatcactacttaattaaaataatagatgtctttgtaagtctgcttttgttagataatattatttaatccagtagtcagttttataatcaatgtttttccttgaggtaaaaaaacatcgtatgacttcaaattattaaacaactttataataacaatgtcctgtttcctgaacatttataaattcaatttatgtcatttaggcttatgggtgcttttctccaagtcaagattatgactttggttataaatccctctggtttgagaaagtagtgatttcttaatacttggaagatagtttttataataattagttgtatatttataatgtaaaacaaagagctcaactgcttatgactaatctgagcaggcagtgttgtgtactgctgctatgacaactaataatttcggtctgacattgacaggtaacttgttagaccataggagcttgcatactcacaattgttctatatttgctttaaaaaatgcctgaatcagtcatcagatgatggtgtattattgacatatttttcatccacttgattaaatgagcttttggttgatatacttctgtgaacttcattgaccgcccatcgctgcttctgctcacccacttttttggtagaggattggaggggatagcatttgtcatctaccttacacaggaaagaaagggacagtgtaaccctgttttgaaatgttctgttgaaacttattagctgcttggtactggtacttcctgtttccaaaaccaatgtttatgcaacgctacactccattgtgagattatttattgccttaagcagaactcctggcatgtttgagaccctgcccctctcatttgtaccagatccccaagtctcaactggtccagtccatttcacaccagcagtaccagccttcatccctctcctgcctcccttctgttgggtggcaaagaccttgttgggtaaataagtttaatctaatggttctcccagctcattcctcctgcccagtctgagttccggcccttatgactctctgactgtcattgtcttggctttgaattacctggcacctttgccctgtctgagcaatgctagcactcacctcccttcctttagtaaacctactcatgatgggtgtcatgtttctcatgcctgcagtgctgtgaactgcagtgccataaggtaggtgggaagtattcgtgggggaggtgtgtttgtggagtaaggcagtgggagggtagaggaaaaggagataaagaaaaagcccatttctaactctctgaacaggcgaggccagcttatctgagatgcctgtgatcaggtgagtccatatctactatacattaattatatatgacatatgtgtggcagtgagcctcttaggatgggccagaggcggcaaaccttgcagcaagcctgggaggtgaagacaaggaaaaacgggctcagaaagctacctgagccccctgaaccgctttaaaacgagtcagcctgtttgaagcctggccctcccattattaattgttatgaattttatgaatttgggcaagtttcttagcctctctggccctcagaacctacctcagagtgttgtaaaaattcactgagataatggcagttaggactgcccagctcaaagctaatattagttaagtaattatttttgttgtttttgctgctgaactaaggccagctgatatgtggcagagctgggctgagtttctcagactctaaagcttgggctccttctgcgagtcatactattactgttgcctcatctgttttggtcagtatgaaaagtgcctcagttcttagtgtctcccctactctttttgcccagtttcctgtgtggtggggttaaatggcccttgactggttcctggtaccagggaccagagaacttccttcttacccattgttaatttgagctaagggtgtggaattttgttcagcttcttagaaaattatgcagatagaatgattgctttggcattaagaaacttgttaactgactttcactatgttttttttttaaaggagaatgcagttgaaactaattttgtggatagagaaactgttggaactgctttacaaagtattttagtaagtgtggggaaatttactgtctcggtcatctttattcctcagctttcatcatgatgtaggggaaaaacttacctgtgaacagatataattattgaagtcatctttaatttgtattctctccctcattcacacacaggtaaaaagagttgagattattttttaacaattggagaaggtagtttaaagattaggtggaagagaagatgatgtcttactatcagtaatattaacccaaataaaactgtttaaatgtttcccatttggaagagatcatgacaggtggtatagagcaagctcatccaatgtacattgctgttggacgtttttgtgtgctttcgctagtctcaagagagctgccaaattactgtggcaagtttaagtaagtgaattagggcaggattttccaagctgctaggcagtctgttagtgggtcataaaattagtttagtgggtcacaacaagcattacaacgaagtgaaataatgacttttttttttaatggagtcttactctgtcacccagtacagtggtgagattttggctcactgcaacccttccatctcccgggttcaagcttttctcgggcctcagcctcccaagtagctgggattacgagtgtgtgcctggctaatttttgtatttttagtagaaatggagtttggctatgttgcccatgctggtctcgaactcctggcctcaagtgatccacccaccttggcctcccaaagtgctgggattacaggcgtgagctaccacgcctggccaaaataatgaacttatcacagtatacagcatgttgtaaaggctatgtatttctcctggaaacgttgacttcattttttttttttcattgttgggtgtgtgtgggtagtggatcactgtatatagataaagtgcgtttgaaagcctccgatctgagatattttagaaagtttatctgagttctttagagcaagtctaattgtgcagagaaggaaagtgcttataactgagtctttcttagctgtatttccatcaccattgagtggattcaccgtgacccattttagggttcaggactttggtcatcacagtggcaatgttttgcaacatcctccttccttctgtggttcccaccaagatcttcccaagcatcatttctaggtgggagggtcacacatagccatgccagttatcacaggcaattacacagagtagatgtgatcacacagaccgtccttttcaaattaaaaatgttttgtttctctaaggctgtcatttttcttttctctacactaaataaaatagttcacaatcctttacaatagaactacaccatatgtcacagaaggcaggtctccgagaggctaaatgtgtggcaaaagtagacaggaagcacagtccaaccgctgtagggttgaaatatgaaaagctagtgtcacaggccaccaagaaggttctgaagcctttttgggggagaattggggagaatttgataaagccagaaaggtacaaatagggactattgagactggcatttcagtggattaaactatagaaggagaaaaagatattccttaacattggtgataatatgttgttatcaggtataatgatttatagtaatggtaatacagatatttttttttccagagctaatacattttgtaagtggaaaataaggtttatgtcttcaattctaaagattcatagatgaaattaggaaaatagtgtccttaaaaaaaaaaaaaggaaaatagtgtccttcctaattaacatgtcccatgtaccactgtgtttatgtactttctactataaactgaattttaaaatcttgaataaagtatactcacaaataattggaatcttactcagtttgacatttgtaagattatcggccgggtgaggtggcgcacacctgtaatcccagcactttgggagaccaaggcgggcagatcacctgaggtcaggagtttaagaccagcctggccaacatggtgaaaccccgtctctactgaaaatacaaaaattaggcgggcatggtgggcgcctgtagtcccagctactcaggaggctgaggcaggagaatcgcttaaaactgggaggcagagattgcagtgagccgaacttcatctcaaaaaacaaaacaaaacaaaacaaaattataaaccaaaatgtagagaatgacttttagattttgttctttcaactctgagttgcctcggaaaacttttaaaagaattgtctcatttttcatggcctttgtgctacatttttaagtacttaatccatttaaggaggtaaaactatcctactgtaattaagctgttcagattaatttttttaaggcataaaggaagtagttagctatgatgatctgtattttcttgttacataattattttacaattgttcctctcgaagtgatgagtgatttcctctataaccagctgtcagtaaaagacaagttttcattatgagtatgttaacgtgtcctttgtccttgtccttttcatttagttaaagtaaccagtagctcctatttatgtgaacttgaaaaaggtactgttaaaaaaagttctgacctttgtgataagagctgtgagtgaagtcaaagctgataggatgctgggttcttgggtaatgaatcctgttacaacaaaagaaatgaaagcatgacaacttgggtaactcagggaaagaagccgatttctccatttcatgtggacttcgtatcaggtggagcatttacttaaggggtgccacgccacctttttctgttctttccctgagtcatactgctgctgtaggatttaaatccctcgatggtgtgttgagactttgggcaaacatcacttgaccatagagttattaggtagtaacagacttgattgcaatgcaatgaattgccagagtgagtaacttgatggaggatatgtattggttcttggggcaaaagtcctcatacctgacagccgaggactagagctgcagactcagtggtaggtggtggttgttctcacagacttgtgtagtggggaaggagtgactattaaggctttgttttgagagagacagacagagaattgacttgaggatggacgcttacaaagtagacatgagattactgcagtagtcctaaatgatccttaaaagcatcctgttggagtcaagataaatcggatcacttcacttctataggatctggattatgactgatgtctctgttcctcatcactaaaatgaagtggtatttctcgaaggcctcttttaactccagaattagatgaatttttgaaatgttgaatattttctaaaacagcctcctttccattcccgtaagaaaaacggttgttatgctctatagacatgtggcacccgatgtctgggtatttaccagtgagctctttgtttttaggctttcatcattctgtgttccttgtttgccaagtaggatgctcacttgcaggatgcggtcattttcccattcagcttttaagttttcctgtgtctgttactgtccatacagatagtgaaaggcttcagctgagtcctgtggggagatcacttcgagtttctgggtttgggtgtgctgtgatggggtgactgagatcactgtcggtggtgaatgaacggtctcatggagctggggttgccctgcttttgtttactcgtgactctacagggcagcctgtgggaaaatggcaaggcttggcgtcctggaaccacaagcctccagagggagttgaattaatgtgcagagttgaatcagggaaagttcagaggcagtgtagtttactcccttattccagtacccacactcactacaaatgtgtttacatttaaacttttgccaaagcccccttagtttaaaagggaggcttcacataaatggaaaagctgaggccaaaaggcctaaacttctctcatctttattgcttattgcagcttttattatagatgctgcgagtactcagcacttctaagaaactccgattgctcttgtttccctttcagcttggagctgggatccagagtagttaactgaggggcctcgcaagccccttgtcaggaggatggcctgcctttgaaggcagttgactcttgtatgtgtcttagtctctttaggctgccataacagatgccacagactgggtggcttaaacaatagatgttggtttcctcacacttgtggaggctagaagtcctagatcaaggtgccagcagattgggttcctggcttgcagacagccgtcttctcattgtgtcctcacatggcattgaggctggagagtacagggagagagattgagaaagaaggagctctggtctcttttcctcttcttataaggacactgatcccatcatgtgggctgcagcctcatgacctcatctaaacctaattacctttcaaaggtcccacctccaaatactgtcactttgggggttagggcttcaacataggaattttggggggactcagcattcagtcggtgtgtgtgcgtgtgtgtgtgcgtgtgtgtgcgtgtgcatgtgtacttgtagaggagggttgattgtccacctgacagccgttgccatcccctcttccctgctggatgccaatttgcatttttctggcacgttttgcggctagagtggtcatgtgacactgttctggccaatgaggcgatggaggaaggcccccgggggcttctgggagtgcctgccttcgcagctggagagagccctcctcaggggctgtctctgccttcccttcttcccatgtgtatctggggcagctgaggcagggctaggagaagagcccgggttcctcctgccacctccaagcgatgaagcagccctgggccaactccagcattctcgtgtgaactgcagaggagccctgcgcttccagctacttgcagccaggtgctgttacctacgccccacgcaccctcacagacctgtgtacaagggcacaagtacctcccctggagctggcaggaggtgcagtcggaagagcatctggtccctgaggcctccctgtgcctccccctggacccccagggtgtccgtgttcccagttgttgaccctcgggtgcgtctgtcgcgtctgctctcttctcctccaggcagggagctcctggaccacgtcttgctcccctctcgatcttcaggcccaccctgtgctcccccgtaggagacatagtaactggttcagccaaccaggttaactcaaccagcgagcgctgtgggtcctggtcttgctgacagctgttgctttactcctttcttgtttttggtgtcctccctgcgaagcctgcgtattggttgttcacagaaagcccaccaggtggcctgaagagagggaagtgggaaaacagactttaattaaaagggccggggccatggaaatagctgttctctagggtttggttagagacagacaatcctccaaagacccagacagagatgtgtcccagtcctcacgctcagttttcattgcggaagcagaaatcaaataagagccaacttaaattcttttaattatggaacattttaagcctacagaaaaaacacatcattgttaccgttgtttctggcattaaggtctcttttttctttttaagagtgaaaaatgaagttttccagacaaacccttaactaattcagtatttcaaaagtgaaatacaggctgaacatcccaaatctgaaatctgaaatgctctaaaattcaaaattttttgagcactgacatgctgcttaaaggaaatgctcaccggagcatttcagagtgtagatactcagaaatattccaaatatgctaaaattggaaaagctttgaaatctgaaacacttctggtgtttcggataagggatgctcaacctgtagtgagtgagtggttggaagttagaacatattcttctgtagaaacaaacctgtttgacccacaatttggccaatatacggagatttgagatgaaaaacttacaaaatgatagaatgactggctgtcattttaccagtaaggaaacaaacccagagaagtgaagtcaggatttaggtttgtggaccttttatttaaggttctttctactctgccatacgttactagtgacttcagacaacagtgtcgaatctcatcagccaaaacccaccaggaacacaacgtgtagttatacagaagttggcttcgtttagcttgcttctgccggggccagtgtacccagaagaaccctgggactattttggaaaggcagacttggggttgttgttggactgggtgatttgaaggtggaattagggaaatgggaccagatctgggttggatgtggccaggaggcagaaacaattcagtgattgggtatccaacaacttttatctaggaggtaggagattaaagtagagttagagtggccatgcagtaaagaatttgcaatcatacatgttggtgagaaaagggggcatctggttatttttgtggtagtaatgtgggcccatctgtgtccgtttttgagcattcattatgttctgatgggaatatgggggtcaggttgtcaattagactggtctttactttgaaggtcggtagggttgaatttaatttgttcaccaacttacttaatttcattctgaatgctgatgcttgaggaataggttttaatggagcaagatgcagtgggaagtagggacttagaggatgtctaaataaccgtgtctgagcagtcactggtttttaaacattgtagctgctcaatggtaataatgcaaattttaaaaaaggcagatgggtagttttcgcctagcttgagaagctttaaaaatcatcatgacgactgtactatcttaaaacgtgatcagctatagaagcagataaaactgtcgagctgttattaaagtgtacttacagttgaaacatattagtcttcaaagatgccatccagttactgatccagaggtaatgttaatggtggtgttactcacggtgccaaaacacccacagatcagtagaaaatgtggacagtcaatttagaaaatttgcaaagcagtcagaagtgagaggcagtgttgggtagtgaagagtggaccagactccaatcttggtcctagtccgagctttgccactgtgtggtccagaatgtctttgccactctcttaacttagtcatttcatctctctgggcctcagtttcctcatctgtcataatgaggaagttgaacacctggtctctgtgttccttctaaagtttctgtcattaagtctgtttgaagatagtctcttcttttgaaagtattagtttgtttggccagttgggccaggtcataaatattacggaattattagtcagctcttgaagacaggaatgtttgagggctttgaaagctagcccagcaggaagcttttcgtggtctgtgtattttccttcctctcaggaatgattaggccgaaatcaaccatcttctcagtccatcctctttgtagtttcctgagatgaatgaccgaggtgttttctcctcagaaaataacataggagaaaaattccaagggaggtctctttattcaggaacttgcaatttaggaattaagtgtgataactttattttaccaattttaattttgtgactataacataatataaataaggattctgttacatgcaaattttgaaatcatgcaaaaaccaaaaaaggaaaagaagtcaatcaaaacttgtataatttcaaagatggtggccaggtggtttggaagctgtgcatgggattgccacatggcctctcccctctagcaggcaacaggtgccttgtgtgtttagtcagtatctgctgcatgtcattgctgatggcattcaagtttttgcttatgtgtgctggtatttaatgttcacttagatctaaatatctttttttagccttcaaagatgtcaaccaggtattcatcaagagatatattaatggggatgttagtgatagagcccaggacacccccagcccccagatcaatagctttgtaacagaagcgctaaaccactatgaaggtgatcagacaacagggggatgcatcctgccattaatttagcagaaagagcacacgtccaaataggagagttaaaatagagaggtgctgtagcaaagtggctcagagcatggactctggagctagctgcatgatgctgctagctgccatttaattagccttgtagatttaggcaagtcacctagtctcgctgggccttaatttccctatctgtatgatggaataaatttaatgtctactgcaaaggttatgtgacacttagcaaacatgataaaacacaggttgccgggcccaccccccagagactgactcactgcatctccgatatttgcatttaactaattccatgatggtgccgatgcctcggaccctgggatgacactttgaggatcaccatgctgtgcatttgtacacacagacacacacgtaggcatttgttttccaaagtaaagggcatactgtttggagcctaatgtttttctcctatttagtgccttgtgaatattttccctttcattatttattctaataatggatgattttaagctgcactgtattccattattagatatttaaatggcttccattttttccgctatcatagaccatgccggaataaatatcattctgtgtacacttgtctacatctctgttgatgtctttagggtaaattcctaaaagtggaattactgcgttcaagggtgtttcacggtaaggccttttgctacacattgccaacaaattcttcagagagtagcagaaatttgtcttcttacaagtagtctatgagagtagatgctgattttctaaatgtaagggaataagaaaaacttcatgattaacttttttcacgtgtatttgggctttggtgggagtaggcaagaagaatatccgtggatttatagagtaagcaaaagtatgtcaggaaaaactaggaagaatagggctgaactgtggcttgatttcaggagagtttctgggattcagacttgaattaactgaatgatgctgtaatgtataagtgttggtataggtgattttatgcaaagaagaataaacattggcttacttttatttatcgtatacggtatgggtgactactgctgctagttcaagggtcttgattttttaaaaatgtgtttcttgactgtggtagctgggagccccaggatacagacttttggttaaataacatctgctccactctgccttcccgtgtgggcctctctaaccctgggccaagcagttgagtctctcctcggggtgcctggagtgagggtggatacagcttgggtaattcagcatctgtacctaaaaacttactcaaagtaggcttcatgtaaagaagtcagtggttcttgggaacaggggtgagtgaatggaggcgaaaggtggggccctccacaggtcagtcaggccctcagggtgggacaagagctgtagggctcttggttataaacctgtgtggtggagaccagcaggtgagccaaactcttctttattatcagaacatttcactaataagggatctcaagggtcatctggcacagccttctctttttgcagataaggaagctaaataatttattatttcagttaagcttcaccatatgagagtttttggtttttttttttttttttttaaagtttttaggatcagatagtgaaccttggaacagaattggctgctttttgtttcttttttctggaagtgctgaactttagagaattgtggctgcatggtagacaggcaaaacaggaaggacacagtgcagctgagagcgagggtggcctgtggtctctcgtttggcctggagaacgggctgatttcaactcctcctgcactgctcctgagtcacgggtcctacaccaccgtgcctctctcccgagctcaggaggccgagctcaggactgcatgctccttcctgagtggtctccaaaggcttcagagtggccttggatgaagagctgctcacttctgtgccagtcatgttttttagaatttacgtactagttttcttcttgcaattcaaaaaagtgttttttttcttttccttttagtaaagaaacacgtatgacgggttatttcttttaaaaagcaacagctcccctgaacaccaaactgtgccttttaccactgggtgacactgttagaccacagaacgtgctttgctggtaaaatcaagagtccttgaatttcagatttcatcaagctactttacataggagagagaaactccaaatcacttaatagtcatctatcaaatgttatttgataagtgtaatttatcaattttaaggccaatgagtttaaggcaatcagttattaaagaaatccattaattgggcaggatttccattgcttagaagtttttgcagattaatgtgctgcatattaatgaactaattatttcatgggaatatttatgcaagccagtgtactaatatatctatttctcaccagacaaaagtctaagttatctttctttggcaaaagactcactgttgatacacagcaattaatgttacggagttttagtgaggatttttttgagccatcttaaaagcacgtctgttggttagagaaatgggtatttggttctctgtactggtatgtgttaagaagattatgtcttactatttctgagctctttcaagatcaaatgaagacagaattgttcaaagcgtgggttgacctcccctactcagtttttggctccttttggaaatctgatgtctgcccttctaagcgtaaggtgagcattatctggtcagtttcagctgaccactatgtgactgagatgtttctgaggttaagaattgagtgcgagtcaggccctccctttgtggggttaacatgagaaagaagacaacttcaaatttaattttaatagaatcagacttcagtatcctacaagaggtattaatggagtcctgcaggagtgtaaaggggaaacactgaggaggagccagggaagacttggtggggtgagttccttcatttgggtactctaaaccgcccgtattatcctgttcattcaatacttttttttttttttttttttgagatggagtctcactgcattgcccaggctggagtgaagtggcgtgaccttggctcactgcagcctctgcctcctgcgttcaagcgattctcgtgcctcagcctcctaagtagctgggactacacacatgcaccacgatgcctggctcatttttgtattattattattatttttttaagtagagatggggtttctacttggccaagctggtctcaaactcctgatctcaagtgatctgcctgcctcagcctctcaaaagtgatgggatttacaggcgtgagccactgtgcccggcccattcagtacgttttaatacggtgcacacagtgtgacatacagcccagggctggggaaggcaataggaggtaagatgagaggtttgctggcctctggaggtcagccagaggcacaaggagtcggcagctccagctttctcctagctcttctgtgtctgctagtcactgtgaggccactgctactttgtatggcttatgtacaagccattgtgccagagcataggggagaggatggaagtcactcagaggtcttttcccttctgcagagattcacttctgtgtccttcaaggggagacagtgtggaaacgtgggaaattagcccacaggcggggaagtgcctgaggcaaggggcgtccagtggagtcttccacagcagttcaaacagtaggacatgtctccggaggagaggccccgggaagactcggggaggcaggctgtgagctggtctttgcaaggtgcctggagttttactggctggggaggagggatttctgcccaggaggaaatcggaagcagaggtggagatgggaacgtgcacgggcttggtgtgtactggctgcctagagttgatgccagagagttaagaaccacacatttgtaaaggtaattgaggactccactatcgagaagggggccacagaaggccaagcagtttagcatcctctcctgaggtgaccagtgatgctcggcttggtagccctgatctgattaaatgagttagctcattggatttgactgaggatgcagccggattagagggaaaggcaaccggaggggatggaggccatggagaagccaagtgcacaattcccaggatgagggatgagcgactggtgatagggggcgattttcagatgcgtttatggaagggaactgatgatcgattctgtacttagggttgaaacctgtgagatagaacctttgggagaaataaggaagttaagggaagactgcgagggattgtttctcagtggaagaatggtgtgtgtgctgtcgtctctgttgcttttgagaaacaatagctcaaactcaaattcgcctgggatgacttctgctacagtgtaggccctgtggggtggggttggctctgtcctttcagtgtcctttccagcacctgggcagtgtctggcacctcagaggccttcaataaatcgtgagtaaaggggagctcaacttgacacctgttgattctgaggtgaacattccagtacgaagttggaatttcagagccagagcttgggaagtcaggaactatctccacacacactttagaaacagctcttgtagcagaaggggtaaaggtgtatggggtttccagaggcatgatcgagagaagaggacagggctgtggccctctgcctggactgctggtggcgttaaagggagggaagaggaagtgtgggcagaaagctgggggagaacagggggaggacagagggagggtggtccaggggctgccttcgcatcagcaaggaaataccagccccagacccaggagaggcccaggagagtgtcaccaaaggagggagccctggatggcctgagaaaaccctgccgggtgtggactgtcatgcggatagaaacatgctgttgctgtgaatatttgaaggatgacatttgttgtctgttagtgaccacggatcacagcccttggggacagacattgagggccagaagcacaggcacttcttaccagaaaaaacacctgacaggccaagtgacactgccagctcctaggtagcagttggtctggggaacattagccaaggtccttctcagggtgaaatttctctggaatagttctcaggcccagccattgccctgggaataagctcaaatgcacctctttggttgataaacattctgtgctttggggcttcagatgggactgactagggctgggacacccagagctgcagagtggagcaggctctgactgtgtgtcacgtccacatggtgaacatggcagacgtctggtcgcccttctcgtttctccatagatgtgctgctgttggctgaacctaggggacattcctctctcccaccaggtactactcacaggatgagggtagttctgcagtctaccagggaattctagaatctgcacaggagtagaggaagtgagggtgcagggtttgtgtcttatctgcagtcctaggactttcaactgggtgaaaaaagtcaccaaggatcagcctcttgccaagacaaggggctgttatagttgtctgtgggcccttgaaggattttattccccccttaagccatttttacctccttccctgagccaggaattgaatgaatctttgtttattttaaattagttttcttctatctagagacttcttgttctcacaccctagagtatttttgtttttgttttcattttctctctgtattttgtcttcagtcttttctaagtttgtttgaatatccaacttcctggcaaaactagattatgtgagaactgctttgtttttttttaactttggctttgatcatgatatatttggacaatatagaaaatgcctctttttagccaagatgcagactttggggaggtacaaggctgaagaaatttagttgcaggagtaatttgctagtttgcatggaaagcagcccaaactgtcattgcttgaccatcagcctcactttcttctgacagataccagctgggtcttgggtacccaactttggcacaagcctctctgagatcctgctccagtcattttctttcttccacagcactttctcccttccctgtccacactggaaaaatgagcagaggccaagattgggttcatcattattctttgtttaaactagtgtacttgcggtatacggtcattcactttcatgttgatggaacattaagtaatggagagttagagtaatgaattagtttgttgggactgtttgcctactttgttgagcatctgccacgtgggcaagtactgtggatggtagatgttttccatgagttttcaagaatgctgagaccaactctgcatatgcaagtgtactagctctgatttccagttgaggaatcaagactcaggttaaataattttataaaatcaataattgatgagtgacctaaccagggattctaattcaagatgggtggtcttcaagcctgatgcttttttccattatgctgtataacttcccatggactatggatgaaatgacagaattgtcattatgcagcagcaaccaagtgacttgtggatagtaattttaatagctgttgaacgtgtactcttacacatgcagaggagggcatgcaccaaaaaagtgtactgattgagggtgaatgtttagaggaaacacacctgtgtcaccagaatctgtattatccagaaacaatcttttccagaccctggaagccccattggtactgccgtctattcactcccgaaataagcattatcctgacacctaacatcaaaggttggttttgcctgattttgaacattatgtacatggacgcatgcagtatatactcttctgcatcttgctttgtttgcttaacgttgtatttgtgagattcagctgtgctttgcttgcagaattgccagttcattctcattgctgcatagtattccactatgtcagcacaccgctgtttacttacccatcctactgttagtggacatttgagttgcctccagtttgggactattatgaatggcctgccattaacattcttataaaaatcatttatattgatatattttaatgaaatatgtctttcctgcctcccatctcactttaatgtcatcctttgcaagatgttttctgtttgggatcgtaaagctgtgatgttagaaaggttctaaagtcctgttgagagacaggaaatcattctgttaaagtcaaatctggttcgtccatccatcatcccagcccatggagtgcctaagagcttccttttggaattacacagactcaaggtcaaatcttggtcctgctcttaagcagcttggtaaccttgggcagcagtgacagcattattgttactaatttattcttattcgttgccagtgacagcgctaatagcaggtgatgtctattgaaggcttactgtgttgtaggcattgcgtttggtgcatttcattttttttttttttttttttgagacagagtctcactctgtcgccaggctggagtgcagtggcgcaatctcagcccactgcagtctccgcctcctgggttcaagctattctcctgcctcagcctcccgagtagctggtattacaggtgcatgccaccacacccaactttttgtatttttagtagagacagggtttcaccgtgttggccaggatggtctcgatctctggacctcatgatccgcccgcctcggcctcccaaagtgctgggattacaggtatgagccaccgcagcccagcagttgcatttcttatttactcttcatagcaaccctgtgagatctgtcagtcctttttcattgttgccttgttaaactggcgaaggcccttacccaagatcacacttagagcaagtgaggaagctggaatgcagatgcgggttgccccacccaaacccatgctcttgaagctgtcagcctcatttggagactgggaagtcatgacccctgcctcatgggccgtatgaggaccaagtgacaggggaagcttacatatacccccaggtgacatggacaccagctccaagatggattcctttccctgcatctctcagaatggccagctgcttttggggtgtgctttgactacagtgcaggaaggcggagtgggcatggctgctccactctggctgtcctaaggaaagcggacctgccattccaggtctggacacctcattagttgaggaggtgtcgccacctattggtcgttcccacctcactcgggccagcttctggttgctgtagtgtaggcagatgtctgtcggatgtttcttgccctccttagttgtcactccctcctcctctgccattttctaaatataaaatatgtgccttatttgtaaaaatacattttcgggggatgaaaaaactgatgagaaaatgagtttgatactttcccaagagcatcactgtttggcatttgtacaacaacatattggcagcaaatttattgagttcgtcattgttttaaatgaccatcctgggaagccacagaggactgtcccgtagccatagtggagcttggcagagtatgaaacaataacgtctctgcacttacgctgatgactctggtgggacgtcgtttctaagccttggtgcaccaggttggtggccacagaaatcccctgggcacttgtctgttgcctggtctaagatggaaatttttaggtttgccttagggccaggcaagtcaggagtttgtgatgaaaccaactgcactttgggaaaaattcttaccggaactcaggctcctgcctgtctgggaactgtgggtgctgagagagaggctttggatctaagaggtgtctttcccttttcaggctgacccggcctggagtttgccgcctccaccttacgtaacttgggtttctcagggtattgccagagggttggcagaatcttagagacagcttaggaaacagattctccaaaagtatcttggaattacttttaactttccagacgttttagcagttcaaaaggttgtttcactttggttggtggtagcgcacctgtaaactgtacacgttgccacgtgccaagagattgttttagaaaggattcaagtattagtgcttctagatagaattaggtcttatatatttaggtaaacatgaaaactagcataatctgtaaattctgatttttaaatcttagaggattaggttttgaattcatctctttgatgtagaaatatgcagacatggaaccagagcagtctgctggggcaagccagctacggtctgggtttgttttatcagcccagttgtgaaagttttccgagggaatggtaattcacctctggaaagcagtcaacagaagtacctgggatagccagagagctgggcccggagtgaactttggaaagggaaaaacatgaaaagcaaggactcaaaatccatctgtaagcatgggatttcccagtgctctgggatagtagagtcaaataatgacttccgtgtgttgctcagtggaaattaaaggtagaattctcatcaggcagcatttttcagtgcatagtgtgtctgtctgaaatacaattctgttattactcaacagcttgaaaatctttcagtgagtcccctccattcagaacagcacgagaggcccttgtcatcaggcctgtctgtttcctgccccactctgaacgactggagccattcagaacttcatgcagcaccttggcagtgtgatagacagacctttttagactttccagaagcttcttatgttagttgcatgaataggtccaagaaccattgaacgttgtcagtgagaaagtctgtgggtcattcaactgaagttacagttttgaagaaatcaaagcccagagaagtagagtttcctatacagagttttccaggcctctaaataaagtatgtaatgttgctggttgcatagttgggcttataatagcttctattgagttctcatgtttgtgccagggattagagagagtctttgcatatacattttactcagtttttacagcattcattttacacataggagagctgggggtcagggaagttaggatttgtccaggatctcaaaccagttttatttctccttcactgagctggtcctggttttccttaattgacttaatacattaaaaaaagttactttgagtaagttacttgaccagtgaagtgactgtgacaagattatctttgtgtttatttctagaaatgatgtttcatgtcagtaataatatttgcttgcaaagtacttgtacctctagacatttctaccccatctttactctcaggctcctggattccttgttgctcagagaggaaatgtacctggccgctcaaccccactttctgcactacaccttatggcggtggaatccaaatggctcagggacaccctctgtcgttagcccatgcctttgttacttcatttaagtaatgctttctgaacaggtccaaggggtcaaaagaataggaacataaaccagacatgttctttgcagtgaagagaggataagatttatatccacattgctataatacaaggcggtggttgacgaattactaggaaaaaagaacaaagaacatcccatagaatttgggaaggcgtcagggcagatgcggcatttatttggatctgctggatgcgtgagtttggctttgtggagatccggggctgcggtgggaaaagcctcagcacgccttcggagggtgcagtgctgctgtaagcatgctggtggagggaaggcggggtgtgaggatgtggggagcaagaacatttgtttcagcttgatcggaagataggatttgtgagacgcaagagttgccttataccagagttgtattttccagcgttggtagcagtgagcaggatggctggcagagggaagagagctgtgaagaaggtcatagtgatggttattgccatgtgttagtcacagctccagggcggggtgtcactgagaagcagctggaacccagatcccacatggttctcccgccaccaccactgccctgagtacaaagactcaaggagggggttgctccggcccgttcacccccttgttactaaatgaccatttcccagaccccagtgtggcctttgcatgaggagctgcagggaccatgccacctgttctgaggacaggcttaaggtctccatgcttaactcagactgagaggctcctgtgcacccccttttccagctccagttgtgaagaaggacaaaccagtgaaaaagaaggaagatgtttgcccctgtgttgacagcatatacatatacttcaccacactgtcccacggaaaaacatcctcctgggctgaaatcctaaatgcactacacgcacttctgtgcagccacaagtgtctgaaaagtcaaccgcagcccccccctcctgcaccggctcgcagtgcccgtgtctctctaataggagacaggcttgggtgcccctcaccccactggtcctatgtgagaagaaagatttccaagcaactaaatctaaagagaagtcagaaaaacatcccaagctagggcctgtttcctagattcagaactaaagtcatttcattctgtgcactggaagctcaacctccctcctggcaacaaggcccaagtcatgtttgcacctcaacactgacgtccaggaaaggctgagtgggcatcttatgctgtctctagttgagggggaagtgggagtgcgggacagaggatgaggggacggaaagcggagggcaggcaaagcctgagactgcagagggccagtcagtcaggtaaacgagagcgagtcagtcaggtaaaggagagcgagtcacccaggcttgagcgctggctgcacttgccctctcaatgtcacctctttcatgtcgatcagacgtctcagactcgacacgtcctagatccacttgctctttcagcctcccgtcatggcaacttgagccttctggttgctcaggccggaaacctccaagtcatccttgattcctcagtgcttttcacgcctcgtgtccagtccttcaggaagtcccagagactttacctttaaaatacatcttgaatcaggctctccgcctacctatgctgctgctgcgtgagtctaaagcatctctcacctggatgacctttgcatctgccgccctgcctgcctgcagcccgttctaaacctgggagctggagtaatcttttaactcatgagtcagataccgtcattactctgctcagaacctggaaatgactccccatggccctcagggtgaagaccagaatgccagcactggtgttcaagttcccacgctctatatcctcaccatccctccctcccctgcagccagcctcgcgctttgccattcctcatcccccccaggcaccctcctaccctgtggcctttgcatgcgctcttctcgctgctgatcacggcccgctcttctgtcacattccctccagctcctccccaaatgtaataacgaggtcaaggtcagaggcagttgtctgtttgggtttggcatcgtggagattatctatggtgaagggcagaaatacggagccttttatggaagtgtgtagccttcttggtctatgattaactagaaggaaactgcagttgatttttcagacacttgtggctgagcagaggtgtatgtagtgcatttaggattttgccgaggagcacgtttttccatgggacagtgtgttgatatcaggctggctgtgatgggttccctgagtcaccctctgcgaggtttgtaattctcaattcagttcaggttgcaggcattcttgttgttaaaagagcaatgcaactagtgtctgaggaatgtttggtgtaatttattatatatgccttactgtttgataattttgagcctaatcatggagtgatatttaagatatttaaacaaatgttgcagctacattatttttcagttgacttagcctttggattttcattctctttattttcacattaactttgtaaagatgttgctttggtttggtggacagaacataacacggggaggtgctgggggcagggtcatacttttcagcagggcagctaggaggtcaggcctctctgagaaggtgacatttgaggaaaggcctggaaggatacaagcaggatgaagcccacaaggtgcttaaggaaggagacagtgagcagtgtcacaggccagcgagcaccgtgctgagaactagaagccttttccactggcacagggtcagcattgatatgtttgtagcatagattgatttgctgaggctgaaggattagcagtaaaggacctgggtccggtgcctattgaccaacaagtgaaacaacaagcactaaaacttagagaaatcgcagttagatttatttggagccaagtttgaggacttacttaagcctgagaacacagactcagtgtagactgagaatgggttccaaagtaagttatgtgaggcgcaatatatatacgtttcattccctttccttttctattttgttttgtttgagacagagtctctctctgtttcccaggctgagtgcaatggtgcgatcttggctcactgcaacctcttgcctcctggcttcaagcgattctcctgcctcagcctcctaagtagctgggactacgccaccacgcctggctattttttgtatttttagtagagacagggtttcatcatattggccaggctggtctcaaacccctggcctcaagtgatctagccaccttagcctcccaaagtgctggggttacatatatgagccactgtgcccagcctcttttttttttttttttttcttttcttttagagatatgaggtcttgctcttgctctgtcacccaggctggagtgcggtggtgcaatcatagcccactgcagcctctcaactcttgggctcaagtgattctcccacctcagcctcctgagtagctgagactataggcatgtaccactatgcccagggcatttccaatgttttttaaacatatggggtcttgctatgttgcccaggctggtcttgagctcctggcctcagtgatcctcccacaacagcctcccaaagtgctgggattacaggcatgagccaccttgctcggccttgtattttgtaacaggggaatacatgtggcacagcggtgggcgaagcaggcagtgaagcagcggtttcagtcctgtgattgtgattggtggtcacagaggctgtgcataagataaataaggtaaatatgcagctgagtgggtaggagaaaggttaggcatcttagagtctggtggagggtgactgattccatcccgtctttgttctgtatctggtaaacagatttatgaccaataaccatcagtgaaatatttaacaaactccagtaagataggcaagaggccagctttagtttataggcccctctttcctgacacatgtgtccaactgcagccattgtgggccagtgttccaattttcatttgaactttctttttttctgacatactcaagtgcttgttctgaggtcgatatggagacagggtggcaggaagcatcctttgtgaccggaacccaagttgtggcagtggcagtgatagaagtcaggccacagggctccctggccttagtcatgggcaagacgagaccaggccaccattctcttccctgccccagcccagttacattccaagcgctttagaatatttatcagtgatgccccagagtggactcaggaggatggcatgtgttagcatactgagcacagctctgtgggcctctgcatgtgtgggaaaagccttagcaaaaactgcaaatgagtgtttctcatctttctctttcagacagcccacctgaggatattgaccataaggactcatatctcattacaagaagcatcatggccgagccagactacatagaagatgacaatcctgaactcattaggcctcagaaactgatcaatcctgtaaaaacctcccggaaccatcaagatcttcacagagaacttcttatgaatcaaaaaaggtaaaatggtttcttgagcatattttttttttaagaggacttttaagatcatgatatctaattttaattgtatttacagaggcttcaaagagtctttgatttcttgcactttgttaaggctttcttattccttctcacatcctagaaccgggttacccctccgtgaggcagatcccctgcaggtggccatcactgtggtggccagcagtgcttccagactcctgcagtcacgggttcccttctgaaatggatgtgtatttccaaattcggatggaagaggctggattaaagatagaagagaatgtcctaagtagaagagaaatatgttcttaaatttaaaatctctgaattttctccttacactggggaaggtgtaggaatcatgtaattgccgcctactccggcatttgtcagtagtggggagaagtctctagaaccatattagacttaatagataggacactcatgtttttgtttgtttgggggtagcattttaaaagattattatcatagtctttattattaattattttggaggacaggaaagcatttaccttctatctactttgcaaactccatctgtgccataaatcattatggatgttgggttgctatactctgctttttaaataatttgggcaggacaggagactaggagaactgaggatgaaaggctatttttttcaatttaagaactaggaagcttcatttaggattattttcagatctcgtaggactatagatgactcatttgcccactctttgctaagccctggtgaaaggtctcccactgaactgaaagatacgcagatcaagtttagcattagggtaattttttgcagggaggcctagttaaacaaatgttttaaagaggatcaaggggcatttttatggcaattctctttcctgagtacactccagctagaaaaaatgactcctatctatcccaggaattatttgtaaatacgtttctccctctagagtgtgagaatgtggcttactcctgttttatccccagcatattagtaggaagctgttggattaatgtatattaaattgaatgcaaataagattttagcttccatctgcctttgtcacacaatagaagaaagaatatatgaatttggtattattatggccaaagcaaaatgagactatcaagttcctaaaatagaccacagaatttagaagccatcctatcctgcctgggaaatcatgtcttcattttggtggaaagctcgtcagtttagtaggctccgaaatagaatagcagttgtcactcaaagattttcagattatcttcacctctttggcctcagttcccttatctataaagtgtaaggtaggagacttagctgttctctaagaaacattttagctcaaattttttcttctaggaaaatctatgaaagggctccaagtcagaataaaggtcagagtaaaaccaacatttgcagaataagtgttctctaaattataggctatgaattattctgcaaaaatatatttagtagtttgggtcattgctgtaaaacctacagatttgtgcagttgagtctgtttccacattttttagagaaagggcttccattctgtctgtctttgtctggcctgttcttctccttgtttgcccagctcaactaacctgagacaatgctgggtttccctaaagtactatggtgtagagaggatgtgggctttgaggtcagagagaaatgatatgaatcttggttttaccagaacttaactttacctaccttatgatcttggccaaggtatcccctcttgagatctgtttcttcatctataaagtgggagataatagtatttttcttataaaaattaaagtaggctgggcaccgtggatcacgcctgtaatcccaccactttgagaagccaaggcaggtggatccactgaggtcaggagtttgagaccagcctggccaacctggcgaaaccctgtctctactaaaaatacaaaaattagccgggcttggtggcacatgcctgtaatcccaaccactcgggaggctgaggcaggagaattgcttgaacatgggaggtggaggttgcagtgagccgagattgtgccagtgcattccagcctgggtgacagagcaaaactctgtctctaaaaaaaaaaaaaaaaaaaaaaaaccaaaacttaaagtaaataatagcgtgtatgaaaatgcttaacataataagtgatcacttagtcacatctatcttccacttcctatgtgacaacaactggaatttcctattgctttttctcccttttctttgaaggattttggtctggttggaaatacattaaaaaaaaaaaaaagaaaaggcagatttcaaaatgaaatgaaaatatatctcatcttatctcttaagagttttcaaggtaataccaaacttgttagaaatacagtgattttaaagtgagaatttctcagtttctttccttttattcatcttttattttgtatactttttagagactggggtttttatttctaaattttagtgccaaactataggatacatcacatcaatactgtgtgtgtttggttaatgaataaccagtcttgattactgcatggtattgtaataaaaatccatttgcttttctgtagtttataacaagtcttcctacattttgtctcatctggtgctctttctaatagcccagtgtgtgttatcttcaggttaccctcactcaggtgagtaatctcaaggtgactggtttaaggaatcatctcaagattacataatagttttttgaaatagtgtttagaaataaaagcaagtttatgtggagacttatacctttgctacgcatagctacaaatttagctcaaagctctatggcagttcagtttttccagttacatttcagagattatgtgttacaggctgagaacaagaacttaagagaacaagtacccacaggtcttctaactgcgaaacctatgctctttctagtgtgtaatcctattcctctatttactgtctttggaacccagcttagtttcaggttaaaagtctttgaagcctctaggtctgacggttaaaaccttgtgtcaggttctcactttccacaggtgttttcagtagtataaaaaggcagatttcaaaaggcttttttttttttttggttaaaagattactattgaagggatctttaaaaaaacaattaagaagggctgggtgtggtggctcacgcctgtaatcccagcactttgggaggccgaggcgggtggatcacgaggtgaggagatcaagaccatcctagctaacacggtgaaaccccatctctactaaaaatataaaaaattagctgggcgtgttggtgggcacctgtagtcccagctactcaggaggctgaggcaggagaatagcgtgaacccgggaggcggagcttgcagtgagctgagatggcgccactacactccagcctgggtgacaaagcgagactccgtctcaaaaaaaaaaaaaaattaatatttctgatattatttagagagatagattctgtgctctacaaagattactttttagaataaataggtcagttacttaaacatatccctaaaattggttctttggcttgtatattttgaagtcagtggcttcttgttcctggtttttagctgacattcttttggcatgctttactagttgaatagttcctcaataaatacttgctgctgtacaacatggaaaaagataggggcagttctagagataaaggatacaagtatttgtgttccaatccatgcaggtaaaaatgactaaaccagaaatgtaaatgaggcaggccaaaccaaagattacaagattaaagaacaagggctgaaattcaggcccagcgcggcggctcacgcctgtaattccagcactctgggaggccgaggcaggcagatcacctgaggtcaggagtttgagagcagcctggccaacatggcgcaaccccatctctactaaaaatacaaaaaaattagctgggcgtggtggcacgcgcctgtagtcccagctacttgggaggctgaggcaggagaatagcttgaacccaggaagcggaggttgcagtgagccgaggtcatgccactgcactccagcatgggcaatagagcgagactctgtccccccggaaaaaaagaacaagggctaaattcaaatcaaattttccctgtaccctaagaaaaataattaggccgggagatgtttgactaagtgagtaggcattgttctgtgacggtctgagccccagacctttcctctggatgaatgctgtcccaggtaatgaaatgacttcacttattaatatataggtacacagagttcaggtagatgtggaatgaatggggactcgccccgtctgcccttgaatgtatttagtggtttatgtgaaatgtacctttcaaagttgtctgtatgtttcatactctgggggtgggaatataaatcattgcagcctttttgtagggcactttggcagtactcatcaaaatatgcgatgtgcagatgcttagccagcaactccgcttctatgaatctagccaacagaaatacttgtagaagtgtgcagctataaatgtccacagaggctcagagcctcattgtttttaatagtgaacagttggaaaccaaatagatgtctgtcagtagggatgtggcagaattgtggcatgtttatatgggtatagaaagtatggaggaacatagacccaactgttggtaagagttatctctggatgcaggaataggtaggggttgatgggtacagggtctctactttgcataattttggggccactgttcacatagaacatttgcgatggagtggtgctcctcgattcgtttaatggagagggtttggatgtgcttttgctttttatttaacacatgggtatattacttttctttttctgcaaagagcacttattaattttatagttttttaaattggctttgcccgcttcagtagtcacaggtagctacctgaccgagaagccgacttgggaattactgttactcgtgggtgatactgtcataaaggggttgaaagtacttgttagctgtatatgtcagaattgattaaagagaaccaactattcttgtgcaagggatggtattgtagttaattatgacatttggagaaactaatttctgtctgtcgacactatctctgttccatttagacttagagacttacatgggcaatgcttgactttttgcattcagcacagaaagttaagtaatccactgtggtaaaatattaactaaatttatatgacttcttgactgctgtaagtagagaatatttatcatataagcaccattttcctgaattttttgttactacatattttatcttactgtcactattgtgtaaaatctttgaaaggaaaatgaatactgtgtaatagttaaacccattcataggttgcaatagagtgtcagccaaatgtgtcatacatcaaatcttcagcagcttttgcataatccaggagaattgaataatagttgaagttaattttgccagtgaaatgtagggaaagaaaaatgtttgaaatttaaattattcagatagctaaattcttaatcctaaaatttaaaccccttaattctgtctgtagtgttatatcaagactttttgatagtcatgaaactgagtaaaactttattcagattacttaaaaacagcttttcctgtggttaataacacctttattttgaacagagtactcttaagcaacttatattgtgctgattaaagatttaatctgtgcatattttttaccctgttgtttatttagttttgataactgtgaaataaaccataattaaatcacaaaagtcacctgcctcttttgtttccctggaaatttggccaaattttttttaacggaaagttctgctaatgaaaattgggaaattggagacatatattattttgactgtgtgtcctctgtcattaaagatggactatactagctgggtgtggttgctgatgcctataatcccaccactttgggaggccaaggcaggtagacggcttgagctcaggagttcgagaccagcctggccaacatggtgaaaccccgtctctactaaaaatacaaaaaattatccggtcgtggttgcgggcacctgtaatcccagctcctcgggaggctgagggaggagaatcgcttgaacctgggaggaggaagttgcagtgagccgagattgtgccattgcactccatcctgggcaacaagaggaaaactgtatctcaaaaacgaaaaaaaaaaaaaaaatagagctgggcgtggtggcatgtgcctgtggtcccagctactcaggaggctgaggtgggaggatcgctggggcccaggaggcagaggtttcagtgagctgagatcatgccgctgcactccagcccgggcaacagagagagcctgtctcagaaaaaaaaaaaaaaaaagatggaatataccgatttttactctaaacaacaactttgaattaagtttttgtgatttttaaaaacatctagataggagagatgccagaatttttagaaattctagatgaatgaggaagtatgcaattgaggattggtttacagatgtgattgtgtggactttaaagggatcaaggtgagtgtgctgttgaatttctctggccggagcacatatattggaaattgttatttaacagttgctcagatgactcctagttggttagtcacggtagttgataggagtcgtttagagaacaaccctgtcccttgtctacagattagcagtcatcagcagccggaccaggaggtgtgtgggaggtgctcaggcccatcctggagtccgggacagagtcagcagtgcttgttgcctgcagttcagaaaagcctgaattactgttccaccacatgcctgcgtgcgtagcatgagtgtgtgtgcgctgttacctacaccctgtgctgcctgaaattgaaagcgcttttcctgttcggtggtttgtcctatttttattttaaattgtcctggtaaattttaacatcaagttgagattacttatgagttggcagagactggctaagataagtgactaaggaagacaataagaagaaaggtgagctggataatccagcattctggaaagccataggagaaatcctaaggaaatagaaaaggcaaatcttaagctaacagttaaacagacagatatagcactagagaaaatgctaagacatgtctttcccttgacttctctcgaatatttcagatggagggtggctagttcatggcctgtttggcttgtttctccccatttggagagatggtagcctaatttatctctcagaaatgtaggacttccctgaaggccgacttgctttcattgtaaataatcaactacacatctgaaagggtttcggtggaggagcacgggactgagaattaggggattaaggttctgcacggccatgtccttcagtaacggtataacctcagatgtgcctttagatgtacaggaaccccctttcagtctgaaaaatgaagggtgggaaggtttccagggccattttactgtctaagctggtcttgaggctgcatttagtgcataagatcaggggctagaggccaggtgtggtggctcacgcctgtaatcccagcactttgggaggccgaggcgagtggatcccgaggtcaggagtttcagaccaacctgaccaacatggtgaaaccccatctctactaaaaatacaaaaattagccgggcgtggtggtgcacgcctgtaatcccagctactccagaggctgaggcaggagaattgcttgaacctgggaggcggaggttgcattgagcctagattgcctgccactgcactccagcctgggtgacagagtgagactctgtctcagaaaaaaaaaaaaaaatcaggggctagattttgggaagcctcccctccatgcagagccccctcatttcctgaccatctccgtctctgtcatgggcacccatcacagtcatcgtacgcacatccccaccctcactgccctcctttgcgtagcctagtgtcttgcacatggcacgtggccaatacattgtcattgaatgaatggattttatgtactctttggagatctcctcttgcctttctttcgtgctggtgaatttcttagatcaccatgttgcctgctgtagcctagtaggtatcatactaattttgtagaccacttttccgtggttgatattgtaagttaaatttctgttcataaaaaatgtagccattagattaacgttttctatttttgttaatgctctttcgcaggggtcttgctcctcagaacaaaccagaattgcagaaggtgatggaaaaaagaaaacgagaccaagtaataaagcagaaggaagaagaagcacagaagaagaaatctgacttggaaatagagctattaaaacggcagcagaagttggagcaggtaagggggattggctggaagctgtctttttttgtttttgtcttgaagaatgttggagtgttggagcgggcaggatttaccagacgtgccagtgtatacatttataccatgaaagaaatattggagacaaatgtcagcaaatggggtcaaatatgttcaaggcagggacaagaatcctactgaggacctaaaagagatcccagaggcaaaagcaaaacagggacatggcactgaattcacacagggtgctggagtaatttaatgaaattcactttcatgaagactccagagcaactgcgcgttgactccaggatttgtttccttagccctgtcttttcaattcttgtcatctcgtggtcctatttgcagtgacagccaagtggcttctgtttctgtgcacaattacccagactctatccatccatttctttaaaagtgggggaccaggagagaatttattctgtggggaagtaaagttgtcagggactttgaaaagagagaagagtattttgaaaggctgcttggtttgtaaataatttttccttttctgaatgtcatttagcttgaacttgagaagcagaaattgcaagaagagcaagaaaatgcccccgagtttgtgaaggtgaaaggcaatctcaggagaacaggccaagaagtcgcccaagcccaggagtcctaggctgaggctgcaccaagacctcgtgtgtcaccccacagagctgtctgtgggtgccttctcaatctcagggcaaaagcccctggagaatattccagccagcagagaattttgacttgcagtaggatttggtttgattttcctacgatctgggtggatgccttgcctgtgacagttgcagttcctattcgccaaatgaagggcagtgccctgcacgtaagttggaatgatggacctgtgttcagagacttaacagaaccaacaagcaaaacaagtgagaacaggaaaaaggaagaggacactggaatcaattcttgagagttgcactacttggtttttcttccattccaagtttcgtgggacccagagccttttttcttttaaaagctaaaaaacaaatgtttaattcctctttttgttatctgttagataattgagatcacctagaaatgcgtttaatctgttcactcactgtaaattttgaggacccagaattgtcttgtttaatttatactttcacccctgttgcagttaacaccagagaaggaacgtgaatgtcgagcacagccactacccttgttggcacttaatttagaaatagggtgagaagtttaaaagcccatcttgattttattttcattccttttggttctctgtgtaataatagcaggctacatagtgacattccagttccaagaaggtacatcctgtccattcattaattgctttgattactaggagggtttctgttcagttttgtttttaaatgtcttgctgatctagttctttcagatggaataaccttccagtcccttagagagtggaactagtccatataacccagcttcagtagcaaaagtagaagccgccacatcttttcatttctccaagaggagagtggggaaggttcccatgaccagctgggcagtcaggatttctctaggcattctaatgtgaaataagtgtagactgctgtcaaggaggcttcatcagaagatgtatagcatttgaatgtctaatgataatgcatatcattagaatccaagctttgaaaatttctgattaatgctcatgtatttctttatctttgtttttccttgtgaagaaagactttcaccactgtctgagtgatgatgctgttgataaggatgatgtcgatgactactatattgcatctctcaggaacagctgatgggaagggaggggctgctgagttcccttgttctagctagcagcacgctcctcagagagggggccgagttacagacagcagccgcattctcatgcaaaattagttttaaactgctagtgtgggcatcggtaccttttgcctgggtgataccgaagaattgttgaggatttagtatgctccgtagagacagttcagccagtcatttctgcattggagagacttctcatactttctttgaagactcatagaaagctggatctagagcttttgaatccttaattagcacagtagaaattagctttctatgggaatgctttagtgttagcagttgacaattaggcccatattcaatctgaatgggaacaaaagtaaatgcaatgataatatactgctagttagagaaacatgttagttgattatacctgaaatggattatttatctcatcagcaagtattatttgaataaaatgagaaatgcttaagaaaaattgttgctctacagtaatttggtttcgaagaatggaatggtaactattttttcccatcgttcttttgagagaaggaagtgtgatgactgatgatcttgaaaagcccatttctgattgcacgttgactggaattctttctttgtgtctgtggactagcgatgctgtttgtaaaatgaagattcgggactggctcatatctttttatctaactagatgtcagatcttgaaatctgtattctcgaagcaattctgccacttgatcgtattcacaggggccctggtaggctcctttagaaggaccatttctgttcctagagcttaactagaattcattcttcactgaaaaaaaaaaaagttacttaagaaagcatttctttcctaatctcactcaaatctgcagaattatttgtaattagtaatacaaaatctggccaaaaggagacttgtaaatagcgtaaagtggtgtcttatgctaaacggtggaatgtataggcagagaagctctttgaagttgtcagatgagctgggctcacaagcctgattcaaacaggctgtcggtctcctctcaccccttaatactgtgcagcccaaactcctaggactcttgaacatctgagcagttttgtgctttgagccactttttgacaaaaatggctccatttttccacagcgtggttttcttaaaatagtttaatgttttatagtctcatagtagtagtgttgctttctaagctataacagtcgactttattcttctactctgaaaaatcttgacttgtttgagtgtatataatatatataaagggagccttaatggattggttttcataatttaatattttttgtatttgctcttgtataattgtttttaacggaaagtattaaagaattgagggtggaattcttagaaccaaagttattcttaataaaaatcaccacatgcttggaccatgcaaccatgtttgtctgatctgttgaaggtgtgcatctggaacagaacggggctgggttcatttcaaaggtgagagttggttccagggtctcccttttgatgactggtcctcattgacaaccttgcccccaaatcacttatgtcctattgccttgtggcagtcaagctgacagtttgtcatatcaaacagagtcatctcaggtatttatggcactgtaaattacacattgcagtaggccatatggcccttcagcagcagccatcagtcagtcctcagctcaaagtattctgcattttagatagcttggtaggacagtgggagacatgttttgggaagggccattgttcagtgcgtttgaccccagtacatacggcatgtctgaagtgtgattatgaggttttttttgcttattcaagtaaattaatgttattcctcaaagaagttactttggaaaggtatacgcctgattgcattatactactggtatactttggaggttcaagtctctttataattatgcctttatttttcaactacaaattattactcagtttgatcacccaacttctagtgtctttggacttttttaaaatattatatctactcaggagagtaaaaatttactatctctaaggttataccatgaactctaaagccagtgcagaagatagattccaaaaatcatttgaggagtagctgcatccttggaataactaggcagtttgtcccggtgactgtgttgaggctgtcaatccatttaattcgaccacttccccaatctctctctctttctctctctctctctctctgtgtgtgtgtgtgtgtgtgtgtgtgtgtgtgtgtgtgttttacagtagtggtaatagatttgaaagaagacagggcaattaaagtgtttagtaagatttaaaatactgtaggacagctaaaagaagttttaaaataatactacccggcatacatttcctagtataataagagatgaagtattttacttccagggtcttcggataaataaaatctttatgagctagcctaacaatcacagtttctacttcgttttgtctcatgagaaaacatagtctgattatcaattggggatcctttgaatatcttcccacttgctcctagattttctagcaagatgataattagcacttgccgtggcacaaagggcactcgctcactcatttattgaaagtgtatccattgctactgcagtcctgctattcctagaaaccctcaaactatatatgtgcatgtgtgtctaagtgtaaatatgtatgcacacatttgtattgatgtttatttttatatctatatagaatatcatgaggtcgggccaggtatggtggctcacgcctgtaatcccagcactttgggaggccaaggcgggtggattgcttgagatcaggagttcaagaccaatctgaccaacatggcaagaccccgtctctactaaaaatacaaaaattagccaggcgtgatggcacgtgcctgtaatcccagcaactcgggaggctgaggcaggagagaatcacttgaacctgggaggcggaggttacagtgagccaagatcacaccactgcactccagcttgggtgacggagcgagactccgtctcaaaaaaaaaaaaaaaaagaatatcatgaggtcacgttgatacctccaatcccaacctagtggcatgttcttttccccctttccgaatttgtcactccctcctcctacagtgacaaccctggcttccactgtctccactcatttattttctcaatcccctgaccttcttcagccgctttcacctcccaggcactgcctagtggctttgtgactgaattaggaaggaagggagaaagaaaacaaacggcaatttttcttgagcgtttaaacatgtattgctaattaaattaattaaatcgcctcaaacagcctaaagtgcggctatagattgagtatacctgattgtttgaaaccttgtaaactccttaaacattatgtaaactatacttgaacacaatggttagcacattttaaaaataacttacccatttaaaaaatcaaaatcaagttttatgtccattattactgtttttgaaatagagtctctctgttaccaaggctggagtgcaatggtgtgatcacagctcactgcagccttgactgcctgggtcaagtgctcctctcgcctcagccatctaagtagctggaacaacagttacacaccaccatgcctgctaattatttttttgtagagacaaggtctcactatgttgcccagactggtctggaactcctggcctcaagggatcctcctaccttggcctcccaaagtgctgggattacaggcatgagccaccatgcctggccatttttccattagttttatacttttaaaaacactttcctactactatgaccatgtttattttattttatttttttattattatactttaagttttagggtacatgtgcacaatgtgcaggttggttacatatgtatacatgtgccatgctggtgtgctgcacccactaactggtcatctagcattaggtatatctcccaatgctatccctcccccctccccccaccccaaaacagcccccagagtgtgatgttccccttcctgtgtccatgtgttctcattgttcaattcccacctatgagtgagaatatgcggtgtttggtttttttgtccttgctatagtttactgagaatgatgatactccagtttcatccatgtccctacaaaggacatgaactcatcattttttatggctgcatagtattccatggtgtatatgtgccacattttcttaatccagtctatcattgttggacatttgggttggttccaagtctttgctattgtgaataatgccgcagtaaacatacgtgtgcgtgtgtctttatagcagcatgatttatagtcctttgggtatatacccagtaatgggaaggctgggtcaaatggtatttctagttctagatccctgaggaatccccacactgacttccacaatggttgaactagtttacagtcccaccaacagtgtaaaagtgttcctatttctccacatcctctccagcacctgttgtttcctgactttttaatgattgccattctaactggtgtgagatgctatctcattgtggttttgatttgcatttctctgatggccagtgatggtgagcattttttcatgtgttttttggctgcataaatgtcttcttttgagaagtgtctgttcatgtccttcgcccactttttgatggggttgtttgtttttttcttgtaaatttgtttgagttcattgtagattctggatattagccctttgtcagatgagtaggttgtgaaaattttctcccattctgtaggttgcctgttcactctgatggtagtttcttttgctgtgcagaagctctttagtttaattagatcccatttgtcaattttggcttttgttgccattgcttttggtgttttagacatgaagtccttgcccatgcctatgtcctgaatggtattgcctaggtttccttctagggtttttatggttttaggtctaacgtttaagtctttaatccatcttgaattgatttttgtataaggagtaaggaaggggtccagttttagctttctacatatggctagccagttttcccagcaccatttattaaatagggaatcctttccccatttcttgtttatgtcaggtttgtcaaagatcagatagttgtagatatgcggcgttatttctgagggctctgttctgttccattgatctatctatatgtctgttttggtacaagtaccatgctgttttggttactgtagccttgtagtatagtttgaagtcaggtagtgtgatgcctccagctttgttcttttggcttaggattgacttggtgatgcgggctcttttttggttccatatgaactttaaagtagttttttccagttctgtgaagaaagtcattggtagcttgatggggatggcattgaatctataaattaccttgggcagtatggccattttcatgatattgattcttcctacccatgagcatggaatgttctttcatttgtttgtatcctcttttatttccttgagcagtggtttgtagttctccttgaagaggtccttcacatcccttgtaagttggattcctaggtattttattctctttgaagcaattgtgaatgggagttcactcatgatttggctctctgtttgtctgttgttggtgtataagaatgcttgtgatttttgtacattgatttttgtatcctgagactttgctgaagttgcttatcagcttaaggagattttgggctgagacaatggggttttctatatatataatcatgtcgtctgcaaacagggacaatttgacttccagttttcctaatcgaataccctttatttccttctcctgcctaattgccctggccagaacttccaacactgtgttgaataggagtggtgagagagggcatcccaatcaatagaaaaagagggaatcctccctaactcattttatgaggccagcatcatcctgataccaaagctgggcagagacacaaccaaaaaagagaattttagaccaatatccttgatgaacattgatgcaaaaatcctcaataaaatactggcaaaccgaatccagcagcacatcaaaaagcttatccaccatgatgaagtgggcttcatccctgggatgcaaggctggttcaatatacgcaaatcaataaatgtaatccagcatataaacagaaccaaagacaaaaaccacatgattatcgcaatagatgcagaaaaggcctttgacaaaattcaacaacccttcatgctaaaaactctcaataaattaggtattgatgggacgtatttcaaaataataagagctatctgtgacaaacccacagccaatatcatactgaatgggcaaaaactggaagcattccctttgaaaactggcatatttatttttatattctcctacatattctgttatactgtcctttctgggcttgcagtaattttaccaagactaaaaggaaagaaatcccccctcaggctaactgaaggagcaagatctgggttcttgactgattcttaggatggagggcctggcagcacagtccacgctgctgcagtcatgggccatgggccctggacaaagtccttcgttaaaattaattcttccttgctttgtcatggaatttttaatatcttgccatttcttctttcatttaggaaacttggtgtccttcccagaagtggatgctttcattttgcatagtcagcctgacctactcattgtcttgcctttttatgatctgttgatcttgtccgttagtgtaatcgaaaacttacatatgcctgtgaatatctcatgtaactaggatcattttgagattttgtctagtagaaccatcaagtctgtgtggtgaacgcttgtccctgagatatttggctatttattatctttggacataactgctggatcctcttttatttgtgatcacatatgatcaagtagactcctttatttgtatttattatatgtgaccactgatgacgattttattttgtttttttgagacagagtctcagaattctgttatccaggctggagtgcagtgacgcgatcttggctcactgcagccttgacctcccaggctcaagcaatccttccacctcagcctcccaaataactgggactacaggcatgcaccaccatgtctggctcattttttttttatttttttttgtagagacagggtctcactatgttacagctcaggctggtcttgaactcctggcctcaagtgatcctccttcctcagcctcccaaaatgctgggatgacaggtatgtgcaactgcgcctggcttcttttgtctgtttgtactatgtttttctagtttatcttatgattttgtttattcctataaggatagctagaaacaaacacatgtctatggtttatgaaaatgtatattcttcatacaacatataaaatgtccacacatatatgaatagtcccttagctatatcctataatcatcttaattttgtattacaactcctttttctcttggagtctctatgaatgtgtgtccctttatagactcaccttataattttcatctccttttttggatgctcagaatattacagcttgactggtggaagtccttcaagcttattcttttgtttttgtggggttttggtttttttaaaagtaaaatattgcttttgacagttatggcagcatccttactttgttacaacaataggatgtttggggccatcctaatttttttttttttttttttttctgacgcaagacataggactgtgtgcctttcaagaagtcctggtttcttttttgatgaagagtagaaacagagatgatctggcactagaggtgcacaagagagttgctagtggacaaaagtgtccttgcacctgtagtaatgacagagctaaagaatgtgaactcatccttgtttttccatttcaaccctttatgtggttctaccttatttttcttatgagatcttattaaaccagaaatatttccattacacttagaaagattagttgcgatattttctttacagataagagttatgaaagggaatttaccagaccagataccgaaacacaccttcaagcaacagtaatttaactggcccaatattgtctcagagaagacaaattgttcaatggagtggcataaaaagtccagaaaatgactgacttgcgtgtcaaaatttacaatgattgaggtgggattttatttcagatcagttaggaaaggataaacaattcagtgaaaagttttggggcaactggaacgaaacaaatatatattcctctacataagaatcatttccaagtttattagtgttcagcataaaaataaaactgtagaattattagaagaaattataagggaatatttctataatcctagtgttggaggaggctttcctaagcataacatttagcccaaaatctataatgaagaaaactgacagatttaactagtgaaaattaaatgcttttgtacaagaaagatgtaagaaaggttaagtgtcacagactaaggcatattacatatacagcaatacctggattacatacagaatgtctgtaaatgttaatccagtaaaaatatatatatatatgaacaggtaattcacagaagatggaatacaaattgtcgatcaacatatgaagagatgctcactcactactatcaggaaaatgcaaactaaaccaacaacgaagtaactttatacaaatattcacaaggcaaatatttaaaagactgataatagctatggttggtgaggatgtagagaagcatgtattatatatacaacatcaggggaagtgcaaattagtaaagccaatttaaaaacatattttcacatgctctagaatggatataacaaaaacgatatacaaatacaagtgttgactaggatgtggaaaacttgaatcccttgttttattgctggtgaaaatgtaatggcataggtactttggaaaagtttgacagtttcttaaggagttaaacagatttatcatatgacccagcaattccgctcctaagtatttacccaagagaaatgaaaacatacaaccacacacagagtcttgcgcacaaatgtttatagcaagattattcataataaagtgtggaagaaccccaaaggtccaagaattgataaatggacaagcaaatgtggtatggccacacagtagaatattcttcagccataaaaaggaacaaagtaccaataaatgctacaacatggataaactgtgaaacaataaaacttaaaaaagtgcacatatcttttgacacgccaattgcatttctaggaatgtgaccttaagaaatacttatgtgcatagagattgttcttcaaagacatgtgtggccaggtgtggtggtgtgcacctgtagtcatagctactctgaaggccagggtgggaggatcacttgagcccaggagttccagacaagcctgggcatcatagagcaaacatttgttgggcaaacattttttgtctctaaaaaagaaaaaaagaaatatttacagcatttatcataatttatcttgcaagcaccctgcttatctagtagtagtttgctagattaagtctagtacattcccattctctttatggactataatgcagcttttaaaagaacaaaatatattattatacatatacataaataaggctttgaagctataccccatgaatatgtacaactattttgtatccaaaataattaaaaataaaaaaattataaactaaaattcctgaaaataagtattgacccaaatagcctataaactgaaagagaaaatgatatttctcttagaacacactttcatttttctccctgaagaaacctgaaaacatttatggacagacctttttgtttttctgtttggattgacctgaaataaaatttttattatcaacaacaaaaagcaagctgtggaacaatagacatatgatctcatttatatgaaaaaaattttaagtattcatatccatacatctatacaaatgcttgcaaataggactggaagtttacccaacatattaacagtggctacttctaggggagggaaggaatttaaggccagaaatagagtggcttctgtatgtaatctgcatatttgtgatcttttttttttcccaagacagggtctcactgtcgcccaggcaatgagttgatcacagcccgctgcagcctcaacctcccaggctcaggtgattctcctacctcagcttcccgtgtagctggcactacaggcactcgccaccacacctggctaatttttctattttttgtggagacggtctctgactatcttgcccaggctggtctcaaactcctgggctcaagcaattcaccctcctcagcctcccaaagtgctgggattacaggtgtaagccaccgcgcctgaccaatatcagtatgtatttaaaattgtatacaatcagaatgagtccctgaatcacgagtgtttaaaacggcataaaagcaaagcttagaaactaagtctgcttaatacaaaactatcccttaaattctaaacactgttaatttcataattattgacgtgtacagtgaacaccccatgaaagaatacaagagcggtttcaatgttccccaaacatgcagacctatagttgaaatcatcgaagggaaaaaagatctagcgaaaaaatagaagctctgactccagagcggcactgagaaatgtttcgagcttttgccaaccccgtaagggtggaacaaagacctgagctggggctcctcgtaagtgacccgaggggtgtaggtttcgccatgaaaacagcattgccctttagagttttccgctgctcctgggactccagtgactgcggttacagccctctggttttcctcctattgttttcattggccggggtctaagcgacttggaagtgaggaatcgggagctctgtaatgaaatactgctactcggtgcgcgcagggccctgggagagctccagcttggccagtcaaggtcttcttggcagatgttctttcttggatgacgatggaattctctttcccttctcccttgataccaggtggggccttcatcgtattactaagagtcgatttattactctttccgctccttctggttgaatacttgagatagacgcttaggaaaggagctagccaagccctggagaaatgctgactctttggatttaatttatgaggcctaatagaagccgtcacagaggctggctaagggtagaattagcagcagagagtagaggctgcagccttccctgctgtgacttcatggttgaagcttgaggtgcaatctcatggggacctccttggttggttgtccgtggttatttactcatttaagaggttccaggaaataatggcacctgtgttagccagg

SEQ ID NO: 681 - DNA, 2785 bp, Homo sapiens
ttctttgtggggatggttaattcttgttttgggtgcttttcttcaccgctctaaggaactaccacagtcagaaggtgcattcttactgcgatctttttatttgctaccttgggcttaaggagcctgcctatatctactgaggtgaggttaggtcagtctctgtaaccgttcgtcacttaggccttgatgggtgacatggatggggatgacttcctgggctaactcttctcttgctaaaggatgatttttcaccaccttgaatgcccatgattaaaacataaacaagaaaatagatatctgagacagcccacctgaggatattgaccataaggactcatatctcattacaagaagcatcatggccgagccagactacatagaagatgacaatcctgaactcattaggcctcagaaactgatcaatcctgtaaaaacctcccggaaccatcaagatcttcacagagaacttcttatgaatcaaaaaaggggtcttgctcctcagaacaaaccagaattgcagaaggtgatggaaaaaagaaaacgagaccaagtaataaagcagaaggaagaagaagcacagaagaagaaatctgacttggaaatagagctattaaaacggcagcagaagttggagcagcttgaacttgagaagcagaaattgcaagaagagcaagaaaatgcccccgagtttgtgaaggtgaaaggcaatctcaggagaacaggccaagaagtcgcccaagcccaggagtcctaggctgaggctgcaccaagacctcgtgtgtcaccccacagagctgtctgtgggtgccttctcaatctcagggcaaaagcccctggagaatattccagccagcagagaattttgacttgcagtaggatttggtttgattttcctacgatctgggtggatgccttgcctgtgacagttgcagttcctattcgccaaatgaagggcagtgccctgcacgtaagttggaatgatggacctgtgttcagagacttaacagaaccaacaagcaaaacaagtgagaacaggaaaaaggaagaggacactggaatcaattcttgagagttgcactacttggtttttcttccattccaagtttcgtgggacccagagccttttttcttttaaaagctaaaaaacaaatgtttaattcctctttttgttatctgttagataattgagatcacctagaaatgcgtttaatctgttcactcactgtaaattttgaggacccagaattgtcttgtttaatttatactttcacccctgttgcagttaacaccagagaaggaacgtgaatgtcgagcacagccactacccttgttggcacttaatttagaaatagggtgagaagtttaaaagcccatcttgattttattttcattccttttggttctctgtgtaataatagcaggctacatagtgacattccagttccaagaaggtacatcctgtccattcattaattgctttgattactaggagggtttctgttcagttttgtttttaaatgtcttgctgatctagttctttcagatggaataaccttccagtcccttagagagtggaactagtccatataacccagcttcagtagcaaaagtagaagccgccacatcttttcatttctccaagaggagagtggggaaggttcccatgaccagctgggcagtcaggatttctctaggcattctaatgtgaaataagtgtagactgctgtcaaggaggcttcatcagaagatgtatagcatttgaatgtctaatgataatgcatatcattagaatccaagctttgaaaatttctgattaatgctcatgtatttctttatctttgtttttccttgtgaagaaagactttcaccactgtctgagtgatgatgctgttgataaggatgatgtcgatgactactatattgcatctctcaggaacagctgatgggaagggaggggctgctgagttcccttgttctagctagcagcacgctcctcagagagggggccgagttacagacagcagccgcattctcatgcaaaattagttttaaactgctagtgtgggcatcggtaccttttgcctgggtgataccgaagaattgttgaggatttagtatgctccgtagagacagttcagccagtcatttctgcattggagagacttctcatactttctttgaagactcatagaaagctggatctagagcttttgaatccttaattagcacagtagaaattagctttctatgggaatgctttagtgttagcagttgacaattaggcccatattcaatctgaatgggaacaaaagtaaatgcaatgataatatactgctagttagagaaacatgttagttgattatacctgaaatggattatttatctcatcagcaagtattatttgaataaaatgagaaatgcttaagaaaaattgttgctctacagtaatttggtttcgaagaatggaatggtaactattttttcccatcgttcttttgagagaaggaagtgtgatgactgatgatcttgaaaagcccatttctgattgcacgttgactggaattctttctttgtgtctgtggactagcgatgctgtttgtaaaatgaagattcgggactggctcatatctttttatctaactagatgtcagatcttgaaatctgtattctcgaagcaattctgccacttgatcgtattcacaggggccctggtaggctcctttagaaggaccatttctgttcctagagcttaactagaattcattcttcactgaaaaaaaaaaaa

SEQ ID NO: 682 - protein, 131 aa, Homo sapiens
MAEPDYIEDDNPELIRPQKLINPVKTSRNHQDLHRELLMNQKRGLAPQNKPELQKVMEKRKRDQVIKQKEEEAQKKKSDLEIELLKRQQKLEQLELEKQKLQEEQENAPEFVKVKGNLRRTGQEVAQAQES

SEQ ID NO: 683 - DNA, 2762 bp, Homo sapiens
gatctttttatttgctaccttgggcttaaggagcctgcctatatctactgaggtgaggttaggtcagtctctgtaaccgttcgtcacttaggccttgatgggtgacatggatggggatgacttcctgggctaactcttctcttgctaaaggatgatttttcaccaccttgaatgcccatgattaaaacataaacaagaaaatagatatctgaggagaatgcagttgaaactaattttgtggatagagaaactgttggaactgctttacaaagtattttaacagcccacctgaggatattgaccataaggactcatatctcattacaagaagcatcatggccgagccagactacatagaagatgacaatcctgaactcattaggcctcagaaactgatcaatcctgtaaaaacctcccggaaccatcaagatcttcacagagaacttcttatgaatcaaaaaaggggtcttgctcctcagaacaaaccagaattgcagaaggtgatggaaaaaagaaaacgagaccaagtaataaagcagaaggaagaagaagcacagaagaagaaatctgacttggaaatagagctattaaaacggcagcagaagttggagcagcttgaacttgagaagcagaaattgcaagaagagcaagaaaatgcccccgagtttgtgaaggtgaaaggcaatctcaggagaacaggccaagaagtcgcccaagcccaggagtcctaggctgaggctgcaccaagacctcgtgtgtcaccccacagagctgtctgtgggtgccttctcaatctcagggcaaaagcccctggagaatattccagccagcagagaattttgacttgcagtaggatttggtttgattttcctacgatctgggtggatgccttgcctgtgacagttgcagttcctattcgccaaatgaagggcagtgccctgcacgtaagttggaatgatggacctgtgttcagagacttaacagaaccaacaagcaaaacaagtgagaacaggaaaaaggaagaggacactggaatcaattcttgagagttgcactacttggtttttcttccattccaagtttcgtgggacccagagccttttttcttttaaaagctaaaaaacaaatgtttaattcctctttttgttatctgttagataattgagatcacctagaaatgcgtttaatctgttcactcactgtaaattttgaggacccagaattgtcttgtttaatttatactttcacccctgttgcagttaacaccagagaaggaacgtgaatgtcgagcacagccactacccttgttggcacttaatttagaaatagggtgagaagtttaaaagcccatcttgattttattttcattccttttggttctctgtgtaataatagcaggctacatagtgacattccagttccaagaaggtacatcctgtccattcattaattgctttgattactaggagggtttctgttcagttttgtttttaaatgtcttgctgatctagttctttcagatggaataaccttccagtcccttagagagtggaactagtccatataacccagcttcagtagcaaaagtagaagccgccacatcttttcatttctccaagaggagagtggggaaggttcccatgaccagctgggcagtcaggatttctctaggcattctaatgtgaaataagtgtagactgctgtcaaggaggcttcatcagaagatgtatagcatttgaatgtctaatgataatgcatatcattagaatccaagctttgaaaatttctgattaatgctcatgtatttctttatctttgtttttccttgtgaagaaagactttcaccactgtctgagtgatgatgctgttgataaggatgatgtcgatgactactatattgcatctctcaggaacagctgatgggaagggaggggctgctgagttcccttgttctagctagcagcacgctcctcagagagggggccgagttacagacagcagccgcattctcatgcaaaattagttttaaactgctagtgtgggcatcggtaccttttgcctgggtgataccgaagaattgttgaggatttagtatgctccgtagagacagttcagccagtcatttctgcattggagagacttctcatactttctttgaagactcatagaaagctggatctagagcttttgaatccttaattagcacagtagaaattagctttctatgggaatgctttagtgttagcagttgacaattaggcccatattcaatctgaatgggaacaaaagtaaatgcaatgataatatactgctagttagagaaacatgttagttgattatacctgaaatggattatttatctcatcagcaagtattatttgaataaaatgagaaatgcttaagaaaaattgttgctctacagtaatttggtttcgaagaatggaatggtaactattttttcccatcgttcttttgagagaaggaagtgtgatgactgatgatcttgaaaagcccatttctgattgcacgttgactggaattctttctttgtgtctgtggactagcgatgctgtttgtaaaatgaagattcgggactggctcatatctttttatctaactagatgtcagatcttgaaatctgtattctcgaagcaattctgccacttgatcgtattcacaggggccctggtaggctcctttagaaggaccatttctgttcctagagcttaactagaattcattcttcactgaaaaaaaaaaaa

SEQ ID NO: 684 - protein, 131 aa, Homo sapiens; identical to SEQ ID NO: 682

SEQ ID NO: 685 - DNA, 2875 bp, Homo sapiens
tcaaacgaagctccaataggaaatgtcacaatctcctaccccaggggactggagatccccttccttgggtggttaaaaatggacttgatttgcgcttctgagaaactgacatgtgaaatcttgttcctgatgtgggaggatggacgccgtcattcattcattcattcatcgaatctttcctttgactgttaattgtttaaaatctcacaagtaaaggtggaaaagagttttactgattttctttgggaatggtggaggggtagaagacttctctcctgatggaaagaggaaagatgaggaatatggcttaatgttattcctaacttaccttctgccccttccctccagaattctgtgtgcaagtgttttaaggaaatgagttgggagtttggacagcccacctgaggatattgaccataaggactcatatctcattacaagaagcatcatggccgagccagactacatagaagatgacaatcctgaactcattaggcctcagaaactgatcaatcctgtaaaaacctcccggaaccatcaagatcttcacagagaacttcttatgaatcaaaaaaggggtcttgctcctcagaacaaaccagaattgcagaaggtgatggaaaaaagaaaacgagaccaagtaataaagcagaaggaagaagaagcacagaagaagaaatctgacttggaaatagagctattaaaacggcagcagaagttggagcagcttgaacttgagaagcagaaattgcaagaagagcaagaaaatgcccccgagtttgtgaaggtgaaaggcaatctcaggagaacaggccaagaagtcgcccaagcccaggagtcctaggctgaggctgcaccaagacctcgtgtgtcaccccacagagctgtctgtgggtgccttctcaatctcagggcaaaagcccctggagaatattccagccagcagagaattttgacttgcagtaggatttggtttgattttcctacgatctgggtggatgccttgcctgtgacagttgcagttcctattcgccaaatgaagggcagtgccctgcacgtaagttggaatgatggacctgtgttcagagacttaacagaaccaacaagcaaaacaagtgagaacaggaaaaaggaagaggacactggaatcaattcttgagagttgcactacttggtttttcttccattccaagtttcgtgggacccagagccttttttcttttaaaagctaaaaaacaaatgtttaattcctctttttgttatctgttagataattgagatcacctagaaatgcgtttaatctgttcactcactgtaaattttgaggacccagaattgtcttgtttaatttatactttcacccctgttgcagttaacaccagagaaggaacgtgaatgtcgagcacagccactacccttgttggcacttaatttagaaatagggtgagaagtttaaaagcccatcttgattttattttcattccttttggttctctgtgtaataatagcaggctacatagtgacattccagttccaagaaggtacatcctgtccattcattaattgctttgattactaggagggtttctgttcagttttgtttttaaatgtcttgctgatctagttctttcagatggaataaccttccagtcccttagagagtggaactagtccatataacccagcttcagtagcaaaagtagaagccgccacatcttttcatttctccaagaggagagtggggaaggttcccatgaccagctgggcagtcaggatttctctaggcattctaatgtgaaataagtgtagactgctgtcaaggaggcttcatcagaagatgtatagcatttgaatgtctaatgataatgcatatcattagaatccaagctttgaaaatttctgattaatgctcatgtatttctttatctttgtttttccttgtgaagaaagactttcaccactgtctgagtgatgatgctgttgataaggatgatgtcgatgactactatattgcatctctcaggaacagctgatgggaagggaggggctgctgagttcccttgttctagctagcagcacgctcctcagagagggggccgagttacagacagcagccgcattctcatgcaaaattagttttaaactgctagtgtgggcatcggtaccttttgcctgggtgataccgaagaattgttgaggatttagtatgctccgtagagacagttcagccagtcatttctgcattggagagacttctcatactttctttgaagactcatagaaagctggatctagagcttttgaatccttaattagcacagtagaaattagctttctatgggaatgctttagtgttagcagttgacaattaggcccatattcaatctgaatgggaacaaaagtaaatgcaatgataatatactgctagttagagaaacatgttagttgattatacctgaaatggattatttatctcatcagcaagtattatttgaataaaatgagaaatgcttaagaaaaattgttgctctacagtaatttggtttcgaagaatggaatggtaactattttttcccatcgttcttttgagagaaggaagtgtgatgactgatgatcttgaaaagcccatttctgattgcacgttgactggaattctttctttgtgtctgtggactagcgatgctgtttgtaaaatgaagattcgggactggctcatatctttttatctaactagatgtcagatcttgaaatctgtattctcgaagcaattctgccacttgatcgtattcacaggggccctggtaggctcctttagaaggaccatttctgttcctagagcttaactagaattcattcttcactgaaaaaaaaaaaa

SEQ ID NO: 686 - protein, 131 aa, Homo sapiens; identical to SEQ ID NO: 682

SEQ ID NO: 687 - DNA, 3278 bp, Homo sapiens
gagagccctcctcaggggctgtctctgccttcccttcttcccatgtgtatctggggcagctgaggcagggctaggagaagagcccgggttcctcctgccacctccaagcgatgaagcagccctgggccaactccagcattctcgtgtgaactgcagaggagccctgcgcttccagctacttgcagccagacagcccacctgaggatattgaccataaggactcatatctcattacaagaagcatcatggccgagccagactacatagaagatgacaatcctgaactcattaggcctcagaaactgatcaatcctgtaaaaacctcccggaaccatcaagatcttcacagagaacttcttatgaatcaaaaaaggggtcttgctcctcagaacaaaccagaattgcagaaggtgatggaaaaaagaaaacgagaccaagtaataaagcagaaggaagaagaagcacagaagaagaaatctgacttggaaatagagctattaaaacggcagcagaagttggagcagcttgaacttgagaagcagaaattgcaagaagagcaagaaaatgcccccgagtttgtgaaggtgaaaggcaatctcaggagaacaggccaagaagtcgcccaagcccaggagtcctaggctgaggctgcaccaagacctcgtgtgtcaccccacagagctgtctgtgggtgccttctcaatctcagggcaaaagcccctggagaatattccagccagcagagaattttgacttgcagtaggatttggtttgattttcctacgatctgggtggatgccttgcctgtgacagttgcagttcctattcgccaaatgaagggcagtgccctgcacgtaagttggaatgatggacctgtgttcagagacttaacagaaccaacaagcaaaacaagtgagaacaggaaaaaggaagaggacactggaatcaattcttgagagttgcactacttggtttttcttccattccaagtttcgtgggacccagagccttttttcttttaaaagctaaaaaacaaatgtttaattcctctttttgttatctgttagataattgagatcacctagaaatgcgtttaatctgttcactcactgtaaattttgaggacccagaattgtcttgtttaatttatactttcacccctgttgcagttaacaccagagaaggaacgtgaatgtcgagcacagccactacccttgttggcacttaatttagaaatagggtgagaagtttaaaagcccatcttgattttattttcattccttttggttctctgtgtaataatagcaggctacatagtgacattccagttccaagaaggtacatcctgtccattcattaattgctttgattactaggagggtttctgttcagttttgtttttaaatgtcttgctgatctagttctttcagatggaataaccttccagtcccttagagagtggaactagtccatataacccagcttcagtagcaaaagtagaagccgccacatcttttcatttctccaagaggagagtggggaaggttcccatgaccagctgggcagtcaggatttctctaggcattctaatgtgaaataagtgtagactgctgtcaaggaggcttcatcagaagatgtatagcatttgaatgtctaatgataatgcatatcattagaatccaagctttgaaaatttctgattaatgctcatgtatttctttatctttgtttttccttgtgaagaaagactttcaccactgtctgagtgatgatgctgttgataaggatgatgtcgatgactactatattgcatctctcaggaacagctgatgggaagggaggggctgctgagttcccttgttctagctagcagcacgctcctcagagagggggccgagttacagacagcagccgcattctcatgcaaaattagttttaaactgctagtgtgggcatcggtaccttttgcctgggtgataccgaagaattgttgaggatttagtatgctccgtagagacagttcagccagtcatttctgcattggagagacttctcatactttctttgaagactcatagaaagctggatctagagcttttgaatccttaattagcacagtagaaattagctttctatgggaatgctttagtgttagcagttgacaattaggcccatattcaatctgaatgggaacaaaagtaaatgcaatgataatatactgctagttagagaaacatgttagttgattatacctgaaatggattatttatctcatcagcaagtattatttgaataaaatgagaaatgcttaagaaaaattgttgctctacagtaatttggtttcgaagaatggaatggtaactattttttcccatcgttcttttgagagaaggaagtgtgatgactgatgatcttgaaaagcccatttctgattgcacgttgactggaattctttctttgtgtctgtggactagcgatgctgtttgtaaaatgaagattcgggactggctcatatctttttatctaactagatgtcagatcttgaaatctgtattctcgaagcaattctgccacttgatcgtattcacaggggccctggtaggctcctttagaaggaccatttctgttcctagagcttaactagaattcattcttcactgaaaaaaaaaaaagttacttaagaaagcatttctttcctaatctcactcaaatctgcagaattatttgtaattagtaatacaaaatctggccaaaaggagacttgtaaatagcgtaaagtggtgtcttatgctaaacggtggaatgtataggcagagaagctctttgaagttgtcagatgagctgggctcacaagcctgattcaaacaggctgtcggtctcctctcaccccttaatactgtgcagcccaaactcctaggactcttgaacatctgagcagttttgtgctttgagccactttttgacaaaaatggctccatttttccacagcgtggttttcttaaaatagtttaatgttttatagtctcatagtagtagtgttgctttctaagctataacagtcgactttattcttctactctgaaaaatcttgacttgtttgagtgtatataatatatataaagggagccttaatggattggttttcataatttaatattttttgtatttgctcttgtataattgtttttaacggaaagtattaaagaattgagggtggaattcttagaaccaaagttattcttaataaaaatcaccacatgcttggaccatgcaaccat

SEQ ID NO: 688 - protein, 131 aa, Homo sapiens; identical to SEQ ID NO: 682

SEQ ID NO: 689 - DNA, 103661 bp, Mus musculus
  misc_feature (1)...(103661): n = A,T,C or G
atggtcttaaagagacactatggaaattcactgtgtgacccttatgaagcttacagttcaggacaggggctggcagatgcaggtttaagtcctagggattttgggtataattgttcaaaaggacattgcactgttggattataatgaactaaagactggatcacatggaactgactgtcctgtgtcctgcaataagctcatgtcaagctttcttcaagtgctcaccactggctcatgggcctgctccagggaagcaagggttcctgcctaactcctcttcacaagggcttggaaggcttgcaatggccaggaaggaagacattgtttggtccttccgacctatctttccccagactatcaagtggtctgatcaccacacatccaacagaggctccaatctgttgttaacagccaccatctggtccctgtggtgggtttcaatgtgtgccagtgagtaggccctactagccccatcgcctggtatgactgcctcaccacatccatggcccggttgttgaggaagcttcctgttctctcagcttgggtgaataaatgagagtggtcagtcatcccagcctggatgtctcagggagaggaggatgttgtgggtgccaactctttgaaggtttaggtttcaggttacaggaggatatgtactcttattctcaaggcttttccaccatggggctcaagcccatctgacctaaatcttgttttctgtaaaaccagacaaagttaggcctggatctgcttgctgcctacacacctacctgctgaggctgggcgttgtggtcatcaggaatgacagaagccaccacctagtgggggcaggaacacagctggattagggccccactggatctgctcccccaggtccccaattcccggcacctccatggctttatgctgcggggtgtgggctacatctagctcaagcctgctgaaccactgcagctaaaacaaagcaaagcagcccaaaggtgtgaccaagagaaacatttgtgctaataatatcaacttaattttattataacttgttaactatttttgtttcttataacagtcttctgctgtgataagtggactctgatagatgcacaaatacaatttcctctccacctgtactgagtttgcatcagggcagtttcacaagcagtgtgcacctcaagtggctgctcatggtcacacagtgttggcagacccagcactagtgaccacaggtgtgtggccagcccaggggtcatcactgcaatgccaagaggacccttctttgtgacactgctagtaactgttttcctgagttcctcttatatttggaggtgggatactccgacatagcctgtggtttagggggcatgatatggcccaggctggccatccacttctggcatctttgctgtctatggcagaggtatggaaacagacacatgtgaagatgcagacactggcaacatctgggagaagagtatagggtgagggagagcaccaccagggattcccatcaaaagacctgagccctcctttgatgttgacttctggtaagttctgccttcagtctacagcctcgtgtgaatgaatgctcaccccagccctaggagccttgtgcccactttctaccttctgactttcaaatggcctagactatacctaactgtcctcataaacatactagatgtccagtgcaggggccagccacaccattagcttgacataggctacattttggcagctgagtccctgagctggaaaataccctagcgttttaccttagccttgccaaggaaatccatgggctccagatgttttaggtatcgcctgggaggctggaagacctcacccttgggcacttgctgtagctgtaggggtacctgtttctgagatggaacatgtaaactgggttagccacagctgcaagagccctgagccttgacgcagaaggggctgcctggactccattcatacatgatgatacaggaagtatgaggcacccaggctacccacctctctccatgtcttgtagttcgttttgaaggagtaagctagagaacctgaccccgtaccaatctgactgtcacctgccctactcacctgcactttgtccatggcaatgtccaggatgtcttgagccccctctggccatttggagattgcctccactagagtattggcagccttggtccagagccctgcctggcactgtgctgatgccatgttgtataggacctaggaacaaggatggacatgactggcactgtgctgatgccatgttgtataggacctaggaacaaggatggacatgactgcaggggccaggacccccaggtagtcctcatatgagttccccagttacagtagctgaaggttcgacaagaccacctgctgcctgactggctcagttgtcatgccccttatctgtttagtcctggaggggccatgttttgctttggacttttctgtttgaagcagatttcccttttaaagtgtcttccttatgggggatgagggggcagttggagggatggctcagtggttaagaatacttgctgctcttcccaagtcttgggttagactcccaactctcacacagtggctcacaaagtctccccttatctgacaccctcccaatttctacaccgtgccaccacctttagctgaccctatgcctctgagtctagagtatgtttaagggctcccattgacaatgcagggacaatcaggaccccacatacaatggaacacagcattctcgtgggcaaagaggactgaggtaaggctatcttaaaccctctctgacaggcagataaactcacacaatgctgtgaccccactcttccttcatcctggagatgtaagcacatagcagacttagctttgctacaaggagagaaacctaccttctcttcctactgctgtgttccaactgtttcctctggctcagctataggtactgctgagccaaaccctttccccctaaaccgtctgtcaccttgtcatgaccttcaagtatattctttttttatctgtttttggagccctggatttcagggatccaaaagtctttggctggacagaacgcctcattctgcatggctgaccatgacagcaacaccaacataaaggtgacaagccctggcagactccagacttcaccctaggactccagtcaggacctcagactacattatagggcccttattgcaaatcagggccatggcagagccttagacctttcataaaccccagacccacagagagcacctctaagctcagtgacactgcttggcatgggacctctgcacaagccaatgctcacttacctcccaggcttgcaatttgaagttcagacccagttgtgtgtagtcaatgacagcattgtccctcagctgtgccagggccaactggaagtcagacacagcctcctggaacctgtgggcatcaggggtctctcagtagctacaaaggagttgctgaacctctgaagggtgttttgggatattccacccatctttctctctgtgtcagctctgggagacctggaggcaatagcagtcaccttcatgggtactcaagtccagaggagtgtgcttaactgaagtttactgtctaattctgcttggccacttgaacacctactctctgcacctgacaggggaccatgcctatatccccaaaccccttctaactgttctggtcatttctttcctgccccttaggctctaatcttatgaggccttcactaatctctgaacttccaactgtggatgaaatctctgtccctaaccagatattccactttccccagtcacccttccttggcactggggcctgtaaccctgattatctctcctcccttcctcctcttggaagctgggtagccatgggtatcttgggataagccctggttttcacatctgcaaattggctataaatacagtgaccttactattacagacatagggagagagccagggatgttgagaaagtactataaattttgacagggacaagaggcatgtatgggggccccaggctaaccagagcattctcactgaggctggaggggatctaggtgcaagcatgggtttgcagagacaaagaaccatccaataaggaacaggggataccgctgtgttctcacctctgcagctggaaattggccactccccgctggaggaagccaacagccatgcaggtgtccttagtcactgcttggtcaaatgcctagggacaaaaatgtgtgtggaacactaaactcagtaactgaggaacccaaagccacaaacatacatggaaatgtatcaacagctgaggaccactgtccagttaaagcctggaaagtgtgttactgcatagatttctcagctgccccaagcacctcacaacagactcagggcacagccccatggcatagaaacccaattcttccacaaggagcacagagctagaagaaaacgccccccagtatcaataaaagtcatctctgggagacaggactgtgtaaattttggactttaaaaaatctctttgcaggagctagagagggctgctcttccagaggtcctgagttcaattcccagcaagctcatggtgtttcagaaccatctgtaatggaagaactcacatacataaaatccattaataactgtttttaaatctcctttggtagttcccacgaaacggcacacaagtgtgtggattagaatcagaacacagaagtcttctgtacacaggcacctgctgcggtttcctaccaccttgcctggccaggcgagggctgactgtgagctgggtctgactttgaagctttctcatgtccaggaaatggcatggctgctcacagatccatccaacactacagcttcacaccgacacgttcaagtgcaacctcgtgagacctgtacacttagatttccttattgcagtcagttataccacccacttctcaacgtttccaggtctggccagtgtgcctgtgcttgtacacaagtaagttttattgactcaaggcagtgcctcttcttcttcttatgatagagcatttcaaactctctagttacagtgtgaggaggggagcgtgggacttactcactgttgaaccagctggtaacagatcattacgttccctttcctgaacaataacctttttgttttttggtttggcttggttttggtttttaagactgaatttctctgtgtagccctggaactggaactttcctggaactcactttgtagactaggctagcctcaaactcagagacctgtttgcctctgttggcttcaaacttcagatgtgcagagcctacctctgtctccagagggattaaaggcaggcatcactattcgtggctcaaacaaaacccttctaatgaagaaacaataggtacagataaatatgtaagacgtaatagaagagagctggcaagatggctcagtgggtaaggatacttgccaccatgcctaatgacctgcgtttgatcactaggttccacatgggaaagagaaaactgactcccacaagtttcctcctgatttatacacacatgtaaataaataaataattaaggcttccagaaagaaataataaagagaccatctccacacagcccaggtttctgctctcacccttggtcttgggtgtctttgctttccatctgtggtgtccaggtaggtctgcgttgtaggcagagtgctgagggcttctatcatacacccaggaatggtgaacatgaaggggggatgccctgatgctcactctacagtgtgctcccctgagtaggtctgctttgagaagcaggtggagattcatgtgagtgctcactcagaaccggaatgacagactgtgtgccaccatcccatcacaagcatctgctgaaatgcacactatcagaggacgtgcagagcccctgactgctctgacccagccaccagcctgccttcgggtatgctccttcctcagtcctgagcaccagagagcctgggcaggccaggtctggtacagttgccgcatttggcttatatggctatagagactgaaggcgccctgcttcccattctggtctcaacaaaaagaggggtcttctaaccacaaagctccaacctgcctcaggcaggcactaagagaggacattagttgaacaatctctacgtaaatgacagggtaaagggcagggattcctccccttcttctatgttgactataaggtgcggaagagcgtctttttccaggatgcccattggaagataaggttttatgttcgcagtcacatcttcatctgcattcccctaaagcctccaccagggatgtgagaggggaatctgttatccagtcctggggtgcttacccgcagcgcagcctcgggatcccctgccatcagatgcacacagcccctgttaaagtacatcctagccagcggctctcggacatctgagaagaagcacagcgcagagtcccagtcttcgcgtgccacggccagcacaccccggtgccagtcccgtatctgatcccctagagagctcatggagcggggacgcctgctttgaggcgaaggaagttagcgattctagctggagcgcgtgggacaggaggagggtgccccacagaagctgggaggccgtaggccagggccaaggggaccgggacagcaatgagaagcagctggtagcaagacaactggagttgtgacagtcggtccttgaaactgagtagatggcccaaggcttaggcccctctctcacgccccgcctagaactacttaaacaagtccctagcactgaggagagggtctatgatcacatagccacacccctgcattcgtcaggcctatctgtccactccctggcttagctcaacgccaatgaaaccacggttatctcaatatggacacgccttctccacctcctagttcttgccaggaagcaggtgtgagcacgccccttactcaagccaagcccacaccatcttttttctggcaagttcagaacttcagtgtgccctagatgggcccccgacgtctattatgcaaaactgcagagtgtttggggaaaccccggggaaagtgctgcacgaccgggccaaggttccggggtcagtatggacggtgcattgcagagctgcttgctcagaggtcagcgtggtcaggcaagtgggcggcctaaaggagaaacaatctaaaggctggtagagctcgacctccagacccgcctcttcagaagtgaccgggtgggcttggagactctggagcaacaagatgggccggactggatgccatgtggctaggccttagaagccggattggggcctcggagtcaggtgtatcggtcggtggtggggcagcccgcgagggctttctccactagtgggcgctggcctggctgctactctcccttgcgagtgtggccattgggactgagtcttctacactgctctccaggtggatcacagctatccagaaaaactagcggttggacagggattgtgtcttgtatagacaggtggggcagcccaatgtagactctgcaggacacccagaagttgatgtccaccttcataatcttgctcgaataaggcccatccacagtatgggagtcatgtgccttccccaaactgctgataccaacattaatctctactgaagttttctccctgacatttggggcaccatggcttggcagggttgacacatgaaataacaccacaacacccaatccaagtagctaggctcagctgtatcgtgggctcattacccttccttgcctggttgttgatcccctgtactcagagtcacagctgattctccttcctgtgtgacgcaggacagctaacttttcattcctccatacgtgtaacaatggcagcaatcaattctgtcctacgaaggcttttctgagagctgaatgagatctcatagtgtcagcaaacagttggtgctcagcagtgcttgtcatcctgagttcccaggggctgtgtcccttggcatttctctatgggctgagtttccctaaactgctgcctggagtacgtggatgttgctaacctgacttctttaagtcctagtgcagccattctgccccaatacccagatcttgtattgtctccgtgcaggctggtcactttcccttgtttggctcctctccctcttgctactcactgccccttcctggaagcccagcctaaactctatccctgccttcccagccccatctgcccattttcttttccataggtcagaattctttctagaatgttccatagcccatatggtggtttgaatgaaaatgacccccatattctcatacatttgaatgcttggttcccacttggtggaattgtttgggaagggcccggaggtatttcctcagtggagggagtatgtccctggggattggactttgaggtttcaaaaagcccacaccattcccaattagctctcttgctccctgtttcatgcttgtagatcaaaacacacactcttggctacaactgtagagccacatctgcctacctgccaccatgctcctgccctggtggacatggactcactcttagaactgtaagccccagatcaattttttcttctctaagtttccttagtcaaggtgtctatacagctatagaaaactaaccaagacagcccattttcttatgttgcatggtgtagaacatggtcccaagttctacaaggaattcctcctgttctctgatgaaccccaagtgtcagccacagtgactttcccctgagcatatatgatgtgctctccatacattggtttgcatggatcaccataatggccaggtagtttatgtttaagtagacaggaaccctgttaagtcttggtgtgcggtccagaggtacgccagttggacagacacatgcttttggctccatgtaggtccatagcccttgtttgactggcatctgagtggcaggacatcctctgggaatgatttcaaattcactgatgattcttaaaggaaggtggattatagaagttagatgctatacaggctcttatctccatgtttgctgaagggtccaagggaacttctataccagcttgaaaaggtcatgtctgagggccaagcctcaatttccttttaagagaggtcactcaagaaagtgaattggacatggggtcatttaccctctcctcctctggccttgcaggatctagaggggaggtggggtgagcaatggaagggtacccgaggattctcctttgtgtacatgagccaatgctgtcccgggagcacaggtgtgggccagactttccacagagggccagacaagtgtgggtgaagctgtcggaaagtaagatctgtgtactgcaaatggaagcccaagatgataccaccatcgtagtgaaagatagtctagtggttcctcagataaatagaaatgtatccacacaaagctggcagagtagctgggtatattgttggcactggttgatgcaggatagtgagtcgactggcttgcctcaactagatagcaaggcactgtcttaaataaataaataaataaaaatgtaaaaggaagcaaacaaaacatacatacaagtgttccaagtgacactatttataatagcaaaaggaggtggggagaccaaaccagatgtctgattactgatacattcatgctccatccaggcaattatttttcattcggttataaaaaggcatgaggctctgatatagcttgggtatactttgaggagacatgccacttgtaaaaacacagatattctatgatcctgtttgtggaaaatatccagaacaagcaaattcatagaggagaggaggaagtgtggggtgatctctggcagataatgagatgtcctttagttgaactgtgcagaaggcaagctttattgtatatgagttacgctgataaactgtgggacatttctgagatgtgtgcagactcagggtgaggagttgtgagtaagtagtggtgtttacagaggaggcctgagccagcctggctgcagaggcccagttatgccagccagccttctcaatccctcctttgtcctggctgccttggtgtctctggcatctgagggctgctgtgttctgttcctagtaggctccaggtaccagctctgccccactgtgcatctcttccctccccttgtctcccaggctatatggcaagtccagagtcacgtgtaaccctcagctagggcctgaaggacctggagacctaccttggaacctacacgggaccagatccaagtcggaaccagcaagtcagaatacagagggaactgggaacccactcaaagccagtgctctagactgagccaggagtctcccatccctcaccccacggtcattccccatgccagacccagaaagaggacaggagggacacaccttgacctaccagtgttccctggagcctgatgcttcttccagacagagccagcccaaggtgggctggaagcgagaaagagaagcagcagagagactgggatgggcactgttctcagtggacccagtgaggccagattctgctccagttaggacaaacagatgaactgggccctgggtggttcccatgctctgttgtatgctatcacagtggcggctgagggcagggcctgcctggtgcagagagttcctgggtgtgcaagcaggaaggtgctcgggggtggggtggggtggaggcacagtaactttcagccagctgatctaagaacagtgctgtcctgctgatggagagtgactgggaagagactggacttggccagcagaggggcccagagaccagtttctagtggctatctgtggccttagcatagaaagcctgtgtgctacttctttggggctgtacgactagcagtgagttttctacggtaacttttgaatcctccagcccttgagagaccagaggctacatcccacttcccatatgtccaacatgatcactgagggcatcccgagggaagttcaggatggccttggccatctctggaaatctaaccatacctgattaggttcccctttacctagccctgctactacccgattgcaagaaaagtctgtagctctctgctgggttttttaaaatcttgtgtgtgcatacgagttttcaatgtgcacattcatgtgtaagtatagaggccccatgtggaggtcagaggacacctgttaaccatcttctgtcacctggcttgctaccgcatacgccaggctatctggcccacaagcttttggggactcctatctctgtcttctttccattcataggtacagactggctgtacagggacacacaccagggtatctgacttacaggaacacacactagtgtgtctggctgtacaaggacatatcagcgtccctgagcacattagctagggaagtcactgaactccctctgctgtgtctgtggaatggtcttccttgtgcagaggtgaggggatgggagctgaggagagtgtatcagtgcagggaagcagcaggaagtgtctgtgggcgtgagctgtcaccctggttacctccttgctgcctggattagttcatttgtttcttcacttgtttgttcattaatattcatcaaacttgaatattcatcaaacatcttaggcagtggctttgatgccagaatggagcatgcagcttgggaatggtcaatggagactgctgggaagctgagtaagaagaatatcagcgtatcttcctctaggtcatcttcacagcccacttggtgctctgttcctgatgacttggtcccaggcttttcattttattttttgcaagaggttttttttttttcaggaaacgtgatggaggctaatctcaaattcctcctaccttggccttttgagaactggaaccataggtgtgtgtgctctaatgccaaacttgcttgatacttctgcctagcatccacatatgggcatggagatttgtctgtgagcaacagatcccattgagggaacccaggactctgataggtggaagacaagttacagagccccacggctgctggcataggaaaaagccaccttgctgggttaaatttatcatttgctgccaggagttgtagctgcttcatagcgggtcaaagaaaactccttttgggaatggtctagggacaaccaatagcaaggagtcaagcacatactattttatgtagagggagctgtgtccataataaccttcttcttgttgaggcttctattccttccatcacaagacataaacagtatactgtcaggagtctggaaaccatgtttgctgggcaatggacggtttccctggccactcctcactggatatggggaagacctggctcataggtttctccagcagctctggatgctcagagatcttggtcagctttgcttgtgagcacattcacactgtgtctggaggtcttacaagttgcagagggggttgatatgaattcaagacctggccaactggttgttagtagcaggatcttggagaggtgtactcaatgaccattaccagagagaaagctggggggaatgtgccttccaccggggggtgctgaacatctagaggtcagctctgctgaactatagtgcaggtagagtggtcagggctaatcgtgacaagagattcatgcttccatgtgacagtgggcctggccatgaccccacaatggagtccttggtgctgcctgtagatggaatgacttctaacctggggcttctagccaaagcaagggaaagcttggcataagcaggtaagatgctcgagagtgtttctcatttgctgtactttcgaaccaagagataacaaagaccaggacctgacagccaggggatgcttgatgccagtgaaggaagtaaggagtgaatttgggtgccagctggggatagcagactaaggctgtggctgtccaggctggaatagggcagaggtgtgcagctgtattactgtgttaggagagatgtggtgctatcagagtaccaaaggcgagaggtgtgcagactgatcttaaggacacagcgtccatctttctgcactctcccttagatcttatgtctgtttatctatgcccagattcacgactccggccatctccaactttatgttaagctagtgctgaactttaacacattttttaaaaaattgtgggagtttgtggtgtgtgtgtgtatgtgtaggggtggatgtgtgtatgtttgtgtatgtgtgcacatgggtgcatagaggtgtatgtgtacatgtttgtgtgtgcatttgaaggccaataatcaactttaggtgtctttccttgagtgttctctctctctctctcttattgtgggggggagagggagagggagaaaggtggagagggagagaggaaaagggagggagagaggaaaagggagggagagggggagtgggagagagggggaaagggagaggggacagggagagggagggagaggagcgggagaacaacttgtattgatgcatcctggagtctggctcttagctgcttctgtgccacaggttttctccatctgttctggtcacggggatgactatccagtccaggctggccctcccacatctcaactggacatgagattttaggtcactgatttctggataagaagtagtgccatgcccagtcagttctctctgcccaccatatgggtcttggggaccaagctcataaggtcagatttgtcagtgagagtccttacttgtaagctgggccatctccctggccctccagattattgtttaagacagggtctctcactgagcctggagccactgattggctagacagttggctagctggttctggttctgcctgtcttggcccctttagcccaggggcacagatgcatgaagtcacacggagcttttgcatgaattctgggaacctaacctccggttctccttgtacagcactaagctacctccctgggccctgaaatattttttttgagaattcccatttagtttctatataattttatataatttccattactcccattttgtgcactgagaccatgtttgcctttgacttctggaccatgttttttttctgttcctctttaaacacatgtacagctgtactctggcctttgctacttcatgtcaaagctttattctgtgatctatcttgcctcttatgcccctggttacatgacatattttcctacttctttttagatctcctgatttagtttgagctgatccattttgtttggttttgtttttcaacacttttttttttttaaatagctctggctgtcctggaactcacggtgtagaccaggctggtctcgaactcagaaatccacctgctcctgcccctcctgcccttgcccctgtgtagaccaagctgctattgagctcacagagatctgcctgcctctgcctcccaagtgctgtaattaaaggtgtgcacaccacatctggataaactgatcatttttaattaaaccttacagactgtgggttccactgttatcctgtgaaggacactggcttacccctagaagataattccctttctagctggctctctggtctaggagtgtattgaacattaatagcctctcgggactttatgtttttctccctttccttcattctgtggggctattctctatagaagccttttgagaatttgtgggggacttagctttggatggagcaacttcatgttcttagtgtggtcaaaggcgtgaccattctattactagtcaagagtcttccctcttgtctgagctggattctaggcttgtcctacatacatagttgctcctgggagacttggaagtcttgtattaagcccactcgggctccctgtggcccttcctatggccactgccctcagatgcactacctctttgcttctgctcagggattcaggtgggagatagctcacaagtggagagggcatttatgacctacctgagagtcaagaagcatggtcctgcactgcatcttctccagaaacccccggcctaaattacaatgtctggggaagggccatcctggccagagcagagataaagagaaacctgtgcgttagcagctcagctgagagccatgctctaggagtactgtgtcataatgagtgttgagtgacagcagatcttatagaacccttccaggctgtgacttcaagtcagccaatacaataggtgacttctcaccttgtacagaaagtaattgtaacatgtgagctagaaacccaagaataacctgtgagtgcatgatttagaaacatgagcataagtccagcgcccttttatctcaggctctgcttcctgcagtttcaatggatcccttggccaaagcatgtgaaaggaaaatcccacaaattaatagttctcagcttttactttatataccattctgagttagctgaggtaacgcatatctccatttggttccactggggtagcatcactcttttgtccagtgtgttttcactgtgcatgttatctgctgttgggtctccctagccaggtgggttttcattctgaccataatttgcatcccaataacctctatcttatgcaatagattttatgcaatagtggccttaaagcctgaggatgataatctgacctttccaaaaggctagagaatcataaagtgctccttttaagcaggaaggcaggaaatttcagtaaataagtcttaatggcgagggagtcaagagcagtgtcaacaagccactttccatgaaactgtgaaataaatctaaactagttctgctgttgaacttcacactgaaaaaattccagccacagggcataagtgctctgatggaaaggagttagatttgtggattgagcactgactccagtttcagaccaccatgagggacttggaccatgtccccaggcaccaaagtgtctaaggttatggctgtggcaatgcttgcctctagtggggactaggagaagcagctccctgttacatagtcagggatccagaaggcctcagtcaactttgttaaaggcagactgaagctgcatttagagatagcatcctttttacagtcttgtggaacagatggagaagtaaaaccgtttacaccgatcccatattccctcccctgggaatgccatggctcttgccagcctgggtttagagtgggcccttcatgtgtccctaggtcctaaagaaaccaagactcaaactcaaaggtgaagccagcagtccaggactggccagctttggacagtagtggtttagcctcttatggaggcgcttcttccttggggaacaacgttgctatagatgctggaggttgagggtcagaatggttgctagccagcttcagtaacgtaaccaatttctcatccctgggaccttctcctaggcatgggacactgttcacagaaagatcaaatccttggtctgccctgttgctcccctgggcgcctgcactcatgacctaaataagttcttgcttacttgagtgctgtgaacttccacagccccctgccacctcccaaggtggagacatagactcctcagcctgtgtggagccaaggaacttattgtccttaactcctagttcctcattcctccagctgtgtacctccaaccttaacccttgaccctgccaagatggacccaggagaccccactgccagagagcctactgctgaaatgctcactgctgccggagagtctcctgctaatgtcccctctgctggcattagcatgctgctctacaagtgagtctgtgccctaagatgtctgagtccagttgaagatgtttagtagagctgtgtgtgggtcagtggggtaatgacttgtctctgcacatgggtaataagggtttttccctgggatcctgcaagacctgaggaccgatcctaagggatcatagcctacgcttctgtgagcctaggaggccacccaggactggggtcatcttgagccacagaacagacagatggctctgagtagagactacaggagggggcgaaaggcaggtccagtcaggggtggtctctgcaacagtgttcagcttcttctagatgggacataagggctcctgttctcactgtcctgctgtctcccgagacaccccaggcaagggcttgaagcttgtctggggtcgggggagacgatgtccacctccagcagattcaaggagcccacaagtttcttaggtattccctggcattcttacaagttccctgcagtttgacaaaaacaggccatgctttcagtcccccccaccccccatacacacacacacgctaaaaatcatgcctgccacctcacaggtggagattgaaatgacaaaaagacagttactatatttctgtgggtgaagtcttgggagtcccagagtgcttagcagtcaagggctggattctccatatcaccagatgtattcaggcttcccccttcttcctaaagtgtctccacttcagtttaaaaaagagaactacatgagaagatgccatccccactgggacatgtgtggttccatgctcaaggctgttaggaccttggcttcataaaagatttgtcttccaatcgaggtctttgcagttcttctggggggtcctcccttctcttcacttctctaccttaaaaccatgcaagatgaacctgagcagcactagccactgaactgagggtgggcgggggtggggtttatatgtgcttgcctatcttcaggtagacaaggattccaggccatgttcctgtacatgatatcaacttatatgaacctgagcaggactagccactgaactgagggtgggcggggatggggggcagtgggggtgtcccaggcatttcctcagcctgatactgctctccacagtgagtccttatctgtatggctctgacataacataaaagcattttatccatcctgccagaagggacaagaagggacttggagacatgcctgaaaaacaagagtctggccaagatctgagtatgggaatctaaaactggttcgtttccttgctcccatcctgccttgacaccgaggcacttcctgcaatttccagtgctctgttctctcgtggattgcctaggtcctgaaaggacccagaaacctgtaccagggctgggtttctagcctaggtgaggtctgatcaagccaggagctgtcctctgctgtcatcttgtgtgttgactacagcagtcccagagtgcctctttccttctggcagccacccaatactaattctcttcatgacactctctaaactaagtcattgtatctggccatgaggctagctcgagcaaaaccagtagaggagcctcaggccttgggcatcaaagagtgaggaaacgtcccagcctgtgtgtctgctacctgtccatctgtctcatgtggagatctagccagggcctatgaatggcaggagcaggacctcccctgatgtgcttgcctatcttcaggtagacaaggattccaggccatgttcctgtacatgatatcaacttaatctacctgatctacccacgtgtctagctcaacaagagacctccagctaagatggcccctagcagacatgtatcagggcctggccagcacgccctgttctcccctctaagtgcctcttgctgagctctgtgctgtctcatcccccccatacctgagttcccttgcagtcaactactcttaggtcagtgttggtttttcctctctggctgcctggaatgagggtcacatgtaccgtaacactcctacccaggccttgttgccagctcagggaggttttctgtctctgaggccataggagagaggttcaacctggcttcctaataccataaggccaagccatagagcctccggctagcagagagggctggtggtccttgctgtgtggccaagggcaagttacctaacacccccctcattttattgttttgaacagtagtgataatatcaatatattgttccactgctttgtgaatatcaagcaaattattttatgtaaaactagccagcaccaagtactgtctgagtcggccccacatggaattctttttgctgtgcaatatgaggttgggctcagctcaactctttttcccagaccactcagatatcctgatgataaccaatgaggagtgagatacctccttcctgggccaatcccagctgtgtctcagtctcttcttggctctgctgtgcccttaacagactgttccaagggctgtagactggcaacactaaaaacagtttctttgctctttgtcttctcaggcccctttccccattaagcatcagagtgagcctgtctgggttcacaaagagcctcctgtcatttttactgagaattcctgtctgcagcttatcttaggtgctctgatgttctccgggtggctaacaccttgcctagggtgtaagtgccccaggtgtccctctgctggacaggatctgatcctttgcatgtccatctcaagactgttatagacagggccccatgggatgccacaggtgctggaaaagccagagtgggttcatggctcccacctaccttccttgggcctctcacctggggatacaagcaccatgcatgagttctatagacagataagttttcaaaggctggaccagccttcctggagtcttgagccctatctggtaaggggtcccttgacaggtctgtaatctgaggataacaggtgacctgtgtgttcttagtacagctatcaaagggacccttgaagaaagacccttgtttttctttggtccttaggtgctctgtgtagcttttgatgctgtgtgtctttcttgttgccttcttccaagtgtcaatggattttccccttgctacagtttttcccagactacaaatagacctgaggggtatgtgtgcacacacatgcataggggtgcacgtatgtatgtgtgtgtctgtataaaggccagaattggatgttagatgtcttcctcagttgttgtctgcttttgcttttgttttgtttaagacgggtctcactgtgtaaccctggctgtcctgggactcaactatgtagaccaagctgcccttaaacttacagagatctgcctgcttctgcctcccaaaagcagggattaaaggtatgtgccaccacacctggcttctcccttcctttttgagacaggatcgttctgtaaaccaggagctcagcagtttggctgggctgagcagcaagccaaagggatcttccttccacctcgccagtgctgggattatgggcttgctttaccacatttagctctgtccttaggcactaggaatggatcttgggtctttatgtttgtgtatctccccaaccctggtcctgagtttcggtgtccctcttctgctatgcagaatctatcctcatcccgacagttatgggttttctactgcgtcttctgagaaatttgtctcttccctggccttcagcctcattttccttttctccctgacttcgtgaatggacatgcacctttgtagattggtctgcaagcagcagcaggctcaggtacagatgggctctgcttcaggctcttggttccaaggacagagccaagcagcagctgtgcaacaaatactatgacttccaccagtaggcatccagtgagtgttatgtgaaccatagcctgtagtttagcagcaacctgggtatgactgtggccagtgggtgtgcaatgagcagtaagtggtcatggtcaggacaatgagtagtgtaatgaccagcaagaatacagagagctgtgtgtgactgtggccaacaggtatgtaatgaatggaaggtgatcatggccagcaagtgtacagtgagcaatgtatggcaatgtctggtgatgtgcagtgtgtagtgtgagacagtgcctggtggtgtgcagtgtgtagtctgtgaaagtgtctggtggtgtgcagtgtatagtgtcagacagtgtcttgtggtgtgcagtgtgtgtgtaagactgtgcctggtggtgtgcagtatgtagtgtgtgacagactgtgcctggtggtgtgcagtgtgtgtgtatgacagtgcctggtggtgtgcagtgtgtgtgtatgacagtgcctggtggtgttcagtgtgtgtgtatgacagtgcctggtggtgtgcagtatgtagtgtgtgacagtgcctggtggtgtgcaatgtgtagtgtcacatagtacttggtgctgtgtagcatgtagtgtcagacagtgcttgatggtgtacagtgtgtgtgtgtgtgtgtgtgtgtgagactgtgtctgttggtgtgcagtgagtgtgcatgacagtgtctgttggtgtgcagtgtgtagtgtttgacagtgtctggtggtgtgcagtgtgtgtatgactgtgcctggtagtgtgcagtatgtagtgtgtgacagtgcctggtggtatgcagtgtgtagtgtgtgacagtatctggtggtatgcagtgtgtagtgtgtgacagtgcctggtggtatgcagtgtgtagtgtgtgacagtatctggtggtatgcagtgtgtagtgtgtgacagtgactggtggtatgcagtgtgtagtatgtgacagtgtctggtggtatgcagtgtgtagtgtgtgacagtgactggtgatgtgtgcagtgagtgtgtatgattgtgcctggtggtgtgcagttgtagtttgtgacagtgtctggtggtgtgcagtgagtgtgtatgattgtgcctggtggtgtgcagttgtagtttgtgacagtgtctggtggtgtgcagtgagtgtgtatgattgtgcctggtggtgtgcagttgtagtttgtgacagtgactggtggtgtgcagtgagtgtgtatgattgtgcctggtggtgtgcagttgtagtttgtgacagtgtctggtggtgtgcagtgagtgtgtatgattgtgcctggtggtgtgcagttgtagtttgtgacagtgtctggtgatgtgtgcagtgagtgtgtatgattgtgcctggtggtgtgcagttgtagtttgtgacagtgtctggtggtgtgcagtgagtgtgtatgattgtgcctggtggtgtgcagttgtagtttgtgacagtgtctggtggtgtgcagtgagtgtgtatgattgtgcctggtggtgtgcagttgtagtttgtgacagtgtctggtggtgtgcagtgagtgttatgaatgggagtgttgagaattgagaatggcttcctgctcttagatgccatgctgggttctggcctcagatcaagcggcttccctaaagacaccagggtgggtaatcatatgctgcttgctgctctcttcacaagctgccctgccacatgcctgagcatgggggcattttttgggtctattaacacagcaccgtagacatgagactaaagagggattggactagagagccccagccttggtagaaaggcaggaggctggaaggtgatgccatgtgcagctctctgaggggatggcagttccaggcatcgtaggggtgctgtgtgtctccaggaccttatggcactgtcctttctcaggaccttctgcagactcccatcagctctgtcatgggttgcccagtgatcatcaaacagccctgagagtggaacactgggttcaggtcactctgctatgaggcaacgtagccagcatactgctgtgctggttacagttagttcagacccaatgagcagagtctgacaagaggtgagcggagctctgggtggctctgtggagatcatgtgccaggggaccctttgaggcagtcaggtgtccagtgtagcatagccacactcagccacagtgcccagccctcagagacagactttcatggtatctaccactaaccctatgtggtgatattgcagttgactttgggaataacttttcaacacatgtccctacctagatctgtaaagtacttaaagtgtaggaagctgagtcagctcagagcttaattgataaagtgacaaccatgtgttgccacccaatgtccctgtgcctcagccctatccctccatggttcatctgagagcctctcttgtgattcccagagccatgttagcatgaagacatctggggagacaccagtggtccaaatgtccctaagttcccaagacccctccctcctacaattcctccatgtggcacttctgaagaattcattatttgtctgttctgactttcagtaagtctgcctccctaggttgtagctttccatccccctccctgtgttcctgagaagcagggtttggggtcaaggttcaagctctggccagaggccatctgtcttactgtcccagacctgctagcaaggcctcctgccagcaagcccaggatgtccttatagcaacagctgtcccaggtctggtgtggagagggatgtggccagagcccatgagggaatgtggataaactgagaggcaggaaggactggagcagaaggcttcagcagtcagcagtgttcagctggcttcccagctctacagctcaggatccctgcccagggagtactcccataaccactctacatagctctacagcccgggagtgctctcctaaccacctcctggagcctaccctcttgtggctttgcagaatgccacagaacttgcttatctcatccattcagatgaacgcctctctgcatcctgttgttcttatgtcataagaacaggatgtagcaattgtttgcaatgtgcgtcagcatgcccctggacctggccccatctcggtggtgcccagcgccatagagacccactcctgcccataggcgtgacccacggccgatacagactcctagggctctccactgacacatgactgcccacagtgtgcatgagggagactgatcattagggaggttaccatggagatgtttgtcatgcactgggccacatcctccagaaagacaaggctgttagtgccactgggccccaacactggaaaggacagtacacaacaggcccgtggggaactatgggaggaaacttctagcaagaggctggaaggtcacaacaaggggagtgccttcaggctggaacccagagtgtctagtgacagaatgaaggagctaaaggattgaatgtcctttagctttggtgccaagtccactggggagttaacaggcaaaggctgctctctgctttgttttcgtggagttttccaaagatccctcaaacctttgctaggccagccatggttggcagggaacgtaggaaaacagcaaggtcccttggaaagcgagagtgccaggcatgatggtgctctccatctcttgggatgccagccctggggaggcagatgcaggaggatctctgtgagtttgaagccaacatggtctacacagtgagttctaacacatccagggctacttagagagaaaactaaggaaaaaaaataaagctagggaaacctgatggggaggggcaaggctgctgagcagtcagagcggacagacactgaagtaagtggaaacgggtcgggaacagaaatcgcagtcactaacctggggacctatatggtcagcttcaggtccaccaccagcatagttgtgccgatctattaaacttaaaaaaatatgaccctttttattatttcttggttattctttatgcatttaagatgggtgtcattctatagttctgaccagaatataaaccatactgacctcaaacttgtaagaaatttatttctgcttaccaagagctgggagtataggggtctgctattatttccagctcctgggtggtttctggggttttctttctcctaatttatttaatgtgtgtgggttttttgttgttgttgttgtttgtgtgtgtgttggctccacatacttgcactacacaaggaagcttgaagaggaggccattgaatgccctgggactggagttacagatggctgcaagccaccatgtcagtgctgccagttgaacccaggtcttctggaagagaagctgatggctcttcaccaccgagctagctagcgcccagtttttaactgaggcaaacaagaccgtccaactgcttgtttgcagtgtactgcatgggtatagatgctaacctgctgtcttcatgctctctgttcacagaactgcttcacccttcagccttgaggctgctttaaaactgcctcaagggctggagagatggctcagcggttaagagcgccgactgctcttctgaaggtcgcaagttcaaatcctagcaaccacatgatggctcacaaacatccataatgagatctgatgccctcttctggggtatctgaagacagctacagtgtacttacatataataaataaataaataaataaatctttaaaaaaaaaaaaaactgcctcaagacctggcatagtggtggatacctttaattccggcactcagtaggtagaggcaggtggatttctgtgagttcaagaccagattagtctacataaacaaatcctgctcaaaaataaaaacgaaaaagaacaagaacactgcctcaagccagtggcacatggctatgagtccagcactggggaggttgaggcaagagagccaccagagctgaaagcagagtaaaacttgatgatacatagtaagacctgtatataaaacgtaagtagtgctaggctggagagagggctaagctgttaagaacacttgctattcttccagggcacctgtttttgattcttagcacctatgtggtggctcaaaaaccatctgcaaccctaattccaggggatttgagtcttctggtcactgcagacatgaggtaacacagacataatatatacaggtaaaacacccaaacacaaagaaacaattttaattacatttaaaataaattaactacaaataaagaacagataagcaaaaacaaatcctacctgttttatttttttaaaagatttatttattttatttatattagtacactgtagctgtcttcagacacaccagaagagggcatcagataccattagagatggttgtgaactaccatgtggttgccgggaattgaactcaggacctctggaagagcagtcagtgctcctaaccactgagccatttctccagccccctacccattttattaagtacagaacattaaacaaaacacccagaatccaactcagtgggtggcatatgggtgtatgcccacagaacacagtccattcaccctatcagttcccatctcaggagccactgcccatccagcagcccagatacctttacacaccatctacagcaaactctgggacatccgtgtggtgaacaagcacagaaggctgggaaatgtctttcctgctgacccacaggttctgtagtagcattctggggtcactgtagatacaggttctgaaatattataagccctcactgatcactaggcctgaatgctgggccacacattcacatatgctaagtccatgctggtgacagcgcttcatgtaatgggactgcttggcagtgacacgcctgtacttagcagccctcaaaccatcagtctttccccaaagtattgggccttctcttgaggtaagcctaattcttgcccatccattctttctgatttataggaaatcttcatattgctggtcctttaaacttctcaacaccccagggccccctagatatccccattgatattcgtatagagtatggagcagggtgcaaatttcagtaaggatccactttccctggtctgtagagccaccctgaggtgtattgatgtcctatgtgtgggcagtcttagctggggtggtcattttgtaccactgtctgcttctcttgccacttccccttctgtggcttgctgtgagttgggtctaggcagcacaacccacttgcaagtctgtctgagccttttttctctgtgcccagagtcagagtgtaagaaacacataacaatgtccctaagtacaaagatgcacacacgttcacatacacacataggtgcaaacacacacacatacattcaaatttgtatatatagaccaggtatacatattgctgttttcatggacatagtatgtaagctatcgatctcaaaattaggaactttgtagataatatggtgcacccttaactctgcctttgaaagagagattggaaactggagtttggagaattcccaggagacactgccatataaggaaaggacaaactgacagggatggagaaccccatagcttttctttccgagatagggggtcggggtgtccactggggtgagggtcaggatattctgaatgcttgcggaagtgaatggaggattgatctggggttatggtaagggtcagtgctagggcatattattctttttatttttacttttttaactttttccaattttttattaggtattttcttcatttacatttcaaatgctatcctggaaagttccctataccctccccccaccctgatcccctacccacccactcccacttcttggctctggcattcccctatactggggcatataaaatttgcaagaccaaggggcctctcttcccaatgatggctgactaggccatcttctgctacatatgcagctagagacacgagctctgggggtactggttagttcatattgttgttccacctatagggttgcagaccccttcagctccttgggtactttctctagctcctccattgggggccctgtgttccatccaatagctgactgtgagcatccacttctgtgtttgccagggcatattacattctgatggatcaagaggaagtagcatttgggtgaagctgggcaaaggaagtgaaacctactggaaacacagggatttggttagacatgttttggctgttgctatcacccacctcactatgagacctggatgtgctatcatctaagaacactcaagccaggcttgttggctgctgcagtcaggaagatcttagttttagcaggtccctggggatatctgatacactcaacctcagggcccagggcctcttaggaggcatatgcaagaggatttagaccacacagatctggccagctgtttagctgcctggggggaggggaggttttcagatcagtggtgtcactgctgaataacaggcatggagtgagggcaggcgtttgagtgtaggtaactactcgtggtccaagagcaaggggagcgggagtagttgtttgggcaaggctacagagatagggtgcaaggaactttcaacactgctctaaagtggccaggataaggacagaagctgaatggtcccaggatatgcagaccacactctggcgggtgagatccaggctgctactggggtgttactgcagaatgaagtggccaggaaggtctgtggacacaggacttggggagagggctactgcagtggcttcaggggctaggggaggcagctcccattagattcattcaaaacaaagttatttagtgtaagacctgaacgattagcagaaagcactcaaggtattattatcatggcaagcaccttttgcaaaggtctccagctgctcagggcatgtaggactgaatgagattaaaaagcctcctcactgcaaaggaaacaataagacaaagggggagggagacatgagacatcacacaaccccctcatcagttacagagcacactgctcatgcaaggaccagggttcaggtcccagcacccacgtcaggaagctcacaacctcctgtaactgcaggtccaaagaattgaatgtccttttctggtctccacagattttacatgctcaacccccccccccacacacacacacacatactaacacacatacactcacatactcactcatacacagacacacaaactcacacaaccctcacagacacacacactcacacacaatcacatacactgatgaggattaatatctagactctataaagaaatgaaaaaaattaaacaaaaatccaatcaaaataaccaaattaattgaacacagttctcaagagaagagataaaatgactaaaaatccatgtgaaatgttcaacatccttagatcagaaatgtattatcaggagtacaccgagattccacctcccccagccagaacaaccaataccaagaaaattacctcagggctggagagactctgttgcagtaaatctctccaacctaattatgccccggcaatgaaaacacaacacagttaatatgaatacatgttgtgcgtctagattgggcagatctaccgctacgctaccatcttccacatttatgagaccccttagaacttgcagtttctccaggccatgtgcttctgctccgcttttcttcttcttcctcctcctcttcctcctctccctcttccattttctccttcttctctcccctctcactttctgctccaccttcccttttatctgcccaatcatcagctctcctttattttacaatttaaggcaggaagcaggtttacaggaaatcacctgagtgctgactcattccttgttcgcagccactcacaagagaatggaattaacatccaatacaattagccccagggctatccacaacattttccctctttctgtccaattaaaggactatttgatctcagatataattgaacataactattactattttgtaatttataaagtacaagagacctaatacccagtccttcatctttgttaattaaacagaacctctgtcatctatccttacttaaaagacttataattctacatctggctatggcttggctttagattgaatgccatctgaaaaccatcccctcaaaaccgtcgtctcaaagtaaaaagcctaggttagctaggagattatggagtttttcaaccccatcagaaatccaggaccaactgatattaactgaaaatacatagaaagcctaacacagcttccaaaacttaaccaatccatagaggccgctgatcacctggacagtcccttacttcaacacgttagagcatcagtattcagcctactggccagggtcatctgacagacttagagaaacaggaatattaaggactagcctactctgtctctgcagaatcaagctgtcctaacctgtaattgtgtcctttctttgggcaatattatgtctgtagatgaaatgatgaggccattcttgcctagtggccgttttgccacaactggagtaactcaaagatgctcagtttcttctttgaatccaagacagggaaagctgtcaggagcagactggtctcaacaacaagtgactaaacaaccttaaacgtcacattctgtggacttctgatgtttttgaaaaccaactatctatgtgaagtaatcttgactgttgtctgttaactactctcagccatttctaattaaaataactgagaataccctaacaataaactcagagccatgaatttcctatttttcccttaaatcacaggcttaaacatctcagatctgtttataataacagcaatagaaggactgggtctaagccctgcacttcaaagtttttagtatcaaagaccacctataataaccacccccagccccaaagcttagggaactgggacgacgactcttcataacttcttcaagctgaatatgggcgttgagatatttttgaagggagggagaagttggttgaccttaagaaggccacaccaatgattgtattaagtctctgatgtctgtgtcctgactggatccagatgaaaaaaaaaaaaaaaaaccaagacattaggggtctaggcaggtcagttcagcatgtctgatgatgaaattcaccaaggctgtatattctgtaatatataaatctcaaaacaaaatattagtatcatcaagatagcctttttgtttgattctctggaatctagttctcagggtgtctccctctatcagatctgatccatataactctggaaggtgtaaataccttgatcaccttttccaaaaacacaaatacaaaaccttttcgccaagtcagcatagccttcagccggtaaccagggaaacctgtagcttgccctctgccccagaggaacaataaaacaaccacattactcaaaatcacacacattttaccctatttaggcctttctaatttgtcatgtcaggatttaaacccaaaattcctgtggagcccatgttagacagaatatgagtatcctgtaagacctactagagtaatatatctttacgtcattgttaagtatcaaaaggttatatttctcacttttttatcaatgaattacctggtccggagtcctttgtacctttgtcttccaattctttatggacagggagaagctgagtgtaaaaagatgctcattgtctgtgtccctgtttggaggtggagagcaaaggatacagggaagcaaatacagaaagactctctcgggcatagatgcctctctgccgttctctgtaggtccctcaaacccagtcagctttgaatccatactgctacagcctaggtcactgcccaagcctcattcaaggtttggggactggggtgggcagcaaatttttatctcaggttagttaaattcaagtcaatacgttgggcgccattttgttgcagtaaatctctccaccctaattatgccccggcaatgaaaacacaacacagttaatatgaatacatgctgtgcgcctagattgggcagatctactgctacactaccatcttccccagctatgagaccccttagaacttgcagtttctccaggccatgtgcttctgctccacttttcttcttcttcctcttcctcttcctcttcatcctctccctcttccattttctccttctctctttcactttctgctccaccttcctttttatctgccaaatcatcagctctcctttattttacaatttaaggtgggaagcagatttacaggaaatcacctgagcgctgactcattccttgttcgcagccactcacaggagaacggaattaagatcaaatataattagctatccatagcagactcctcccactggctgctcctccataggccctgggctcaattcccagcacccatgtggcagcacacaactagacccacacacagacacacatgcaggcaaaacaccaatgcaaataaaataaaaataggaagaaaaaaaggaagaaagaatgtgacatcaacaaatattagctaagatgtagggagaaagaagctattatgcactgcttatagagatgttaactaaatgccactctagaaattaagttttgacatgggagagcaattagaagggacagagttttgtttggttagtttgggtttttgtttttgttttgtttgttttgttttttgatgcagggtctctctgtgtagccctagctggcttggaactcactctgtagaccaggctggccttgaactcaaagatcagccaccaccttaggacagagtagtctatcagaaacaacatgatgggaccttaaaggaagtgggggtggggtgggggnnnnnnnnnnnnnnnnnnnnnnnnnnnnnnntggtatggatgtgggggggggagagaacttagaagtactaaagaggtgggagccccccacccacactgaggagcctggtacagagccttgctttggctcaagggcaatttcaggacaggcatcggaccatttgcccctgtgagctgaatagtagggactaggaagcacatttgagaccctgccccagtgtagaaggatgccagggtggggaggcgggagtgggtgggcaggtgggggaacaccttcatagaagcaggggaagagggctgggatagtggggttcgaggggggacaggaaaggggataacatttgaaatgtaaataaagaaaatatccaataaaaaaaagtttaaaaacaaaacaaagttcctgttccctgcagaagacagagaccagttgctgcaggggaagatgctgtaggggagtctgtggtccagctctactacccctggggtagatccaaagaacagtaagtcagcacactgtagacacttgcttctccatgttgttgcaacatcttcaccatagctaagggcagagccacccattaacagaagaacgtataagaacgcatggcacttatatacaagggagtcttattcagaccacacagaagaaattttgttacttgcaggaaaataggtagccatggagactgtcatgttaaagctaccatggtgagtttatgatcagcctgagatacatgaaactttgtctcaaaaactatatattttcatctttgcagaaagaccgtttttcttgtatttttgatatatacattattattttcaaacatgaagaattttaaaatagtggttcaataacatttagcacaatatcgtgcaaacatagcctcttctagtttcaaaatatgtcaccaccgcctcccccccaaaaaaactatttccattaagaacaccccacccccagactccacaagtacaaaaatacctcttcctgtagacttcctggttctaggcaggctacccagacacagctgcacaccaagagacccatgtctgtctcctgtcactggacctcaagttcttagctctcgcccttgcagcgactaagtcttcagccccagattgtactctgtggtgtggacgaaccatgtactattaacccgttcatcggctcctggctctttgggttgtttcccccttttgacagttttaagcccctctgaacattcatgcacagttacttgtctgagcataaggtttgaatcatcaggaatacatgaagtgctggagttgctcatggctctggtcatggagcctccttccttccttccttccttccttccttcttctatccctccctcccttcttctatccctccctcccttccttccttccttccttctatccctccctcccttcctccctcccttcttccttccttccttccttccttccttccttccttccttcctcccttccttctttctttctttttaaaatttcagtgattatttttcatatttaaagttccctttagaagctcagtgattaagatctccaatgcctcttcaagaggacctgagttcaattcccagcagccatgctggcagctcacaactgcatttaactccagttccaggggatgtattaccctctcatggactctcaagaaaactgcactcacagacacactcctgcagacacacatacacacatgttatttaaaagataataaagatctttaagttccctttagttcttttgaagtcagtcccgtttttgaatatttttagctattttgtttgtttgtttctgagacacggtctcactacatagcccttgttggctatgtagcaccgtggccagcttgcttcttggtatataataatttctaattgacatttttcccttagtggcacaggccaggaagtctttgtcagtgggtaaataacatttgtgcttttactctataaataattatcactagagaagacttccaagaccccatgtacaaatgggattccttgttccaaggtgggatccatgcctactgtggtttcctttgatttctggagtccatgtaagcaggcagacttcccttctgccctcctgggtatccataggatgcctatcctcatatactacccctgagagttaatgcctccccacagccttggggtctcttccatgcttacattatcttgtcagattctctttcctggtattcagcagccattggtaagtgttaatgttggagcacgggtgtccctaaagtctgttttattgtcaagatcgctgcgatgttaaagctacattaaagccttatgggtactcttggagttcctttgaaagcattgcccccaccttgggcactgaggactacctttgccatagcagatatcatgtggcttctgcactggtgacagcttccctgacttgcccctaagtgttcagctccagcttgtggacacaatgaggcttttcttacagaaggcatttcatggaggtaggtggcatcagaaatccagatgaagaaatgcttttccaggtaagaattccaggctttgccaagtcctgaaaggcagtcagagatcagaaatgtgagagaggcagtgagtgaccctgggaagctagacagtggcacaaggcccgggtaccattcaaggtgtctctttgatatttatctccacccgggagccctctactgcaatcattggctcagggcaagtttttggcctagacttggctgccagtggggctctgggaaatccaccagagactatgtagtgcctcattagaacagagtaaggagacttctgagccaggaggaggcatgtgtccttcacagcagttttaggaaccatgttaagctgtttctgttctgggtattagagtggcctttctccagcttctcccctccctgtgtcctgagtaacttacccatgggctaatagctccccatagtagggatttaccttggcctgcagtagggatatagagaccccttgctctctgcagcccagggccctgaatggctgtcccaccatcctctaaggtggtgtatggataaaagcccaaggtacagctgaaggaacagtttacctctgcattaggtaagaccaaaaaccgtgtgtcttctgcaaactatcccctatgtgtagctggggtttgaaacgaatttacccagacgtatgcccagtgcctaggcatgggctttgttcttggtacattcagcatcaatgtgttgggtgtgcaggtagaattgaacacatatgcaaggccaacctgacaggccagcccagagcaatctctctctgagcttttccttctcataagcaagaaggtagtagctgttgcttaccttgcccctcggtcctccctccctagaaggtgaagccacacccgctctggcagagctgggttgcagcatgcaggtccctgctgctggtctcagacctcagaacaagtagctgctgctcctgtcttggaagcactgacaccctccctgggtctgaccggcaagttctgaggcactcagagacacccttccctccttatatcctgtggagctgccttgggtttctggtagggtgtggtcagttctgtgtcggtaaatatgtctacatccacatatcttgcaattctgtgggatgatctaccagaagctgccacggctcaaagtaatcttggcagtgggtgtccacagtgataaaggtacaaccaagatgtctgtacaacaccagctgactacatagaccctactgtataggaccacactggcagctgctttacattgctgcttggttcttctatgcaaatggaagccagtggcctaattattctcaattctcagatctacaggtagggatttgggtcagtgacaggcggtttcaactcaggttctggtagctctgtttactctccctttatcagtctgggtattgtggatccaggtatggctggcacatagtgatttataactctgtggctatctatcactgcccctcagacaagttcagccctttgtctaccttagaccaagctcctatctttatgggaacaatgtgtgtgaacaatggccagggcccaggaccttggggctcagaggagcagcatgaaaagtcacgggtggtggctgaatagtgacaattaccttctgaatagataaagttttaaaacctctgtgcaggtggggaagattgggaggggcctctgaggagggggacaaagtgacaatcaggttttgtgactcttcagctccaggaggaagcctggcagggttggctacactgatgagcctctggccagatggttggatatgacttagagtaggcaggactggtagccaggggctccctcgaggcttctgtagcctgggagccgaagtgttggctgaagccacagccacacttacagtcaggacaggaggggaagtgagtcactcccttgccattccctagtgttctgaaccccttgccaggctaaccagcactccactgtcctctaaggtagacaatacctacaagtccctctgcctgtgagcttgactctcagcatcctgagggctgtgtagcctacttaccttcccacattctatctactggcccaggccagaggatctgaaccctcagcccaggcctgccccgagctccaagcctctccccgagctaagtcccacatcctcatgggctctggacagtgtctcactggaagctgggttttgggcagtcatgcatatctgcagaccatgtagtcaacgtcctcccagagagctccccaaggctgttggggtcacactctggagctcctgtcagcccaccaagaggactctccatgcctctcatagccttcaggaaagggggctgggacactttttctgcctcttggtgtgtgtgttcagtaggacaggcagaagccagaaagaggctgtttgtagtcccatatagggctgtatggggctgtgggccttccagagttagggcctcagagactgggctcagaagcccctcatagtactttatctgagaaaaggtatcaaagtgtagatcccaccccaatgtcactccccagaactctgttcattgcatgcccagaggagcccttctgagattgcctcctagcccctctcagctctggcgggccaatcttgccgatgagctccagcaagactgtgtagcacgtggcaaacatccctaagctggcaggccactctcctgccctttgtccatttgtcagttgatcaatctgtctgtttgctgagtatgtaggcaggcaccccagacagaaacacttaaatggctgagaccgctcagcctgtgctgcccggataccctagggcaggagtctccggaggagaacttgtgtgctgttggcattatagtttctgggttaactttgctagcactgacatctttggtgcaggcccagaaggttgtaagagtctagtcctaaagttctgtattcagagtcccagacccagctaggaggcccaggctgtgaccagatctgcatgaggtgcctggagaaggaggggcttccagtcactgcacaactagagttctgtcatgcagcctaagagatacagaccccagctcatggctagaggatgcctcaagtggactctggcccacacatgcctgctgaactcaatgaggccatcactcattccagcatcatgacttccaccctgttgccattgagagtcaaagatgagcactcgttagggacagaacagtgctctggaggcctccactcctacagctgtgatttaggtatttgtcaccagaagccagccacctaagccccgtagaccttggttggccctgggagaaggccatgtgtcagcagtaccacgactcacatagcttcatttcctgtcacacctgcctctcaaaactattgaggggcacggagaaaccaagatggccacacagccaggaannnnnnnnnnnnnnnnnnnnnnnnnnnnnnnnnnnnnnnnnnnnnnnnnnnnnnnnnnnnnnnnnccccgcccgttcttaaggctgaatggcggctgtgcctggagagagtgctgcgaggcagaaggcaagctagtgtttcagcgtcttctgttacactgaagcttttcaaagagtgtctggggctgctgaatgtgcctctcttgctctccaaggcagacattctacacaaagggggctcttgtcctgcacaggccccttctgggaagaaaagccattgtccaggacagggccgcccagcaggcggtgcatgctccactgcccaccaccgcgcccgtccaaaggggcctcattcaagcttgtctgcctggattagcaaggactcacgactcaatgtgctgcgatatttcatgtcgagggcagcggctggctctgggcagaatcaatgcctgcttttgtctgccgagttattttatttacatttttaaaacagcttatcaaggtaaaaagatagctttgcaaaaaaaaaaaaaaaaaaagtgtttggcttcaggccagcacagaggtaggagtacgggctggcactggggtcctaggccagccatgcagtctggtcctaagccagcctgggcacctgcccagccctcctgcagttcaggggagtgggggagcaggggaaacttatacttccagaagccacaaccctagcccctctggatttcttgattgttttcctgaggttccctccgggctactctgacccagctggctgtacagctctgagtgtcccacctgggcagcagagggtcaggaaaggggtcctattacctccatctgttttcagcctagtcctgacctctccctcctgtggaaccgtatccaagcctttgtactggacaggcagggatcttcactgagagcctgggcttgccaggtcacccatgcactggtctatcatgatctcagagaagattcagcagaaatggccagagacccatcctaggctggtctgaccaaaataataggccacaaagatccctgaagctcaagctaggccaaagccagggcccttcctggaggaggtggctctgggttctgctgcctcccctcacccagcaagggcagctgacagtagctaaataggagtgggaaggcgtctctcttgccctagcccctgcccaggtaggctatgaaaataaaacaaacaaacaaacctcttccaaaacaccccactgcctctacagatccacactgtggataatgggacttcgaacctaggagtgctggctgcacaccaggccacctggccactagagggcagcctaggtgcgtggggagagcctgcctggcatatataaactagcctagtgacccccatatagaaagcataaccgtgcacctctagctcccaggatgctcctggtcagcccatctacctaacagatgaggcttgagcctccacacttaagaagcacagcccacctgagacaagcctcccagacagggggtttgggtcccattaagagccgggcttagggaagactgaccatctggaacatcgctaggacactaacaatgcagttgaagttgtgggaagccccagacccttcacccactgcccctcaccatctcactcagacttccttctccctgagccacttggcagagagtctgaacccacagtcagaagagaatagcccagtccttggctcccctgtctctgatgaagccaggtcaggcccaggggagggaggggccttaggggactctgagtgggcctgatcctaacatgatgtgtgtatggggtgctgcacatccctagtttccctggatcctgcagcttctggaggatctgtgacccagaaggcccttgtgtgaagctgtaggtatctcctggtgatcacgttccgtcctcctctaagccctgcatgcagatcctaagactatcctcatattctgtatttctcttcaaaccatgcataccttccccctgccctgagatcatcccacgctctgtgccccatgggacctggtgaggccaagccccctggataagagccagctatggaggcattgggtcagcacagggaaagcccagcccggaccccttgggctagatgccgccaagcctttcccaggctgctattttgggctctctgagccttgggggtggggtgccagatagctttgctgctgctcatgctggttatttttgctcataatgggagtacgatatatggaaattattaatagcctccccggctacggtacgtgctggtactcagggccagcgtgtgctctgtcccgcggtgggaaggtctcgctgcacagcaggtttgggggaattgcctctcagctacacccaatccccatcaaatgcttcccaggctgcgagtaccattacctacaaagaagttggtctggttatctcaaataaccatggcaacctggggacagatctgaccacaggtctttacatttgaacttccttctacttcccaactccttggagctggatgagagtctaagggtgcccagtctctttagataaagctctgagggattacaggaagttgctgtgggcccccagatctccaaggcatgcggtgcaccttacccctctgctgcatgctggactggctatgttgaccttctagacctgtagaagctcctgcgagagatggggccactgtgcataggtcactgttgatctcttgtcccaactgcctgacccttgcaagccctgagccgaattctggggaactggggtaacagatgagttctcctgccatctcctccacccctcagagactagattatactgtaaaacatgaattcccagggtctcagcccagcaactacactgctggacataggaagctcctgagtatgtctgtagtgaccagcgacggtagagatgataggagcctttctgtagcactgtgccccgctcccgagcacgtgcaagcactatgtgttgccaggcaattgtgtagggcatgaagttgaagctgcagcccgggctggttattgaaaaggtaaaaatgtctttctcatgcaaatcatttaggttcaaacttggataaagctcaggtctccagaaacagagcttggtggggggtgggggagagtctctcaccaccaagctctaggctgccgccaagaccgagaaacgggagggcagagcccaggaggaggctgagaagtaccagccaatgcactgatcgaggcctgcaacatagtgtgcagaggccactaagctgacttcctgttgtagggaagccacaaccagacacagcagtgctggtcacctagagcctataatttagctgggcatggtgatgcacaactttaatcccagcacttgggaggcagaggcaggtgggtctctgagttcaaggccaccctagcctaaagatccagttccaggacagcctgggctgcacagagaaaccctgtgtgtgtatgcccatggctgctgctgagattttaagtgaggtgggctgggcttaagattgctcagtccagacctgcagacaccttggggcagatgatgtagtcttgaaagccattaggccatgcccaccagcacacacccacagtagctctgagggcatggcagtgctataggaggctgagggcatccaatggggcgtatccagaatgtgagatctaggcccgaaggctggggctctgtcccttgtgaactgagtagcctggcaaatgtatgtgtcacagctgtgaggggaaaggtgtcctggcagtcaaggaataccacaaagtcacactgcacaacaaacctcactcaagacatttattgggagggaaaataatggctggagggtggctgcctctgcttgggtgagaagcagcagagacctgggcagaagacaggatttgggggtggggggtgttcggggtggagatttccagggtgaagattggtgggatttcaagtccagaacttgggctgagaccagggattggtgggatttcaagtccagaacttgggctgagaccagggattggtgggatttcaagtccagaacttgggctgagaccagggattggtgggatttcaagtcctgagctttgtctttttactttatagggtggaggctgagtctagcagttaggccagttagagtgttctggaggttggagatcctcacgagaggagcctgcccactgatgtgcctcaaaggctttacactgtctccatggtctgaaggaagcaaacaggacccctctgcagagcccatggaaggggtccactgaggtcttagtcttggggaatagcccaagggtcctttgagacttctccagcagccaatgggtgcacttcgtcctctatacactttaaggaaatgtctcttagctgccagagcaactgctgtgttgtccccacctctgcccagcttggtgagcagagctggtagcacctgaggctctgaacatctccaattcttggtcatgggatgagcgggctcataatgaccacagggctctgaaagcatcggcctggagacaaggcccacacgtgcagttgtgcatgtgcagggtcacagacacttactggcttctgctatgagggcagtgcacaggttctttcaattttcaccatctgggtgggaggagggatgtggcactggccgtggccctgaggttgtgcttccctgcaaatgagcaccccacggctgctccatattaagcactatgcagctgtcttgccagagctctggagaaagctgctcaccctcatggattcctggtgtagcctggccttggcatcatgggcattgacaagtacaccccataaattctagcagctgatgctgggtggcctcttacgagctcaagatgagggcagcagacatttgtacactctcaccttgagctcctcatctctgtcagggccacagcagagagcatagacaagtagcttcttagagggatgagtgtgtgtgaaggagtccccattccacccagggcactgccagagcaggttggcatgttgatagccctggcactttctagtcctgccttcattcttgaagatcaagtgttctctgatacccagtatttgaagtcagtctagttgttcagcaaattgacagtgtgcccataggtgtggatttactggagttttgtgtgtgtgtgtgtgtgtgtgtgtgtgtgtgtgtgtgtgtgtgtgtgtatgtgagagagagagagagagagagagagagagagagagagagagaatatgagcatgaaggtactgtgtatatgtgcatgcatgagtctgagcatgtttgtgtgtggtagaacagtatatgtgcctctatgtgctagtgtgttaatatgcatgcatctagtgtaaatgtgtgtgtctatggcctgcgtacctgtgtgagtgtgtttacatgtgtgagtatgtgtctgtgtgaaggtgtatgcaggagaggaagctgaggtgccccctgagggttgctgcatctggagaagactatcccaccatgttctcattgctggcctaggtgagtagtgcataggtctgaagtgccatgactgtgtgtcaggcagcagtggtgagacacccgtctcaagcctatgcagcaacttacttaaaaggaaggaagtcggaccccgcatcagacctccttagacctgttcttgatgaccttcctccttaggattggtgtgcagtgatgatagtcacttctaagtttctgcatcctaagaatggggcactatagttgcctacagagtggctacgattgatatggaggagacaaagcacgcagggccagcctgaggcaggcagatagtcggctgccctggctaacttaccatattaaacaagccaacagaaagtacaaagctagggaaggagcctgctgctgatcagctggaaccagagcttctgtggagagaggggatacaggtctgcaaattgggcacacggggagatttaattatagatgctggttgcgttaacgacttaacatttttccctagctttgttcccccagaagactagatacaaggacatcccatagtgacaagtgggcctagcaactgatctgggtttctgaatgctagttaccagtaaaagaaacagggactctgttgaatagactgaatatcaaagtggtggtgctttgaacatttaaaactacatgaaacgatggtggtgtgcaagggaaatgcaaagtgccttatgacatgtctcagatgaatgaaaaggcatgaccaggcactgtgttctctctgactcccaaggaagcaattgattcaggaacaaattgttaaggaaaaaaatccaaattactaatacagggttagagaagagagggatggtggctggaatgatggtgcggtcatcctttgctgcttaattaaaaagcatttgacagaagagattgaatatttaaaagacagttggccgggtaaatgttgagcagttctgtttgttaaatgaatggaatctgtattttaaccttttgtctgcatcaaagggagacacagtctacactaagatggcgtggattctttctaatatttaaaaagagaaatcacaccaattttaggtaggatttttaagagtttgaaaggatacaattttactttgctttattcagccaccaaaacttcttaaagatcagtttatttcatgaatataaatgccaaaatactgaccaaaagagctggagctcatacagggctttcatgaggccctaaagccaaattccagtatttctaagaaaaaaaaattacaattgaataaaaaaatagcaaacaggtcaactaacaactaacacattaaagagatcagcacagaacaagaagagaaactcacatctaaaatgtttgccaaagacaggagctgatacaagaccatcattcaaaatatacaaagatctcttacaacccaacatgacttaaagctgaacaaaaaacaaagggcagtcacctcaccaaagcatgataataagatgataagcagggaaatataaacattagagaattacaaattaaaacaacaagacagtactgcacgtgactgaataacagaaatcatagggttaaccctgtgtgaataagtcagggttctctagcatagcagaacttagagaatctctctctctctctctctctctctctctctctccctctctctctctttcctgctctaatatatataagatttattagaaggagttgcagactgacaggctgtggtccagctaatccaaaaatggtgcttatcaatggaaggctcaagaacccagcagttgttcagtctgtgaggctggatgtctcagctggtcttcggtatataccagaatcccagagaagtaggccctaatgccagggaaggagtggacttgctagcgaggcaaggccaaaaaggcaatgggtgaagcttccttccatgtgctttgtataggcttctagcagaaggtgtggtccaaatgagaggtgggccttcactgctcaaagacctggattatgggtgaaatcctcctacttcaaattaagcgagaaaccctcacaggtgtgtccctccactttggggtattagttaattccagatgtagtaaagttgacaaccaagaataaccatcacattatggctgccaacaaaaaatgcaacagcaggaacttgcactctgttggcaggaaaatagactcatacagccacttggggaaacacttccatttccctgtaaccaacccaatgtgctaacttgccttaaccagaacattaacttggagctgccaagatgtcctctggtggagcatggtctatcagaagggtagactacttagtggtgaaaagaaaagggagaaacagcaaggcagtggtggctcacaccttgaatcccagcacttgggaggcagaggcaggtggatttctgagttcgaggccagcctggtctacagagtgagttccaggacagccaaggctacacagagaaaccctgtctcgggggaaaaaggggggggggtgggaaggaactccagacagatgctgctacacttgctggtaagacttaagcccaataactcaggggccagcctgggtaacagaacggggcctgaatctcattttttaaaggagttatcaagatcaaaagcccctgaaagaaacaagtacatgctgctaactgaaagaagccaatctgaaaggctgagtgctttctttattttaaccaggggaccttctggaaaaagaaaagctaggggcagataggaaggctaatggtggtttcttcaaagcataaacaccttatttatgcttgtttctagaattctgatggctttagatttttcatttttaggtaattttcatattctggatgaggcacgggtctgattgttcttatgatgtgtctctgatttctctcccaatgaattgcttttgtgagacactagaggcctatgggtggattaatccattaatgggctcatgacttgaaggacttttggaactggtgggaaactgaaagacaggacccagctaaaggaaatgggtccttgggacctaggtatcttgttgttagatggttcgttcactcccttttcttctctgctagtcaccatgaagaacatctctgctacccatgccatcctcatcataatgtcctgtgtcttagtcagagtctctgttcttgcacaaacatcatgaccaagaagcaagttggggaggaaaaggtttgttcggcttacacttctatattgctgttcatcaccaaggaagtcaggactggaactcaggcaggtcaggaagcaggagctgatgcagaggccatggaaggatgttacttactggcttgctcccctagcttgctcagcctgctttcttatagaacccaggactaccagcccagagatggcaccacccacaaggggccctcccctcttgatcactaattgagaaaacgccttataactggatctcatggaggcattttctcaactgaagctcctttctctgtgataactccagcttgtatcaagttgacacaaaaccagccagtacaccctgcctttcacagttccacagcaatgggtcacacagcctctgacatcatgagccaaagtgagtctttaacccttttaaattgtttcaccatagccagagaaaactgcctagtcaatcctcaatttttaatttcctgagattgtgtaaaatgttgtaattttaattacaatgtgcaattttaaaaatattctggctattcaaggcttgctcgtttaatctggattgtcaaattcactaggtgttaagctctttataatgcaccttggagttttatttatttatttatttatttatttatttatttatttatttacagctgagtcctttctgggtagcctaggctgacctgaaacttactaatctccaagccctaggattatagatgtgcactggcacacctggccttcttgaaccttctgtcaccggcaggatctgtacggatgtccctttctcactcccagtgtttgaaattggtgttcatgtgttgtcacacaatgctttggttgagtcatttctagccccatttctgtggactttctttcccttttcttcacgccttatatttctactggaggacagacaccataaattttgcctttagggcacttgatatttttaaatgtttatttattaaatgttatgtatgtgcatgcagcaccctcagaggtccagagtagtatcagatctcttggagctagaactgtggacagcgtgaggcgatgagaactgaaccctggttccctgcaacaactcagccatctctgcaactggggcttgagaattttgtctgttttgttttgttttgttttgtttttgttttgttttgtttttgaaacagggtctgtctgtgcagccctggccagcctggaactcattctgtagctcagaccagcctcaaactcaatgtgcctgcctctgcctcccaagtgctaggattgaaagtgtgtgcaaacatacccaaaagcttgagggtttagcatcatatttttattgatttatttttattgggaatctcacatcatgcacccaaccatgctcaccttccagtccttccatatctgttccttctccctgtgacctccccccaccaaaataataaaaaaaagaaagaggaggcggaagaggagaaggaggagaaatgggagaaaagaagaaacgattccattttgtgttgtctacatgatcactggagcatgcttaaactcccagtgtccagttccctgctgggaagctgagtcgttctccacctgcacccctgccagacgccatcaagtgtggatagccacacctcagcatccccaacatgattatttttagttctcctttgtggcttcctctctaggatgtcaatttggggagtgggagtgagggtggagggttgtcacagaagtcttttatgtccctctttttcaactgcatctgcagtcactgctccctcacccttcacagtcagagggagcatgaatccagggcttctacatggtttccagcaacagtacagaccacaaacatccacttagtctccagccacagaaccaaggacctctgcctggtctcccgtgcagtatggcctgcagacatcatcattgccctctgttgaatcacaggccactgacctgagtggtctccaggagaagcacagaccatggaggtcttctgaggaggtctaactcagcaaatggaccactcttcatctcaaaacttctgccaccaccgctcagagccagggtgatcttggggctgagtccatgcaggcttcaggttgctgcatgtcatcctaccaaccccactgggcaacgacctgccccctccattaacccgagccctctctcacatctgccacagctgtcacatctcttctgcacatacactgttctgctcttccatcttctccacctctccatcatatattcacttgttgtagtcacactggaagctgtggtgtgtcacacagtacacccttttactcaaacatgcaatgttcattgtaaggagttgttggtctgatttaaggcccctggccactgctacaccatactagaccctcggagagactcctctcagatagcctgtcattgcccagagccatggacatcctactgctctgattctacaagactgagcccctcgtgtatatcagcaactcatagatgttagggttggcaactccaaaccctgggtctgggtctaggtggtagctgagttggtcagcccagtgttacatcagggatgggggtgggggaacttgaaagttttatttctctagacactaactttacttttcttctttccttcctccttcctttcctcccttcttctctttctttttaaagacatggtctcactgtgtagccctggctggcctagaactagacatacagaccaggctagcctagaattagatatacagacaaggctggcctggaactctgagatccacctacttctgcctcttgagttctagaattaaagatttacactgccatgtccagttagaaaaactcatgagttttgaacctgtgtgtatgttgctcaaagtagttcgactattccttggctttctgttggctttatttgctatgggcagagcattgttgaatagaccatttctgagtcaagaggcttcttggatctgtaatcaatgctctacgaattatgaaaatttttttctaaatactggctcttagggacacaatattctaagtttgtctttgtttgttttgtgtttggaagctggtaactttccctgtggtcttcttttctagctttagagtttcctcacatgaatgctctagttggtattcaagttcattcttgagagaaccctctgcagatgtttgggacatctctggcacttcgtcctcctctactctgagcaagagctctgatgaaggaagaggcgggtgctccattgtgtgtggggggggggggggttgaggcaccactgttacaagccgcttgctgcccttatctgaggactgtctctgcaaagctagtggccattttccaagttgtttcaggctagaggacacgcttggtcctgatatgcaggcatagcatctgtggaaataaaaaatgatagcatttaccctaactttacacaataatgactgggggcccgccctggtgcacaaagcaaaagaaatttaaaaaaataaagattggtgaggggaaatagatgttttttcagaaggtatgattttatatgtagggaagaaaatctacagataatattttagaattaataaataaatcttcaagatgactggctgtaaagctaatatataaaaatcagctggccgtgctgctgcacagctttaatcccagcactccggaggcagaggtaagtggatttctgtgagttcaaggccagcctggtctacaatatacacaatagttgtttcttttctcgtggaatatacctataataccagtacttaggaggctgaagcaggaggactgctgagcatttgagaccagtttaggctgcacaatgagtgctaataacccagcttgaactacataggaaaatgctgtgctgacgagttctatgtcagcttgatacaaactgaagtcatgtgagaggaggaacctcaattaagaaaatgtaggctgggctgcagagatggctcagtggttaagagcgctgactgctcttccagaagtcctgagttcaattcccagcaaccacatggtggctcacaaccatgggatctgatgccctcttctggtgtgtctgaagacagtgacaatgtactcacatacacaaaataaatacatctttaaaatgaaaaaagaaaaagaaaatgtaggccagcctgtagggcatttttttaaactagtgattgaggggagagggcccagcccattgtgggtgtggcaatccctgggctggtggtcctggattctataagaaagcaagctgagcaagttatgaggatcaatccaataagcagcaccctctatggcctctgcatgctcctgctccaggtttctgccctgcttgagtttctgtcctgacttctttcgataatgaagtgatactgagcagaagccaataacccttttccttcctaggttgctttggccatagtgtttcatcacggcaacagaaatcctaaaacagcatgaaaaagggccagagaggtggctcagcagttatgacttgggatgactctctcagaggacccaggttcaagtcttagcactgttgttagagggctcacaaccaaagagcttgaactccagttctgctggtattcaatgccctcggcctccagggcacttgaactaacacgcacaagcccagacacagacacctacaagtacagacagttaataaaaacagagctggatgtggtggtgaatgcccttaatcacaggagtagggatgcagaggcaggcagatctctgggagtttcaaggccagcctagtctacacacagggttccaggataggcagggctacatagagagacactatctcaaaaaaaaaaaaaaaagtaataaaaacaaatctttttaaaggcacgaagaataacataagagattggcaatttttattttatttatttattttactttttaaggtaaagtcttattgtgcatccctggctggcctggaactcactatgttgaccagctagccttgaactcacaaagatgctcctgcttctgcctcctaaattctgggagtaaaggtggcggaggtgacttccagagccactttgtacagtctcaacagctgtccccagctttagggagagtgtgttctctgcccaaacctgtgtgtcgccaagatgagggactcacactgtcaacttgtgcccgtggctctcacagacaatcgttgaaggccctcaggctaacctttgggttcatgtgtggtcaggaagacactgaaatgtcacaannnnnnnnnnnnnnnnnnnnttgtcaaatttaacttcagtgacaaaagactctcacatgtccacagaaataggatggagggctggagagatggctccagaggtcctgagttcaattcccagcaaccatatggtgactcacaaacatctgtaatgaggtccggcgccctcttctggtgtgtctgaagagaacaatggtggtgtacgcatatgcataaaataaatgattgaatcttttaagaaaaaaaagaaagaaaaaaggaaggatggaagaaatcggatggtgaggacactgcagtcacagggttataaaggactgagcatggtcacttgtagtcacaggatggatggcacagataagcgctgcatttggacattggaaattttgtggtgctggaatgctggggggttgaataggcatggcccctgtagactcacgtgtttgaattcgtggccatagggagtgacacgataaagaggtgtggccttgctggaggaagtgcttcactgtgtagacaagctttgagattacatatgctcaaactatgcccagggtggcacacagtctccttctgttgcctgcagatctcagctccttctccagcaccatgtctgcctgtgtgcccatgcttcccaccatgatgataacagtgtcaacctccaaactgtaaactcaatcaaatgtttgcctttataagagttgccgtggtcgtgtcgtctcttcacagcagtaaaaccctaactaggatcgatgttctatattgagatagtaaattcacaagtgcatagacacttgtattttgtgtaccttaccatggaccagttgtgtcccaacagataatttatcttaaaaaatggtgcttaagtcctaaagaactgattggaaaacaacatttattgcctctactttaaagtgaagaaaaattcttttttgctgttattgtttttgttttttgctttttgtttttcaagacaaggtttctctctgtagccctggctgtcctggaactcactctgtagaccaggctggccttgaactcaaaaatccatgggcctctgccttccaagtgctaggatcaaaggcgtgtaccaccactgcccgggatgaagaaaaattctaagacgggagtgatagtgacagccattaggaggctggagacttggaagcaagaagtctggcattgacttcaaagactacatatgcaagaacatgtcaagacagccatggggcccaggaggactcaggaaccagaagccaggtttagttgttttcttttggtttttttttggggggggggggctgttattgtttgttttgttttgttgtttggttttggttttggttttgaacaaccagaatggaagcaagatcttgggtgaggtgacagaaaagctaggggtgaggctgggcacttacaaagaaaaagaagtgtcactcaagttagcgttgaaggctgaaatgacaagttccagcagccccattgtttctgcacctctctggggagggaagggttcctgcagtccacatcataacatcatagagaagcagacaggaaagcacagggccacacacacggtagctgtactacaactaactccatcccagagaccaagccgcactgtttttgaagatttatttatttttatgtacgtgtgctgtctgcatgtacacctgcatgccagcagagggcatcagatcacattacagatggttgtgagccatcatgtggttgctgggaatttaggacctctgggaaaacaaccagtatatccttaactgctaagccatctctccagccccaagccccacctctcaacagttccatacctcagcagagccactccagaatctaagattccagcacacatacccatcatccaaatcctagcaggctccatgctgaagagatgcccagtccccacccatcctccaggagggcagaaagctgacagacactgttgctcttgctgggccttgccttgcagagcaccagttgtcgtgcctcagggtcataggccaaccttatacgtactagcacagaccgctcaaactggagccagggaagcagaagaaaacagagacacaggaaatctctaaataaatattgctgtctttctcattggtattaaaaaaaaaaaaaaacaaaaaaacaaaaaacaaaacaaaaaaaaaaaaaaccccaaaggcttaacaaaatcaacttagaaaatcaacttgaagatgtcttctataaagtactataaaagaaaataagtaaattttttaaaattattattacaaattttgtcaagaaagccaaacatctagataatgatagccttagggaaaataagcagaaatcagtcacaggagaagagtgaggatcgtcagactggccctggaggagaggatgcagtagcccagcaaacaggcctgcctaggcatgacatcatgaactgtcttaacacgatgtggagagcttccaaagttccaaaagagcaggtcacaccaggggtcaagtgtagcagtggttctcactcccctgtcacatgggagcctgtgtccaggagctgccccgcactctggatctcagctccgtatccacagctccactgagcccacagagcagccggagagggagctacaccttggatggacaccacagcccagacactgcatataagatatgtctaaaggctttgttttaccataacctgagagatgaagccgcgtttgcaggaagatgggccattcttggtggactgagaaaaacctcacgtcagaaataattagctcggaggatgtggctgggttgtgtgccacacgttcgcactcacagtgtgatgctttaacttggacctctcctgctatttattacttttgggccattcaaacctcctgagagtgaccacactgggtgcatgctctctccaagttgacctgcactggctgggtcttgggaagggggagggagtacagttctgtagaattcctggtcatgagcgtgactttgaggaaagtaaaaaccttaaaatatagtaacttgacatcagcaacagacaggcaagactctctccctacagcagtatcccaggatgacctctgtgagactagaaaggctgagccccaaagtcctcatttggcatctgcagcagcaatgccacatggccccccagtgttttcagggaaggggtttggagggatgctgtactggctagttttgtgtcaacttgatttatcacagagaaaggagtttcagttgaggaaatgcctccatgagatccagctaataggcattttctcaattaatgatcaagggggaaaggccccttgtgggtggtgccatccctggggtggttgacttgggttctataagagagcaggctgagcaaaccaggaaaagcaagccagtaaggaacatccctccatggcctctgcatcagctcctgcttcctgccctgcttgagttccagtcctgacttccttggtgatgaacagcagtatggaagtgtaagctgaataaaccctttcctccccaacttgcttcttggtcatgatgtttgtgcaggaatagaaaccctgactaagacagatgccctcaaccctgccctgcaaagagcccagggcactggggcatgctctgtatgctctgtgctccccagccctgtcgccaccgtctgcttctgaaggcccgagattttccagccaggccagcaggctctgacatctgcagaactgagtgaatgaccttagctttgagttttctcttctccactgagtatctcctctcccctccttcttctttcatacctccagaagttgttgccaggttttgagcaccaactagaggtttgtacctgacctaaaggatcaaccggctctgtgtcctcagccactggtaatagtctaaaaagctggcacagttgtggggctgggaggaggaggaggcagagacacctgaggctgctctagggaaatctaggcacagccttgctgtgaactgccatcctggtacccacagctacccaatcccctcctgacagccttgcctctggccccttctccaagtagtgtacatcctatcagaccctcagacgacatcctgcagtctggagttgggggtcgaggctggaagcaagggcagaatcttgggggggcctctgggtaagtgagtgccaaccatcgtgtgaagacagctggccacagcaccaagaggtaaggggtgggggtggctgggggttgcaatgatgtgcttgttctccatgctctccctgaggaagacaggagtgagtcagagtgaagcaagtgtctatacataaacatcaggccttgatgtttgctctgaggcctgatccaggcatagtagaaagtactcacccactgctgagtgctttctacggaggaatcactgttttatgggagaaggcagcaagcagaagtcatgccacaatgtcaggaaggccctgccctgaaaagagacataaaatcccttagcagggctgctgcccccaggtcaccgtttgagagctaaaggaagggcctctgctgtgcacataacacatggcctgtctgaaggagaagctggggtgggcttccgggaaggcaaagcaggactctgcctctgagattagtgggactgagccaggagagagagcttggagagattgtatagcccagagtagacgttggaagacacatgcctctgctgcccctcctgtctttgctcacaggaggacagggacctgttttgggtgtcccaaagtcccctgcctctctttccacactttgtcccaatgtcatttctcagcagtgcctaggggtacctgtgctacaagtagttcacagaggtgtatgtattggtgcctgggctagttggtaatcagtacgcggtagcctccactagcagctgagccctaccacctcttatggcctcaggtagacaccgagtaccactgaaggccaacactcatgcaccaccacatgaggtgcctgcctgagagaggctgcatcttacctcacccataggcatccactcacggcagccctaggcataggctggacctgggcacttctgcccatctgctaggctgatatctgcctggcctccacaccaggaagctgaacctctaaggtcaacatgttagctgcccatgatgggccagaggggcatgtgggccactgtgccaaagacatggttctatgtaggggaccagatgcaggcctgtgatgagggcagctcagctcacagcttcagaaaagcatgtgttaagatctggactgaccacatgctgaagagttatcccaggttgtacataccgcactgcttcgaagctctggccaattcctctgaggcctagagcaatcctggaggaggtgttttcctgtgtgtgctgtgtgtcttccataagcatcaggtgaagtgcacatgctggtccagagagctttcccgatgctcacagtccaatggagactctatagctgcagggctggtgtgaaaccatgaagggtgcaaaggagagacaggacaggtatatgcacacacatcttccaagagcagccgctttgtatggatgtgtctgtgttgtaatttaatccattcttaggtgtgcaggtggtcctggagtcagatcccagagttgtctcacgagtgcaaagctgtccttagtctccagctacaacatcctgggagaatggaagagttcttgagctcttgatgtgacacacacaggaggatggctgaccagtgacactagccctccacccccacctggcagagggtggcatccagccagggcagcagcaagccactgggaaggagagacagtgaatcaacagagaggaatgcacagcccttgggtgaggtccggaaggctagtccccccctgggtgccaaggccgagctggccggaagggcagcggatatcctgaagaatgtggaggagtttccacatattgtcgtccacatgggaacccatggccaaggggaaacagacacctcaggatgcagggggcactgaagccatctgggcaggcagcccggtggaggccagcatgatctccttgagggacatggaggtcatggaggccagaggttatgagggcagggagttgtgactattggggatccccacacttaagtcatcctgtggcttcatggacttgaacttttacagtgtctgttccttgatgaaacccatgatgcccaactgtacccttgtcctagatttcccaaagatctgaggggtcctgctagggtcatagacactcctgttcctgtactgtgcacaaggtgctggaatagagtagccaaattgggaggactcagctcatgaggagaaggtcactactgtgctggtgctgagtcctactctctggcccaaccacaagctacctgaacactcttggtctccccctgatcagagagatcacagaggataaagaaggggaaagtccagcatattgtctacagggcaagggtcagagaaaagaaaagcaggggacaccttgaaaaaaaaaaaaaaaaaaacaggaaacggataggaaagttctgaccagacaaaagggctgatgaacatccctagccacatagccgtatagagttacagcttaagagatgcagacaggcctgggtagaggtggctgcatggcaacctggtctctcaggatcttcggacaggagaggtcactgtggacatgcaaggcttagccagagctgctgagatcagctgagcccccctctccccagggctacgtaattcctcatcgatgaccctcacaggacctggtaaagcagagactctggcttcccagtgcgcccaggatttctcactacccaaacagtagctgccagttgtggtatctgagaaactgaaccaactcaggctccaagggaggtgagcaccttgcctcagggtgaagttctgcttggggtggtgacaacaaatggcacaatctgccacctatctggataggatgtgtcctatggtcagatccatggccaggctgggacctaccccagagcattagatgtctcatagtcatagatggccaactgtgctccccactaccagccctaaggagaagcccaagaagacagaccttgtgagtcccctctgtcaacaagccaaaagcatgccactgtcccaggacacgtgggagacatgacacatgttaaggtacaggacaagaatgtccccagtcctgctccttttagggtaacccaaactgattcaaacctgaagaagctgcagaatatgaagaagggttactagcagctgcccatctagcatctacttcctggccccctgggagggcgtggccaagcgtcaggctacactgctacagatgggtaccttggttaggactgtggacatgctacccactagcaactctgtcttagcgggtggtatttgtagaccaggccagacctctataccatgcacagcatacctcactctctgacctctacctccagaccccctgtgagggtgacatgttccctatgacaataatagagaccctctgaggctgacaaggcacctggacttcttgagtaccagtgcttataaaccattatgacagactgcaaaaggtgcctgtattagtctttttattgatgggaccaaatacctgacaagtgcaacttaaggagagaaaggctcattttagctcacagacagagggtacagttcattatgccagcaaagacatgacaggcagagtatggggagaacggccaacgcatccacaatcaggaagcagagaggtgggcgctggtgctcaggctcactcttttttccctcagtccaggacctctgctcatggggcgatgccacacacagtcaggatgagtctcccattgcagttagcctagtctaaaaactatctcatagacatgcctagaggtttgtaccctagtgatgcatgatcgcgagaaggtgactgtatcagtcatcacagtgcccaacgcctccttgctcccctgctggggcctgagatgcctatggacagacagacaagcacctcctacattctggccacacagctaggaaggctgcctcttccagggccttgatccctctggctgctctgggtcatagtccttgctgatcagtgctacccctggccataatgtctgccattctctctccattatagcccgacaggattggtgtggactggagtggaagggatctccatttgctgtgctgggccagccttatgcatcctttctgtaagcagccaatgtgttctgttgggtgtgcctgaactctctccgacctggagggcagaacacaggctttctctaggctacagcttctctcagactactgtatcaccaaactaggtgagagcagctcctcagaccctgcccagctcacacctctacaccacaccctgcccagctcacacctctacaccacaccctgcccagctcacacctctacaccacaccctgcccagctcacacctctacaccacacccttccgctccacatgcacttaggaagcaccaggcaagctcatctgaatgccagattccctcaggcagatctgaagagactgggcaatgtcagccctgccctggccggcacagaaccgcagacccgggcagtgtagacccgctgctggtgcacaagtaggaaagcatccatgcttgcctaaccctgaaaccgtctccttgctgccaagtgtcccagaaagcaactggccaagtgggctctgtaggatgatctgtttgacccttcttccttggctggattaccatcaagttggccccccaaggggcagggcaaaatccacagaatttaaggaagaggtccctgctgcctgcacaacaccctcaaccctcctgatgtgaggcactctcttggctgtgtgctctgaacaggagccctagtaggccaggtatcttccctgaagggcctaggaagctggtgactggtggctgcagcctgtggcttacacacagccatcctcagtgtccccggcacctccttctgcaatggcagggtgaaggagatagggggttcactggcacaggaataggatgacacaggctggtgtggcaagccatcatccttcagggccagtgtcttaccccaacagggtttctttgacagatggggcacaacattgtctgtggataatggagactggagagccatgaggcctgaacctcctggtataacaagaacggggcaagcccttgagcaaagcacagcagctctccacttgtgaggaggagcttgtctatacgggtgtagtatggaggagcagggctgtaaccacacacacgcacacacacccacctccttaccttcttcacaggctagttgtatgtcaacttgacacagactagagtcatctgagaagagggagtcccaattgagaaatgattccataagactaggctgtaggcaagcctgtagaacattttcttaattagcgattgataggggtgacacccctgaggtcaggagttctataaaaaagaagctgagcgagccaataagcagcacctctccatggcctctacatccactcctgcctccaggttcctgccctgtttgagttcctatcctggtttcctctgatggtgatgacactgctgtagtgtgagccagataagcctttcctccccaagtcgctttggtcatggtgcttcatcagagcaatagtgaccttaactaaggcacctctccatacgctgcaactaaagctgtctctgcccacttggctgcagatgcctcctgctcagtgaaggtgcacccagccctgtgcagaaagcctgaccacttctgccactcatgggacctgggcaggagacacagggagagaccagcatcacaggatcccacaccacaggtggccgcaaccctccccaggaaggcaggtacttgaggctccttactcaggactcttggggaaaggagtcagagtctaagcctgggacacacagacatgaggcagcagcttttaccctagatcatggtaggtctttcctgaaggcagccgttgaatttctccctcccctccattacttcccactctgtgcacctacccaaggtcctctgtggagcattgtttgtttggcctgtgtttctgaattctggagttcataaagctggtgacactcttatgtaaacagagctgacctttcactacacaggtgactcatggctgggactttttgcagatgcctgtggccaccagggaagttgctatgtccaaggtccctgccagggccttccatgtaatatgtgacagcatgctctagggacttgcacagagccttgctgtcttgatgcaaacgtagatctgtttgctggacaacagtaaggtgcaccacagggcagctgaagtgagtgttgagaggggtcctgggtcattacgatatatgcctgcagccagcactacacctcctgctcgtccacagatcatccacagtaaggggctgcgaatgaagtaccagtggggaaccactgaccagggagaggctttccacctgaaatccagaagacgcagagggggctgtcactgatggcctgtgaacaacaaccatagcagacatcacagtgctgggcctgggctgctataacaaacttctgggcagtactctagctcaccccttagctctgtagcccagggcccaaggtcagcttctcagcagcacagtccctatgtcccagggatgacctagaagacagctgaggagcctctttcttcttgcctgttgaccttgcctcggtgggcacccatgttccttactcccaggttcctcctccaagtatcactccatgtacctgtccccgctctggacagtcaaaggcctcgtgtttgctccgatgaaggcctcgtgcaataccaagccaagcacatttcttggtgagcacaagaaatgatcacatggcaaaaactccagggcagcccgctcttccccagtaacctgctcttgaagaagctaatgggttccatgggaactacaccagtcccttccgtagctggttctctcacatctgactgcctccagcaggctctcctctcaagcccagaactttagcattgccacattagggaccaagcttccagctaatagatctttgggagcgtagacgtcatatgtagctttctgccaaaatcaggcgtcaaagcaataagagccttttccagaggcagagaggctagcgggctatggtgtagtgtggtgtagttgctattcctggttgtcaacttgactatatctggaatgaactacaatccagaattggaaggctcaccagtgatcctaatctgaaggctgggagatagaagttttctgacctggatcttggcatggagatcttgagacatagtggctatgaattccagattaagaaagggagatctctgagttcaaggtcatctggggttaaaggtgtggtggcacacacctttaatctgggtacaccttctgctggagaccttcataaggacattggaagaagaaagatttactctctccttttcctgcttgccttgtgggactgagcaactgctcgatccttggacttccattcacagctgctgctgaccttgttgggagttggactgcagactgtaagtcatcaacaggttccttattagagactacccataagttctgtgactctagagaaccctgactaatacatgtggtgaggtgtacattgatcaaacttggttgatcaataatctccagtgggtgcaggacatggtggtgcacggctttaatcccagcactttggaggcagaagcagatgggtccccatgggtttcaggccagcgtggtctacagagaaaattccaagccagcttgagctacacagtgagaccctgtctgaaaggaaaaaaaaaaaaaaaaaaaaaaaaaaaaagaaaaacaaagggaaaggaaaaaccccacccagtgggtatcaaagaagcagccttggatgtttaagtacctgctcctgcagacgctctcgtgggaatgacaagcttagatcctgagtgtgccatcctagccctaactccacatgaaggaactggccttgaagttaccttacctcagccaagcatggtgacaaataaatgtgaatctgaaaccagtctatgacctgagactctgtctcaaaattttccagctggacattttagcacatgtctgtaatcttagctctggggagtttagagacaagatcaggagctcagggtcagcactaggtaaatatgaagttcaaggccagcctggtctacatgagacctgtctcaataaacaaaccaaaagtaacttttcctttttgtagtgctgggaatcaaacccagggtctcatacctgcttgcaaacactgagctacatcccaggccttcagagtaatttctcttaagtgctgtgacagtatgcttgtctctagtgcctctagtcttggtcctcatcaggggatgacagggctcaattttaaaagagagagaggaaagtcctttgtcacttacagccattcctggctagtgtagaacagaaattaagttcatagttggcattagtaaactgtgttcccaggcatgctggttttattttactgcatgttgttgtgtctttccttgtttttgactttgtttgtcaattgtgacatttcagtgtcttcctgaccacacatgaacccaaaggttagcctgagggccttcaacgattgtctgtgagagccacgggcacaagttgacagtgtgagtccctcatcttggcgacacacaggtttgggcagagaacacactctccctaaagctggggacagctgttgagactgtacaaagtggctctggaagtcacctccgggagaagcaatgttctcatgaactgagtattttcagtctctactctgatgccatccaaacacatttagtaatctctgaaagactgtgttccatttgttgagatttttctcccaagaacttttttttccagtgcttttacatgcactccactgttcttgttttctgctcattgcagagctgtggctatctcctctgtgacccactcatgcccactggcttcagggaaagttccctagctcattggagtacctccatgaagaggtattatctacaaagttaggctttttcctttttgtccagtcctatcttctactgtttttcttatctcgcaacattggtgaagatctcagcagggctgacggtgctgtctcttcactcctgattaggaaaaaatattttttggaggcctggcgatggcaaatgctctgggcttggtgttggtgtcgagtaacaggtactcagctctctgccccttgcgagtcactgttgtcaatttataatcttcctggaagatgtcagtcatgtcacacccagagggacagggtcactgagcttgttggccctgcttcaggatctgtagcacttcacgggtcctcttttctcgttcttgctcttgcttacctctcctctttttttttttaatccaaagaaggatcatttaaacaccttgtttgtttgtttgtttgtttgagacagggtttctctgtatagctctggctgtcctggaactcactttgtagaccagactggcctcgaactcagaaatccacctgcctctgccttccgagtgctggggattaaaggtgtggcgcaccactgcccggcttttttttttccccctattttctgcacattccagttttggcttttatttaacattgactattcaaaactctggaactaccacatgtttataatccagaagatgtacttttacattagtgtctggtaaagagagatttaaaatgtgtattttaacacagcattgagcagagagcattttatgtaatgtgctggggcttacctacgtacttccaatgacctctcaattcccagccactttaaactcagctagaaaccaaccaagagaagggaagaactgagtgaagcagatgctgcctagagatctgtttctcttgcaaggcgttctttccgtggccagaccacccagtgcaaagtagcaacttacatgatgtcagcatacacatttagaaacaccttcccttttacaaaataatttatgccaacatgacataagatagccccccgtactatgaacacaaaggataatactaaattatctcactgtagtgttgaaaacgcacaatttaaaatcccttaacagcagacctgtggttctggctctctggtccagaagttgaccattccaagataaaggtataaaagcttaaaatgtgcaatattaaacccagccttcttccttttcctatacagtaaggcaagaatgcagcctataacacaaaatgtttacaaaaagaaaagcaggtgagcgcgttgattacacaagaacagttaagaaaatcagcaggtatgccacagtgcaaagatggaacagaatccgctagtgtttcaattaaacgtcttaacaggttcttcttaccctctttcttgcctcttgcccccttattcccaattcccttcgcccccaccccccgccacgtggccatggccggtccccatttctctcctctctcctctctgcctttctctgcctctgctaccctcttaactcccctccccatgctctggataaactctattctatattaaaaaccaaaccaaaacaaaccaaaacaaaaaccacatcataagagatggcctatactctgtgtgttagtttttttctgtcagaatttcaaaccaaacctaaggctaaggctcaaacaaaagtgctccatcactgactgccagcccagtccctgtcctgttcatttctgttcttgcctttatggtctcctcactctgctttcttgggggttggcccaaacagaacacctaaggcttcagtggtaagcctccctcactttgtgattggcactcaccagtttccctgaaaccctgtcttcacagcacaccagcagctatgacgtatcatctttcattacagttcaggctctaatcatttgtgactgtccatcatagctgccctttcaagaaaggcttcttgtttgtttgtgttttgagtcagggtttctctgtgtagccctagctgtcctggaacttgctctgtagaccaggctggccttgaactcacagagatttatctgttcctctgcctcccagcactgggattacaagtgtgtgccacctgccctaaggcttcactttttttttttggtttttttttttttttttttggttttttgagacagggtttctctgtatagccctggctgtcctggagctcactttgtagaccaggctggcctcaaactcagaaatctgcctgcctctgcctcccgagtgctgggattaaagacgcgtgccaccacgcccggctttttacttttttaatttcaagtcttgacagtagtttcttttcaacagattagtttaaaagctctacttattacaataactgatggaaattggaatttgtgtctcaatttatgctcttttatttgtttatttgtttgtttttgagacgaggtctcactatgtagccttggatggcctagaattcactatgtagaccacgttggcctcaaactcaagagttcaaactcacagcctgcctctgctaggatagaagagtgtactaccacacccagccttcaattcatgccttttgattacttttcacccttatggctaagagcgattataatattttctgttctcctttccttcttcatgatagtcgtttagcttttacactaattctgatttccctgttagtctgcaattcataaattgtgtttctgttctttgggaactacaccagaaatgctctggtttacttgaactatatttaaagtctggctgcagacatggctcacttgttagagggcttgcctagcatgcatgaggccctgggtttaatcaccaacagtgcataaaccaggcatggggctacaagcctgtaatcccagcatttaggagtaggaggcaagatgatcataaattcaagatcaccctctacatactggaggttaccttgggctgcccgagaccctgtctcaaaaacttaaaataaggcccggtgtggcacacacctttgatcacagcactgggaggccgagtcaggcagatctgtgagttcatggcttgcctggttcacatagtgagacccatttcaaagaattaaaataaagtcagtactttcaactatagcacgattcagctttcaacttaactgatgttattttctagcatttaaatgctctgattgtgtgtgtgtgtgtgtgtgtgtgtgtgtgtgacatctacaaatcagacatcaccatacctaattttatgcatttggtgtcatttagagctagtggttctctggggactgcactgctgtcctctaagcagcaaatgtcttcctgtgtctcctgcttgaactaggctgactttccctcagtctctgcttgctgtcctagaagactatatacacagcgccttgaaaagaccctctgttcctgccttcatttgcccttcagatcaaggtgtcgccacctctgtgggcaggctggcagaagctgtagagtttttgtttttatatttttatatttttgtttcttttgtgtgcatgtgccctgatgaccaggtggaaactgtagaacaacctgaataaatcagttctctccttccacctgtgtgtcccagacacagagcaaaggtctcttccacctgtgtgtcccagacacagagcaaaggtctcttccacctgtgtgtcccagacacagagcaaaggtctcttccacctgtatgtcccggacacagagcaaaggtctccagctgtgcaccaggtgccattacttaccgagccatgcccttggtccaagtttgttttcatttttgtttttaattcatcatataagtgtatttttcatttttgagatagggtctcactctgtagaccaggctggctttgagctcacagagatctgccttcctctgcctcaagagtgctaggactaaaggtgtgtgccaccatgcctagaatatgtatttcttttttttttttcttttgtttttttgagacaaggtttctctgtgtagccctggctgtcctgaagctcactctgtagaccaggctggcctcgaactcagaaatcctcctgcctctgcctcccgagtgctggcattaaaggcgtgcgccaccactgcccagctaggatatgtatttctaataccacagagtatctgtttattttcctggcaaaatatacatccataaagtttccagccaggcatggtggcacacactgtttgtcccagcactccagggacagaggcaagtggatctctatgagttggaggccagcctggtctacataaagagttccagggtggccaaagctacatagatgagaccctgtttcaaaaggtcgacatcatcatcatcatcgagatttgggggctggagagatagctcagaggttaacagcattgtctgctctttgaaaggtcctaagttcaattcccagaaaccatatggtgtctcacaaccatctataatgacatctggtgccctcttctggctgcaggcatacatgcaggtagaactctgtatacatagtaaataaaaaaataaataataataaagactcccattctaaccacttgtaggtatctgattcaatggcatgaaacaaccaacacagttcactactccatcatcttagacagaaacaaagtagccagtgagaagttgtgctgctcagtgctatggattctgctatccaaggatcttgcataagtgaagccatgttgtatttgcccttgtatgtattggtcccaagactccttgcagatgccataatctgcagtcactagagacccttgtataaatggtagtctgacacatcgtatctctagatgacttacagagcagaaacactatactatgttattaggaaatcatggtggtacacatagatgaccacaactatgcagctcagtagatatgggtagagcccacacaatattcatcagagggcttgatgcacctgttttgatttctgcagccctctgaaatttttaaagagcactttcagtatgtatttggttgaacctacaatgcagggcctgtggatgtggggagattataattgtatacagcacatttccaggattcgtccacatcctgtcatatgacaagacctccttccttggcatatttaggccattttctgtgtttattgctgttgatgaacacttgtgtcagctccctcttatggctactgtgggtactgctgctgttaataagagttgtacacatgtctgcttttgattccctggggcacacactgggaccctttaataggtaggtcccacaattctgtgtttaccttcttgaagaatgatcatacttcgtccagtgaccccactgcctgttccctggtttgtttgtttgtttgatatatgtgagtacactgtagctgccttcagccgcaccagaagagggcatcagatcccattacagatggttgtgagccaccatgtggttgctgggaattgaactcaagacctctggaagagcagtcagtgcttttaaccgctgagccatctctctagccctgttccctggttcttaaacactgtctttgtttattttgcagcccagactggtctccaactcatatcaatcctcttacctcagcttcccaaagctggcaatacaggtataggccaccacatgatgttgagtgtatttttgtgtatgtggccatttgtatgtcttccttgggcaaatatcctcttaggccctttgtcctttttaaattgggcactttcttctttcactgttgaagttccttttatattctggatgtcactgctggatcagatgttcaatctgcaagttgcaatctgcactgtgtgcattgtgtgtgtgtgtgtgtgtgtgtgagagagagagagagagagagagagagagagagagagagaaactgtgtgtacatgtgtcagtgtgtgtgcgtgtgtgtgtgtgagagagagagactgtgtgtacatgtgtcagtgtgtgtgcatgtatgcatatgatgtgtgtgtgtgtgtgtgagagagagagagagactgtgtgtacatgtgtcagtgtgtgtgcatgtatgcatatgatgtgtgtgtgtgtgagagagagagaaagagagagagagactgtgtgtacatgtgtcagtgtgtgtacatgtatgcatatgatgtgtgtgtgagagagagagactgtgtgtacatgtgtcagtgtgtgtacatgtatgcatatgatgtgtgtgtgtgagagagagagactgtgtgtacatgtgtcagtgtgtgtacatgtatgcatatgatgtgtgtgtgtgtgagagagagagagaaactgtgtatacatgtgtcagtgtgtgtgcatgtatgcatatgatgtgtgtgtgtgtgagagagagagactgtgtgtacatgtgtcagtgtgtgtacatgtatgcatatgatgtgtgtgtgtgtgtgtgtgtgtgtgaatatgggcatgagtgtttgtgaatgagagtgcacacgtgcctgtgtctgggaggaggctgagatgagtctgggtcccacacatcctggctttgatcttgctctgtaacaaaatgaccttgaagttggaaccttcctgtttctacctcagagtgctagaactacaggggtgagctagccacagtattgaggtcctaacccagcactctctgtgtgctgggccatgtctccagctctctctctccttctctagaaggtagcttttgatttgtaagagcttctgattttaatgaaaggtggtttgtctttcactctgttgtctttgcttgttgtccggtcaggggcatgaagtctccctgtttccttctgaggactttatcatttccacagccttgatttggcctcatgtttactaaagatcactgaagtcttgtaaggaatcctacacacagacatcctgtgtctgccctcctcacctgccccctttgccccctcactgatatacatggtatccaccactttgtccccattgtccctctcctagcttgtacatccctctcacacagaatttttgatttttgataacttccttgttgcttggtgcagtaaaatgctcctgtctcattcattttctgtattttgactccacaagctggaagcatccattcctcctcaaaggtctgactcctcctcacaacagacacttgaaagctggcaggcggagaggctttcagacacaggagtttgtcttgtttccaggcctcagcagtgggcagagtggtgagagacatctttgtttaaaatgtagtctagggctggagaagtaactctgtctgatagtgtgcttgcctagcatagcatgagaccctggacgcccagaactacagaccccagacttggtggtgctcacctgtaatcccagaaccagaaagacaaagacaggaggtaagaaattcaaagtaggggctagcctgggctacatggtacctgtctccaaagttttaaaaataatcaggatggtggtacaattctttaatcccagcacccaggagagagagtcaagtagatctctctgaattcaaggccagcctgattcatatagtgagttccataccagtcagagctacacagcgagagatcctgtctcaaaagacccaaattacttaaataaataaaaacagtgtacattaattcaaaatttctattcagatttggacatttttaataacatccttagtttaattcatattctcttcctcttagctccaaaccccagtgcccctaccatcaacaaaattatccatagtcaaggctgtagaaatgtcgaggcagctaaaggtattggcttctctggccaggacctgggcttgattctcggtatccacatggcggtacacaatcatctgtaactgcagtctcagggcacctgacacctgcatctggcacgaatgtgatgcccagacacacatgcaggcaaagcatctatatacatacaataaatgaatttaaatccctaatactgaggaaaaataggattaaggaagatggcacagtgggcagatgcttacaggcaagccaggcaaccttgacaccgcagcacccacaaaaaagagcacaaactcccataaactgccctctgacatccacactagttctatggcatgtgtacttgtatgtgtactctcgctctctgtctgtctgtctgtctgtctgtctgtctgtttgtttgcctctctcatacacacacacacacacacacacacacaatcattaagaagtttcagcatggtgggatcaataaataccatcaccaacactgatacttgtgggtactgtgtgtgtgtgtgtgtgtatatgtgtgtgtatgtgtgtgtgtgtgtatatgtgtgtgtgtgtgtgtgtgtgtgtgtatatgtgtgtgtatgtgtgtgtgtgtgtatgtgtgtgtgtgtgtgtgtgtatgtgtgtgtgtgtgtgtgtatgtgtgtgtatgtgtgtgtgtgtgtgtgtgtatatgtgtgtgtgtgtgtgtgtgtgtgtgtatatgtgtgtgtgtgtgtgtgtgtatgtgtgtgtgtgtgtgtgtgtgtatatgtgtgtgtgtgtgtgtgtgtgtgtgtgtatatgtgtgtgtgtgtgtgtgtgtgtatatgtgtgtgtgtgtgtgtgtgtgtgtgtatatgtgtgtgtgtgtgtgtgtgtgtgtgtatgtgtgtgtgtgtgtgtgtgtatatgtgtgtgtatgtgtgtgtgtgtgtgtgtgtgtgtgtgtatatgtgtgtgtgtgtgtgtgtgtgtgtgtgtgtgtgagatgggaggagggttacactgtaccacagtagcacctgaagtgctgatcctcacttccaccctgagacagggtctctctgttgttcatcagggaagctgagccagcggggacccccgtgggaatactggcgagcacagcctagagtgacatgaattttagggattcatatctggtcctctcaagtacttatccacggagccatctcttcagccttcttctgggtgtcattttatgattaatatgtgtgtgctgtatgtatgtggacacctgtgccacagtgggaagtcacaggccaactttgtggagttggttttctccttgtacctaggtttcagggatcaaattcaatttgccatgattgtacagaagatgtttttgcccactgtgcaatctcacccacatggcatttaaaagcttttcatctatcgcttactgccttagcagtgaattgtttctgacctctcaaaataatctttcttcatttgctggtcattttcttcaggtctttgggggattgcttttaaagtttaattttgtttgtaaccaaatacaatatctgtactgttccttaagtgtatctgtaaaacaagatgtgcttcaggccccaggattcgggccttggtgggaacaaaggttgataccaattgacaaagtagacaaccttgagtgtgtgagagggacagtggggcagccttacctgctggtattacagatggccagatgggacagaaggatcatctttggcctcttcatcatgccataccacaagtatagagttgggacctgttcccgtctaagccccatctgtctaccaagggacctcaggcccactgggttcccttaggcactcttcatgagagagggcttgcccttccctggtagacccagaagaagccaggaaagattctgggatatatgcaccccagcagtccctggtcatgtatctgcagctctgtgcccaagttggggctggtcgctgcctctctgtaaacagtaccctcaaggcccaacagcaagccaaaggcatgctcaggcacttcagtgtacgagtcattcatgcaggtatcatcagccgctgccaggtgggtcctgaatgcccatccccccaagtgggaaacaccctggcgggttggcaggaaccggtgtgtccctggatggtggtccctggatggtggtgggcatgtgtgctctgagtttctgttcgtgggagcagtggccacaggtcatcctccatccccacctagacacctgcacacaggctgcatgtcagggaagtcactacagcctgggccagtatttttacagaatttcagctaggccagcatgaccaaggtagtggcccccatggccactggtttggggaatttactctggcccttgaggggcttctgggatgaaccaagagaacgcggcgcaaagtcttcaggttctcagggcctggaggacctccagcacacacaactgttgactatgtatactggagcactcttcccacctgtgaaggagggaagatgaggcgcatcctctggttcccagatgtaaggggcctgatcctgctggtctggaattggcttcttggatgtgaattctccctagcgagcagtaaggaagctccaagcaatggtatttgtcttggaccctggacttgaaaaccttctatgggagcagtagtctgagcccctcaggtggccattaccaggtttcctacccacctccctggctcagcaggacagagctcagccccacttcccagacttgggcagactagctcacctggctggtgagggaccagccagaaccggttcctctcctccagcagcttgttttgtgtttctggacttggcagtctcctatagtgctgaaagtattcgggaggagaagcgctcttcaggctcctggagctcctgcccctgagagctgggatgcaaactggcctgctagcttcactgccccacagggacaggctccctccacggcactttggtgcagtgaggaagtgtgctcccaacctcttccttcagcgttgagctccaggggcgacaggaaccacgtctgtccgctgcctctctttgtctgagctctgcccggcaagtgttttaaagaccccaggatgtccgggacgcctggggaggcattttaatgagcttttcagaacctccgctgctgctttttcttgagaaaacaggaagttgggtagctgggaggaaacccctactggatcctgagccgcgtgcaggcaacagcctgctgtctggatctgcccggtgatcttcagacttgaagatgtccctcagcacctatgcatggacaatgtgtagagacgcagaacaagcccacagcctgcctgagcagaaagttatatttaaacctaaggacaggttctgaggggtaacttgggggcaatgttgcaacccgatcagggaccagcaaatacccagccagaaggggcagcagctggctatcctgggacagagaataagcatggcgcaagcgcaaggtggagagcagtgtgagggctttggttacagatgctgtgaggggctctggaggaccggcttggaaggaccattctcgaaagtgagtcagagcatggagaagacgctcataggctgcttcggtcctcgtccaactgcccagctgtggctctcttcagccccatccctgatcccatgcccagccttgggcaccccataggagctcatgctactaccctggtcagggagcggagctcactacggagccacactagaaaactgagatcaagacccttgctggtggaagaaacagcctttaaaagtattcatcggtgttcacagggactcacaggtcaatggtaggagtccagtgagtaggatcaaagtcactgagaagcagccgtgaagatgctgggcatagggggcaagcagaccttgctttttaacaagggcatcttctatagatggctctgatgttcaggctacagtccagaggcctgtatgcaagccaacttctggatctagaatcctaagagactctcagggcttgaaggatcaaggctgtgtctcagtatgtgtactggggcattgttcccagttcagcacaggccttgggccacatcctcactgcccttttcaggaacccttcagctgcagccctcccagccgacccgggatcttgaccagagcgggcagcttggaatgccatggacatcaaacacgtggaccagctaccctgataccctgccccagtggccagtgaagagcctgggacagtgtctcaaggtgaagcaaaagagactgtgtaggggctgtcttcaaaatggctgcaaacccctgctgtgaccacacacacacacacacacacacacacacacacacacacacacggcttcagccatggagaactgtacatataaatcttgcctaagcagattcccagagcccccacccagcctggcttctggaagtatgtgtcttccatgttgaacctggcccacaagaccccagctcagtccttggattggcgagagctggccacctccctggagagtttccactaacacttcttctcttcttcttccttcagctattttgatgctattctcaaaggggaaaagcctcttttgacaggcaatattcccagagcaatatgccctggctggtgcaggaggtccaaggaggagctgagcagttacgatggtagaaatatgctgtgttaccacactgcaatcgctaggagtgtcggtatgggagggagagtcctgggtcagaggagacccaacctgaagcccgagggagctggagcatgagagagcgtctcccggggaagtcacagccttggaagctgagtgacagtgggggtagaagctgaagctgtccattagcaatgtctctcagagggacattcccagtactgtccaccatgagaaaatattttatcaaagaaatttgagttttaaaaaataagctaaacatttagcctgaaatggcttggcgtaatatctatttttactatccctttggtcccctgacccatgattagggaatggactgtggccctgtgagggtatgttttgaaagagtgacatcaagccttcggaagtgtgtgtcccaagaggccagtgaccctaccacctcagggagctttcaggcagagccagcagagggctttccccgccactgaaaggagccacagtcggtgaaacaggctttaagggtccaaccaggcactttgaacaagagggggtcctcaatggagatgccagggagactatgttccctgccccagcctccacacatgggcacagactcctgccagctctaactgtaccctgtaggggacctgaggtccttttcatcagcgcctacgctaagaaaagactcaggaataaagaagaagcagagccaagctaggagtctcatcaacccggggtgcaggagaaacctaaccacagcagtgagggtcctagagagtgtaggacatagattgggcttcacgaaagttaggacctggacctcccccaggctcggggtgcagatgaagcaatggcttcagcactttttaaagccctgggtctcagagaccaacctaagttctttccaggtagcccccaggagactagacctgggctctgctggggaaagacctggcttctggtggcacagagtaggccccagccactttaggaaagctcttggcttggcactgttgggcccatgtggcagatattcgtctccctttcactgaagaaactgttcctgtgtcccattgccaccccaaaacctcagccttcacggcatggggcaggccttcctgaatcttagttctgtcccgacaatgtcatgagcagtccatagagactactcatgttttcaacaaagctacctggaggcctcctccatggcctaccctactattcccctgaaggacctctcatgagttgtctaggccgagggatccttcgagcacatctgggagggccggttgggacaagtgggccaccctgacaacagtaggcatacatgctatgctacccatgacggagacagttataacgtcagcctcagaagtggagaaatggggaagagaaacaaatcagagctaggagggttctttctgacccggtgacctttccaggactcacccatggtcactcagaaccattatactgcgtgctaccatcctcaagctgaggtaagagtcagtgggcacttggaagacagagccaggcagatctcttaagttcaagactaacctgatctacatagcgagttccaggacagccaagactataaagagagatcctgtctcaagatgacaacaagattcagtaggcagggtaggagagacagttcagaggctaagagcactggttgctcttctagaggacctaggttcagtacctagtaccacccttatggtgactcaaaaccatctgtaactccaattccatggaacctcctctggtctctgtgggcaccaggcacatgtgatacaggtacacgtgcaggcaaaacatccattctcataaaatttaaaacaaaaatgaaaagagggcaggcatcaagtagaagaccctatcagtgccccaaataatgtccactagcaagaaatgtcaaaagccagctcctaagtccccaccctccctgtgctctagacactaggaagggaagggagtttgggacctctcagagcctctgaccaggaagatctgccctccacaggggctgagcacagtctttccctcatccccagtgaagccaaactgctgagatcccagaagccaagagagcttgctcaacacagaaggcccattgccctcattgggtggctgagcctagaattcaggcgctttcactctgtgatgaagaaaggaaggaacccttgagactgaaaataaagaagtgagttgggggggggataggaagaaaggcctgggggagtgctgagggtgacaaggccaggcctgcagtgccactggagcacatcctgacctggatggacacctgacacaggcagacacagactgcttctacctgcacagggccccgagtctacccagaaaagacacagcccactgacaggtacatctggggtctctagaaccctcccaagccagttctgcccaggaaatgtccatggccaccttaaggaagcaggacagcctctctaggactccgggatatgagtttgtaacaaggcaaaggagaggcccctgttggtcacatgtcctctacgctgacaatctctatactgctagtctcacacctactcagcttgggcagtgggggagccctggagtggtccaagtggttgcctttggtcgagcccctgtgaatcagtatgctgcttctgatagtttgatgccaccaccccctcacaatcctcagccattcttggtgggtctctctctctctctctggtcccctacttcaagtctgagacccctgcccgcttaactgcctggcaagggattatgtggggtctaccannnnnnnnnnnnnnnnnnnnnnnnnnnnnnnnnnnnnnnnnnnnnnnnnnnnnnnnnnnnnnnnnnnnnnnnnnnnnnnnnnnnnnnnnnnnnnnnnnnnnnnnnnnnnnnnnnnnnnnnnnnnnnnnnnnnnnnnnnnnnnnnnnnnnnnnnnnnnnnnnnnnnnnnnnnnnnnnnnnnnnnnnnnnnnnnnnnnnnnnnntgggggggggtgggtatttcgtttgtgaactgggtggagtagggggagcccctgccaggcctgggaggaggcgtcctgtgtggcccagaccctgttttatttctctgacaagagtggcccggggcagcagagcctcagtcttcagaggccccagtctccacctacacttactgtcttgcgcctgcgctgaccactgactaggttggggctcctaaagcctgaccagttttagcaagtgcagatttcttctagataagaactcctgaaaacaaagtttcccccagggctggagatggagcttagtctgtggagtgttcctaacaggcagaaagcccggccccagtacaatcctcccccctccctcccctcccccacaccaagcagtgcataaaccccatctctgtaatccctgcacagaaagatcaaaagttcaagggtatcctcaactaaacagcaagggccaaccagggctacctcagagcctgggttttgttttgcttttctttaagatagttcacacgttgcttggcttcatttgtaagggacagtgttctgctcttgaagggagctgataacctgtgggctgtgtatggcccattgtccagaccgtgggccttacaacttgatccacagagggactgaagcacccatgaagtgtacagagctctaggttcacatgctgttcacagacaaggcagaccactagctttcaaacctgggagtcgaatggcccaacctgtaagaccctggcccccacaacttaggcctaagagcccagagaagactgagtaaagggtcccaccacagggccatggccccagcgtctgctttccagtgaggtaaagaagactgggcctggggtgagatggctcagtgggtaagagcacccgactgctcttctgaaggtccagagttcaaatcccagcaaccacatggtggctcacaaccattcgtaacaagatctgactccctcttccggtgtgtctgaagacagctacagtgtacttacatataatcaataaataaatcttaaaaaaagaagaataagaagactgagcctagttcccttgctgggaatcaacgttaattctgtaggcaggtgcagggtcaagagaggtcagactgatgctggcctcccctagtgtaggatgtgcagtcacatggactgccatgtgtagccctgcactcccatgcagacgtcaagctgagtgtgttgttcagcagtcaagtgcttgccctagcatgtgcctgagaccccagtttccatctccgcattaggagaaagggaaaagtggccctgggttgcggttcttttgagattctgaagcacccttgcccttcatcccgttcaccctgcctacctgggagacacaccagtgttcccttcttgacagccctacagtctgagcaccaaagtaccagctgagcccagctgtccctgacccctgaggggaccctcaccaggaaggcagaggcacatccccactgcccatcccccacttgtctgtggagacattgtcccagttgcacaaaaggactgggcagccggtaggtgggggaggggtcagacccgtgggaactgcccttcctcagccagggggcaggacaggggccagagggcaaagcccttgccaaaggctgccatcttcaccggctccaaacactcataccctaggagtgagtccccaacccccagtagacagcatagcttaccacgtaagaacagtatgacattatgactagactttagacaaatcctttacacacataggcagacctttacatatccccagggtcctaggacccagaccctctgtctatccttagcctgatgccagcagaaaatcagtcatgctgttaagctcccaagtgtgtttgtcagatgtggctcagcaatcaactcatttcccttgagagagagtgtgagcaggtgactctcagatcacattagggccctgcggttcccaggatgtcctgggaaagtgaggtgtgaagcagaaccagaccacgcaggctagcacctcactgtgttccccgggccctgtcccaccctgtctagcaaggtgtcaggccatctgtccagaaagtccctaggaacatgtcagaggggcaagtaaggcgacaatcaaaacctgtgggacttggcagcaacacaggttcccctcacccaggagccataccgattcccttgccagggtgggtgtgtccaggtattgcatctgctattgacttcctgccagacagtggggtgtgatatgctcacttcctctccgttcttttatgcgttgctattcccagattgtgggaaatggacagaaatggcctgccactctggagtgtgtgcttagtgtccaagttcctagtatcttctgggcgagggttaggagtgagagagcttctgagccaggcctatgtctgggtctgccagtggggtggagatagtggggatgcccagtccagggtatccctcggacagacctctcccagcccctttgtgaggcctaagtccagctggcaggggaagcgctggcatcaggtctgaccaagttagtatgcacctgcccctttgttcagaggcaggaggtcctaagattccctgatttcttggtccctcaccctatcccctagacttggggagaaaccccttacaggccatcaggtcacccatcttgtccccggctggtaggtggggcatagacctcatagctgtgccaggtacctgctgggcagggagaacaggctgtgggaatcaccggggcggcctgcctgtaggaggcaagctccggtcacctctgcctacccccacagacgcctggatcagttcccattagcaaaggctcccaacctgacaggccaccacttgctgccctgcaccttggggcaaatggctccagatccaattctggaaggaccagggctcatgccccactcttccctcagttccccactacataaggcatggggcctcaggaatgcctggggctggaggatgtttgagaggctaatggcctcttcaggtttggattctgttgcctttggcctagggaaggcctggtggactctggggaaaagagcagagccaactaaagctgcctttccagctctgctcctgtacccactgccctggcttaaggcctttttctgagcttgctccctatgcttgccatatctgtgtgccatctgtctacttttgggggacacagggcaagcatacctgtaagcacaaaatccttgctcgtggcccatataccaagtaggcataaggacaagtggtcacccaggcatacatggtcttgggacagtgcaggacaactgttgtgactgtgacagctggtcagctctggatccttcagccatgatcacccttatgacatcagctaacagtaggcctactcatggtaccactctagcactctggaatagatccccatccaacaatctctctttcagttggaggagcaggcagatggtgccccagatggagctacagggaagcactatgtgtttcaggctcttgttgcataccctagaggccacaggagaggctgtgactgctggaaggatcagtgtacacttcccaggagccatcttgggacacatctgaatgagctctttttctcattcttgtcaggttttgcagagagcaaagtcaaattgacgtctggctgtggctccataagtgccagtgcccaacaaggcaacaaaccatgactgtggctcagggcttaccagcaacactcacaggcagaaggaccctgagtcagagcaatgttggtacctcacagctgccaagagactcctgggacagagcagccgggagtcttcccaacttctgccctcccacaccctctaggtgttcttccctacctgtcaggctagcctaaggcatgcacacagctgtgctgatctaggttcaggcctttgctcagcctgaaccccccaacccccaccccccacccccacaggatccaatgacatcccaaagttgaggctcctggcttcacactagtggagaggcaatataaggatcctggtgtggggccttggacagtttgagagagtcagcggctacaagcctcctctctgaaaaaaggaggctgttggtctcccaagtgccaggaacactcggtattaggctaaattctccaggaatggtcactatcttaatggcctagtgtgtactttgtcatgatggccctggtggctggtcctttttctgggttgcaagcctgaaggtggagggcgggtgctgtgaacagtgcagaactggcttttccagaccaggcgggggcagggttccctgggccccacaagggtgacagcaaggcccaagagcgggcaatgggccgtgggaaaaccagcactcgtggttcccgaaggtggggccaggtccttgtggacagcaccaggcgtttgcatggtggtgactcagcatgagccggttgcctcacccagactgcacaccaggccagatcctaggagggctagaagcacagaggacatgaagcctttaacttgactgaaggataaagcagaacaggggcctctgcagtggtagagactcaagtgcccaccaatcctccagccttccccagcctagccttcaggcagatgcctggctctctacttgcacagctgctccaaggaagtccctatacccagagaccaggctggttgaagtgatggggacaaaggagatgccctccatgagtaaggggcgtcattgtgtgaaagatgggagctggagcaaaggcaggacaggtcctagctccctatcagccccagcccaggcctctggccagcgggggctgcagagctgaagtggcggctaagccacaggtaatgcaacctgtggtgtcgaaaggcccgtgggaaaaggatgtgtgggtggggcaggtgccgcccagcatggcacaccctgaggctccaaatgtgttcttccaggacacctgcctggctcacccaaagcccccaagaggggtgggggcacagcatgatcactagagagcaagctgtcagtcacctccctgtagccctcctctgtgactcagggaccctacctcctttcagttgctctgacaaccagaagtatacactttcaaagacatatacacatgcctgtccaggactcccacccaggcttatcctgaaactcagactcatttatttgtgtaggtagcaaccatttggaggtcatgagaagggtcatctgggattaagtcctaccttctttgtcctggtcaatggtagtaggttaacaagcacaggttagcaggtttggagctggggtatagcaaggaagtcctaacaggccttaactggaccatcagatgccctagaagaccattgcatatccaaggtccccaaaaagatccaaagtggggtttgcttctgacccaccatggacttcagggccacagcagaaccctgtagctttagcagctattccagatgttataaatatagacagcgcgcagaggatccggggaaacctacagctggtcacagtgacccttcatctcacacatgagccaggagggtgcagacctggctgctccctaaaggttctcggtctggaggtgagctaggcagtttccaaggccttgggaaatggaagaggcagctcatggcccagagaggccaaaagtgaaggagggctcctgagaaccagacagtgcataggctggagacaggccctgtgccctaaacttacatggaaagtaacaggcctatgtgcatatcaattcatagaaacagagggtatggttgacttaaccacagaggagtgctgagtgtcccagcttcttggtctgcagggtcaactgcatggggaataggccactgggctgcagcccttaccttgcacaccattcttcacacgcttattggtgaggaagctcacaactacgagcacatgggtttggagttggggtatagcaaggaagtcctaagcaggactcgaccccttttggctgcccaggcctagagaccagagagttgatggagcaactgacagagcttagtggtgatcaggggactggagcaggacaggtaaggggatccctgaagcagatgggagtctgggggtccttcagaggtggaccttcctggggactggcatggtaagggtggaggcccagtggcctgttcctcatgcaggtgatcctggactaagaagctgggacattcagaatccctctggagtcaagtcagccaccccctctgtttctgtgggtctgcatactgctgggtgcctcacatactgccacctgcctggcacagtgacaaaggccagtcgcttgctttaagttcaggacacagaacctgtccctcattgcagtgggtaggtatacagacacttcagcctgtctacgttagctctcagttctccataagtcacctgggagtaggcggagtgaaactttcccctctcgggatcacaagttgtggcttggcaggtagcctcgcgttgagacctccatcttgcatttccttgcaagaggacagctagacagattagctgatgtcacagagggtctgcagagtagaagtggagcttgctccacaggctggaagggagcaggtgagccagacagaggtcatgacctcctccaccttgtggggagccactgtacccattcatgtcctacctatagttgatctgggaccttctgtaaagaaatgttggacaaacaaataaaggggtcacaggagtggacaggctacccctctcatctgctacccagattgccttcagttgctctcagtcctgcaggaatccctcagctggacattggcctctctaccctctgttcacaatccggccaggacctgcaaaggccagcaaaaaccatccccaacgttttttgaggccctgggggccccaccctggtactggctgatttcgaaatgggctctttggcagtgggcttatctctttatcactacaaaaggtctgccccacccccacccactggttctcaggcccctggatccctaatcagcagatctcatgcccaggacttgtttcccagggacctttgagccctaagaatggcccaaagtttaagttccctggggaggaacccagaagtaccaaggcttctcagcctctgctctttgaactctccatttaggaggtgggggcagggcagtgagctaggcactgaaataacagagattcagctcacagtggccttctgggcacaggtgactctgtgctccttaggacagttccatcaggccctatcatcttttaataggcgatgaagccaccaggagcaaggacccagatggtaccagatgagttccacagaagctgctagagagaatggaaccttgggcacagctagtggatggcttgagcgacctgagaaagcaggcactgtctccctccctagacctggtcccagaggaggaggtaggggcaatgctgctcctatgatcctgcttgagactgggcaaagccggaggtcatgtaggccaacactttagctacactgagcaatggcacagcactgtggctggaaggggtcctatctggcatgctaaagcagccttggctgcaacatttctactgcgtttagcaatgtggcaagcttttctgggataactcccacctgggtctcaccatcacacacttccacaaggtcttggacagggttccaactgctatgggctaagccaagcccccagcacaaccagtagaccgttttgaagacaagacagccagagacagctaaacaataaacctaaaaaacattttgtgattcaggctgtagccttgtctgtttgcttagtctatcctctatgccaatgccaaactcttgcacatgccttcaagctgctacagactccaaagacaaatggatttctagatggccctggattcaggtgagacccataagatctctgtcaccctggatcaggcaaaagtggctctctggagagagagaagagcagccattataacctactgggaggctggaagcacctggctacctactaatacagcaggactctcactcagatgatgggcccctccatagtcacaattgcccaaaagtagatgctgctgcctttgctctctgaggaagctggggccctcacaaccaaagctagcttccctagaggatctgaggatgctgatgtcggggattgcagaggtaggaaacccaatgggaacgaaaggaagggaaggtcgaggaattcaggctcctgaattcagccagcctgcaaccaacacacttggtgttctagtagcctgcctcctcctccttgctcactccccaggaatgtgccacctccaccccttgctcacatccctttcctttgcttcctgcgtcaagcggaaaccagctcagatttggccaaagaacctaacagatagatgccttcaggcaacaaggtcctgagcaagtgtctgcctagtgcagggaatgcctacagatccaggtgtgtggtatcaggaccgtgtctgcccactacccttggaacaacccacctggggcctcctgagagtccatggcatgccactggtccaaatgtgcctgggatctgcctctcagcccattctgcctactgtaacctaggtaacacttcataaatgaggagagctgggtagagactgcagcaactcccagtgtccctctgagccacctctaatccagaccttccactcaacctgttgggcagccttgcagcctgagctgagcatcccagggttgaggggatcagggtggagtgttagcttcctccttcccctagctctatgtcctctcctggaagagttcctgaccacatccgtccccactcctggattacaaggaagcagcaaggagcctttaattgcttcccagcacagctgcatcctaggcagctgcaggacaaaggcgaaatgggaggagaagacctgaccatgctgtccaccttgattctcgggacagccatgcccactggaccatgtgtttcccttgcccttgcctcttctttgctgcccagcacagggctcactcacgcccgatgaagcatttccacttttgccatttcaaggggttggaggctgtttgccccattcaggttcaggcattggaagcaagcaccaaacctaggagactagctgcaatatgcctttctcagctgccacagagaggttgccttgaggagtgggtatggacacagcggctctggtgtccatccagtgttggcctgccatgctgagtggcatgggcaggagcctggtcacagtgatcgtctgctgcagttcctgcggcctccttcctctgctctgccggctggctggagctcagtgtttgttatttgattcctatcctctcttctaccaggtgtctgggctgctgggaagaaacactctcctctttcccacgctccccaacacattttaatgaattagctggaagccccgccccccactgcccactggcctccctcccctgctcagcgcctttaaggtggctgcaggcctggcccagctttggccagctgccctgtctgtgctgtcctcctatggcctctcagattgcctggactaccccacccagatttcccctgcagattccagagcactctacatgccaccccttcacagcattgctttcagagctgctggctcctaagcacccacctaagcaagaacgggagctgggcatctggagggaggaggatgcccttcccactgtctccttctaggaatgagcagatggtggtcaggatgctcctggaccagcattctttggatcaggcagggaataaaggtcagagtccagcatcacagccagaagggggtctcctagatctcaagcaagcatcacaaacaccggagcttaatactaggtcccctgagactctctgggagcccccttccctccctctctttgaaagcggggaacaaatgtccaccttttggaagtgtcctccagcaaacacttgggtggtgcttactaggaaccaaatgccccacagccttccccaagcccctccttatctgagacaggaaggcatgggtgtgggccagagcatagctgtggtgaaggagcacgagccagccgggaatcctgtaaccatcacctaagaagttctgtgggtagctggccatccagctccgtctcagctgcacagtggtggtggcaagccaggcacatctgtctgtcctttgagcctgacacagggcaaaatgtcctcaggataagcttttaccacgataggactgccacaccagccatgctattctgcaagaactagctgagccttccagctctcacagcccctgtggtgggggcctggcgttcccacactgagctcacacagggcccctttgtctgccgcctgctgcggatgtcaacaggacttttctcccaggctctgttctgggcaagcatctcagatgcccttcctcaggccaggctggagcccacctaggtaggggcctatccggggacccattcaccttcaaggaacatcactgggcttgatgaaagtaaggctctgctcacccccaggtgtggtctctgattcctgcctgtctaaagcttccaagccctatgcaaacgcatgaaaccatgggccagccaggaatcagatcctgtcctcttatgctcccagaactcccgtttctccctgcccactttgttttgggttagtgttctgtgacacagcctgcattggggcatcagtcagaacccccaactgcacctcagtctacctgcacggtggagagaaccataagggttcctctcaagatcttggaacagtagccaagcagtggtagcgcacgcctttaatcccagcacttgggaggcagaggcaggcggacttctgagttcgaggccagcctggtctacagagtgagttccaggaaagccagggctatacagagcaaccctgtctcgaaaaaaaaaaaaaaaaactctctgaacaatgaggtataaggtgtggctaggggaccaaataggcagaacccaatagaccaaggatcccaagaagactagagagctttccaagctgaatacacatgagattcaggttctcaggttagcagaaaaggagtgtgacccttaaacaagttggcccgacgggcggacatctggtggtcacagtggtggtggggggggggttgcctactttctccattcaatttagctatggtccctccccgtgaacatagtaaggttggggacatgccccggtgaatatgatacagttctgagtctggggcaggaacatccaccaaaggagcgtccccagatggagcctggctgggtgggctgcccagctgaggcttacagttgcctgcttggaattcccagttagcttcagaagaaatcaagccctgacgtgccctgcctcctgctctgcaagtcttaagatcattcctccttaatttccagcaaccacagcgaagctataagccgtaaaacataatgaggaaatgtggagccttgccttcccagccagcgccagcacctcctgcctcactcacggtcagttgttaagggtggtcaataaaacgtggggcttatggcttggaaatgagtcatttcagaactccctcaaagggcagtgctgttggtctcacgagccagccctgtgtcttatatgctgacactaagtaaaggaaacacataaggaggagtagtgacagactggccaccgagaaagagagagagacagagagagaggcagagagagagagatagacagagagagacagagacagaggggggagcgagcgagcgagcgagcctgtgccagcctgccaaaggaacccctacctacactgtgggtagcttaggggcatggagctccctccatcagtatggaggagccaaatgcaattgctgctcaagcttccccgtaaattacacttgagtagaaaggaccagagtgatggaggactatacaaccgagcagttcgtgaaattgccacctgtgaacgccaggtccaggcctgggagtggctgcgcaaggaactcgcaactcccgacatctatgaaggaagaagaaaactgccgaaggagcttatacaccggagcaaccagacccaggatcccgcagtggtgctggaaaacccccgaggccttctgaccaccctggccagaccagactagtgctggtcagaccagcgccctctatcctggagggagctgcagcacgaccccgcctccgccccgcccccacgtgggcaccacccaatcgaaagagccctggtgtgcgcgtcaagagcgtctattgttatgcaaatataagaaccgtaaaagacggcgagaagcggcgggcgaattagaactattttgcaaagggacgcgggtggagttcagctggagcgaagcctaacctcgaagggaccacgactgcgagtgtcgcggcctccggctgccccaggttctgcgaaccagcacccagccctgtcgcccgcccgcttgggcgcggctggatgcagcaggggtcccgcgccagcggccctcggccccgaacgcccggagtgcgcaggggcggcgtgcggggcccgagggcgcagcgccctccatgcgccgaggcgtacctcgagacacgccccgagacagcccggggcccgcactgcagccgccgcccgcgctaagccggggcgcggctcgcagccctagctctgcggcaacatgagccaagccgagctgtccacctgctcggcgccacagacgcagcgcatcttccaggaagcggtgcgcaagggcaacacgcaggagctgcagtcgctgctgcagaacatgactaactgcgaattcaacgtgaactcgttcgggccggagggccagacagcactacaccagtcagtcatcgacggcaacctggagctggtgaagctgttggtcaagttcggagccgacatccgcctagctaaccgcgacggctggagcgcgctacacatcgccgctttcgggggccaccaggacatcgtgctctatctcatcaccaaggccaagtacgcggccagcggccggtgatagccacccggactccggcccctggcccccacccgcgtcgtctctgctgtaccttcccgccaactacctcggtgtgcgccaggtttgctggtccgcgtggaaatcgggctaagtctctacgtccgcggccacgaccaaagtagcgcatccgtggaccccagggttcggctctccgcaaaagagcgcctccccttggcagtcctctgagccccgcggggccccagagccttcccacggccccgaccgcctagagggtgggggcggggcgcaggctccagtccgttttgaaatttgagtctcacaccgggagacttcggaatcccgagataccggatcctccgcttgaaatgttttctccggaaggtgaaaggcgcgggcggactcgcgctccagccgccgctcgtgagacccggccgctcacagtgcggcgcccgccgctggcagccgccaaacaaccattaccgggctccaccatctgcgcgccctcgcacttaggaagggaaggggacgctccgggttcctgatgtcctcaactatttatcacgtgtgtgtatatttgtgggtgaagtttgtgcgcctgagttttttgtttggaaatattgtgcgtggttatgggagaaagatgcattttttttcctttaaaactaaaaacttgagtctaccattttttggttgcactgaaaataccgcctagccctatggttttcccattgctagcccctcccccaccgagtccctaatcttccacacctcattcctcttttcctctccctggattctgagtttagagagcctaggatctgtctccctttcccctcccgtgagaggccaccattccccacacaggctggtttagcaaagttccaaagggctcttgaagcccgcgtggctgggacgtggggattctgagagcatggtacccttcctagtgacttctattatagttaatagtcggttgcacacttttttaaaaaagtaaatgaatttgccacgattaaatgtcataacatttatgacagaatataaaatattaacatattttaagccaagttttaggtgtatttttttgaatcttggttatgaacccaattttaaagggcgttgtatccagcgttgtgaaggctgttgtgtacccatatttatatttttataaaattcctataaagactgtgaatctctcatactattgctgaatgagtggaagggctgctgtgctctttctgccttccccaatccccatccccaccctcaaaccctgctccaaggccctattatgatctgaggatccagccatgagggaggggctgtgccaaggaccagggctggaggaggtgctggagcgtcactggctgtcccagaaaggagacttcctggtttctgtggttccaattttctatgcatctccattccccttcttgttttgatcctgggaaataaaagggaggctgaattattcaaatttaaatgaggtttccccttcgtagaagtgctgctgaccctgcgtgcaaaaatggggagcacttgaggacacaggtgggtggagccctttgtgccgcctggccatattcttcggtcttctgcgcttttatgaaccagtgtgggaggaatagtgataatgtcatgagaatggcagacactgagacaagcacagattacttcaaaaggagttctgtatggtttttctacacgcaaatgcctttttaattatgttaattaatgttaaaacgtactgggcctatgttgaagcttcagatgggtcctggttggtctcttctatctgtatgaagtctgtggcacactcctaagcgtacgatatagacttgtagcccatcgtgaaaaatttataaataaatttttcattggtctttttatattaaaaaaaaatactggttttaattttggcacaagtcctgggtccccctctaagggccatggcgtcctaccttcagctaatgaatgatggctgcttgggttgtgaatctattgacaagaccaagctgggtaaaatgtgaactcagtctagctcagctgtcaagtccaagtcaaccacaggaacccagatgccaccttagtagttcgtgtctcagctacttcctggcagagtggctgagacctccccagagagatctgcttatagctcatcatgcttcctacccagcctgaaagttgaaaccctggaggaacttctgcacagatgagggtctctttagatttgggggaacattcctgttgctcctggacaagcaaaacacctctagagatttgggcttctagggccaaattcaccaaaaagcagatctgaattagatccagggttctcatgcctgtgatttgagaaaatgcactggaggaccatcgacagcccattcctgggtcctgcatgggattcaggggaggaggtgcctgatgggaccagaatagcagcaaccagcagaggagatccaatggagccatggtataagtggctgttctcctgatacaaactccaagcagccatcagtcccacacacacacacccttcgggctcctactttaacattttctcctcagcaacagtaaggttattaaacttctgagcagactatgatgtgatactctgcagagagatgggaccttcctcaggaagtcgcaccccaggaattgtgtctaccaggaattgtagcccacagctagaaggatgtggccagttgagtgtttttagtccccaccctctccctagactgtccagtactaacctggagtgtgaggaggggaacgctcatcaagcctttacagcacctttaaaattcccccacctaagagaggctcgagggcttccaggtatacatttgctaactacaatcctgcaactccccaaagttctctttggagggagccaacagacacacagtgccatgaatgaaatgaagctaagaagagatggcaaacctgtgtggtggcatagacctttaatccaagcactgaggaagcagaggcaggcagatctctgagttcgaggccagcctggtctacacagtgagttccaggacagccagagctacacagagaaaccctgtctcagacaaacaaaaacacaaaaaaagatggctgaggaaggagctgtagaggaacccatgctgtctgggctgttgtgaacgcacaagcctcttcacaatgcagtactctaggaggcaggtacgtagacacatgctgaacgcttacatcaccatagtccttccctttggtgggctcagaactatggcgcgaatgccagttagtcagtcccaccgagtgcacagagccagccatcttgccttaaagggtactgtgggcagcgtgttcaggacccaagttttccaggaagagtgctctacttctatggcatggctcccatgacagagcacacttgtgcagtgggaacagacagaagtctctgctccctagatgtgaccaggtcaaggttgctatatctctggtgcccatttccctagaatgcagtggccagtggtccttacagctcaacaaagtacctgctgcagtggagcaggagtggtatggacttgatgagtctctggtaaatttccatcctcttcccaaactggtccaggttagggccggtgaaaagaagttatagatgatccaggtcccctctctgtcctggccttccagagctgcagatgtgcctgttgcacaagccaagaggcactgagaggacctggacaaggactgggcaccagaagcagcactgggaagccctgaagacagaagggacacagagaacgcaagggtcaaggcctgccccctgttctcagtgcttggctcctatccatctctgatcaaacccattacacagaaaacatttactgccagaaatgcagaaatattgtccaatcgtaagagtggactgggaagagccaacgggggagagccaggacacagagcaggacagaaagggaaaagagaagtgactatggggcagtctgtctccaaagctcatcacaagaatggtcaggggcgtgcactacagatgaaggaatagcaaccctttgacctgggaaagccagctgtgtcttggtactcccacgaggcctgaaggaaagaggcgacatccatgggccttgaaggacgggaaaggaggccttgtgcttaggactgctaagcaacaaagtccaagccctccgtataagggctcagaccataggaggggccgtcgaaggtctgggaacctcagcaactgctccttctgaggccttggcaagaccttcctggggctctagggtctctggaggccgccctcccccaccgctcagccccgcccccgtgcggcgcattcttctggttggatgtccttccgacagtaccctgcgcgtccgtctgtcggtctttcttctttcgcccgcaccaaagccgcggcccattcattccggaggcctctgccctctcctgagccggtcctcgctcggcgagcagctgctatgctaatgaggacggcggcgggtggggcgggcaagcactcacaaaggcagaatctttacattcaaagccagcggggcagttcctgcgagcccgccaggcgaggcggccgggagcggcgccctccggcgcaccggctgcccgagcacccactgcccggctcggtatgagggcagagaccagctgtcgtctgctcgaggtcacggcctgggacccgtagctacttaggacctgcctgtgccctcccccctccccccagacgcttctcttagtggctcgggtactctcggtactcgtgtgcagggctgcgagtgacactgccgccatccccaagacaaggaggttggatgagacccaagcagagtctggtcctgaccaaacaggagcagagatctccggtcacctccccgcgagcaggcagggttccccttcggcaaggagggacagggacagggcgtggggacggggcaaaactggctctctgggtaccggacgagccttgcccagcctggacctgatgacctcggttcttcctgtggagcttaaagcaagttagggggaaaggagtggaagctggggagggggcggctgcggctggcctgcgagcttatgctgcctccctgtggtcctcgcctgcactgtggtccccgccaagaacactaggtgtatggccgaggtggacacctggttacccaggactccaacctccctatatacatcgaaggttgggtgaagtgcttagatcatgaaggggcaagagctgacatgcacaggtcagaaaggcatgaccatctgggtctgccccaggggtggtaacccgacaaggtgggtatggaacagaaggagacttctccgaaccagataggccaactctgactacacagcctaggctaaagcaatggaatatggtgttagtgtatgacgagcaggatggatggagaaaaagaggaagggaaagaccagggaggaatgcacagagggccttggcagtgttgctgaaattgaaagattgatcatttgtgggatggacaggaaagcaacagatcagaaggaaaagcattaggtgggaagactacccaactgggacccctggaccactcctgcggtccctatgtcttcaccaaatggaaaaaggatatcccaaggcccaagactttaaagatggttagcagaactcctacagttgtagccctgcacccaagggccacacttctaatggctgccggatataggacacattccaaatgatcgttaggatagattcgagggtgcctctgagtgtagagcctggagcctctggtgggagtcatgtgggcaaggccctgtgggccagtggtggctggcactagtaagctgcctctccttctgcaaccttatgaatgataagcatatgaaaccatagccaattcaatgaattccctccctccctccttcctttcttcctgtcgccctcctccctgttctgtagccccagcggacctggagcttgagtctaggcctcaaatgtagagctccttcagcttctacctcccagtctcctgctgggattaaaggggtgcaccaccactgcctggcaattaagtggtttcttttgggctggtgagatggctcatcaggtaagagcactgactgctcttccgaaggttcaaatcccagcaactacatggtggctcacaaccatccttaatgagatctgatgccctcttctggagtgtctgaagacagctacaatgtacttattgggctggagcaagcagggatggaaggagagggtggggctgaccagagtgagcagaggtcctaaattcaattcccagcaaccacatgaaggttcacaactatctgtacagctacagtgtactcatatacataaaacatctttaaaaaaaatggtttcttttcatttgctttggcatagcaatataaaagtagttaagatatacatctatcaaaacctacctttgaaggctgctgagatggcccagatggcacttggctacccaagcctgccgaccagagtaaaaggagaggagaccagcagctccacaggtgtcctgtgacctccacacactggctgtggcacacactcacgcatgcgcatcatgtacacagctaggcttggtagctgtcgcatgcctacagtctcagcactcagaacctgtgagtcggaggccagccagagctacatagtgagacccagtctggagaaaataaattaaaattaaaaataactttttgaaccaggtgtggtgaaacgcctttagtcccagaacttgggaggcagaggcaagaagttctgattcaaggccagcctgatctagagtgagttccaggacagccaaggctatacagagagaccctgcctcaaacctgcacaccccccaaaaaataatttaatattaagattggtggttgtagcatacacctttaatccaagaactagggaggcagaggcaggttaatctctgagtttgaggccagcctggctacacagagaaaccctgtctgannnnnnnnnnnnnnnnnnnnttttaaaaaactaataaaaactaagtagctttggggactaggcatgtgtggagcatttgtttttgctttttttttttttttctagacagggtttctctgtgtagccctggctatcctgaaacttagtctatagaccagtctgacctcaaactcagagatcctcctgcctctgcctcctgagtgctgggatcaaagacatgtgctaccaccaccaaacttattttatttcttaaagtccctagaacaggtttctgtctgggtggttgatgggttcactatgggaaaagacaatagtatgtcttttgcttattttatttatttatttatttatttatttatttatttatttattgtgagttttactatatatctttggctgtcctagaacttactatatagactgcaagctgcctcaaactcacagagattcccgtgcctctgcctcctgagtgctggaattaaagctgcgggccactatacccaccttgaaacagcatttttgaaagttaaaaaaagaatgaaaaaatgttacagagctggagggatgactcagtggctaagagctcttgcaaagggccttggttcaattcccagcacccatgtctgccacccacagtctagctccaagggatcctcttctggcccctggggacaccaacactaacataagcataattaaaataaaatttttttaaatgggggttggagagatggctcagcagttaagtgcactgactgcttttccagaggtcttgagttcaattcccaacaatcacatggtggctcacaaccatcggtaataggatctggtgccctgtgtgtctgaagacaacaagtgtactcatatacataaaataaatatataattctttaaaaataaaatctggggctggagagatggctcagtgggtaagatacccaactgctcttccgaaggtcctgagttcaaatcccagcaaccacatggtggctcacaaccatccttaatgagatctgacgccctcttctggactgttggaagacagctacagtgtacttacatataataaaaataaaataaattttaaaaaattaaaaaaataaaataaaatctgggttggagagatggttcagtggttaggaacactggcttctctcatcaaggacctgagtgcaattcctagcacctacatggagactcccaaccgaatgtaactatagtccctaagaatcagaattcttcttctggcaccccatgcaccaagcatgcctgtagcgcacggccatataaccaggcaagacacccacacacataaaataaataaagctttataataataataataataacaaacctttaaaattatttcacaaaaatagtaatttttgcgagaaagaaacagtcttcttttgatgctcttcatcaaaatcttgccgcctccacctttgtcccttctgtctagctatatagctattctgtggccatgagcacattatatcagaagcatggatggccacatttgtgctcttctacactgttaagactttattacataaactcatgaactaggttagctgtggtggctgaaattctccaagttgtcctgatttcccttgatagctgactactaacaaaacacattttctgttccaatgccaataccatattgtacaggctggtgttgtgtgtcaacttgacacagctggagttatcacagagaaaggagcctcccttggggaaatgcctcagtgagatccagctgtaaggcattttctcaattagtgatcaaaggttgggagtgcccattttgggtggtgccatccctgggctggtagtcctgttttgttttgtttttttggtgttttttttttccttttttctttttgttttgttttgtttcaggacagggtttctccgtatagtcctggctggcctggaactcactttgtagaccaggcaggcctcgaactcagaaatcctcctatctctgcctcccaagtgctgggattaaaggcgtgcgccaccaccaccctgctatcctgggttccttaagaaagcaagctgaacaagccaggggaagcaagcctgtaagtaacatccctccatggcctctgcatcagctcctgcttcctgacctgcttgagttccagtcctgacttcctttggtgatgaacagcaatgtggaagtgtaaggtgaataaaccctttcttccccaacttacttcttggtcataatgtttgtgcaggaaaagaaaccccgactaagacacatattaatcccagaccagacattatacatcacatggtaattatatctacgtacaaatagaggttatagaaaggctacaatggggataaaagaggctacaaagagaatctccaagttggagagcaggtggtagataaagttcttagagagctgccagggacaccaccacaaaaccaagctctctgtggtttggagtcaagtcccatgatggatcagacctgccgaggcaagggacaggtttgaggtgaatgggtggcagccagatccctgcctgctgcttccttgaccccatgggtgttcagctgatgggtcaagtgaagctcttgtcattgtggtctaagtgtcctcttctttatgtgattcaggggactgtggaacacgtttccttaatctggttgtattcattagttaatcatttttctgaatacattggtgtgtccatatggcaccttcttacctacaggcatatatatctgcctcctgggtactgcagggcaggtggtggtatggacaaacatagagaagtgcagaattgtcctgccaccctctgtatctctcaaaatggagtcaaattctgcttcataaaatgaaataacccaaggcaaggcacagactagaagccgctgttttataattatgggatgccttggaccccttgaggtttgggtgatctttccgactctcaggatgctgtctattagctttcccttaacggtcccttttgtacttctaaaattaatgtgtttccaaagacaaaggagatgatgccc

SEQ ID NO: 690 - DNA, 1062 bp, Mus musculus
atgccagccagccttctcaatccctcctttgtcctggctgccttggtgtctctggcatctgagggctgctgtgttctgttcctagtaggctccagctgtgtacctccaaccttaacccttgaccctgccaagatggacccaggagaccccactgccagagagcctactgctgaaatgctcactgctgccggagagtctcctgctaatgtcccctctgctggcattagcatgctgctctacaaattggtctgcaagcagcagcaggctcaggtccctcaaacccagtcagctttgaatccatactgctacagcctaggtcactgcccaagcctcattcaaggtttggggactggggtgggcagcaaatttttatctcagccttggggtctcttccatgcttacattatcttgtcagattctctttcctggtattcagcagccattggttcctcctccaagtatcactccatgtacctgtccccgctctggacagtcaaaggcctcgtgtttgctccgatgaaggcctcgtgcaataccaagccaagcacatttcttgacccagaagaagccaggaaagattctgggatatatgcaccccagcagtccctggtcatgtatctgcagctctgtgcccaagttggggctggtcgctgcctctctgtaaacagtaccctcaaggcccaacagcaagccaaaggcatgctcaggcacttcagtgtacgagtcattcatgcaggtatcatcagccgctgccagacgcagcgcatcttccaggaagcggtgcgcaagggcaacacgcaggagctgcagtcgctgctgcagaacatgactaactgcgaattcaacgtgaactcgttcgggccggagggccagacagcactacaccagtcagtcatcgacggcaacctggagctggtgaagctgttggtcaagttcggagccgacatccgcctagctaaccgcgacggctggagcgcgctacacatcgccgctttcgggggccaccaggacatcgtgctctatctcatcaccaaggccaagtacgcggccagcggccggtga

SEQ ID NO: 691 - protein, 351 aa, Mus musculus
MPASLLNPSFVLAALVSLASEGCCVLFLVGSSCVPPTLTLDPAKMDPGDPTAREPTAEMLTAAGESPANVPSAGISMLLYKLVCKQQQAQVPQTQSALNPYCLGHCPSLIQGLGTGVGSKFLSQPWGLFHAYIILSDSLSWYSAAIGSSSKYHSMYLSPLWTVKGLVFAPMKASCNTKPSTFLDPEEARKDSGIYAPQQSLVMYLQLCAQVGAGRCLSVNSTLKAQQQAKGMLRHFSVRVIHAGIISRCQTQRIFQEAVRKGNTQELQSLLQNMTNCEFNVNSFGPEGQTALHQSVIDGNLELVKLLVKFGADIRLANRDGWSALHIAAFGGHQDIVLYLITKAKYAASGR

SEQ ID NO: 692 - DNA, 20377 bp, Homo sapiens
  misc_feature (1)...(20377): n = A,T,C or G
ccttgtgggtgacagcaaggcccacagcgggcagcagccgtgggaaaaccagcaccggtggttcccgagggtggggccaggccctcactgacggcacccggtgactcagcacgagctggctggccccgcccaggcgtgcgcacctggcccaggtcctgggaaggccccggaccccatgtggagtatttgggggtgtggggagcccatcccgcactgctgcagcctcgccacctctcctacacccactggcactgtccctacaggtggcctgcacagtggagagtggggctctgtggagggtggaccacctgcttgttctcagcccttcccagccagacctgcagccagggctctccacccacacacctgcccaggaagcctgctggacccagatctgggctgggcccagaggccaggtcacaggacctgccatcatggcacaaggagcttcctggtgggagagatgggagctagcggaagaggaagggagggtcctgtctccctagcccagcctggcgtcctagtagaagagccccacctgtccaacacctccagccccagggccctgaactggtgggggctgcaatgctggaggcaggtagtgcagcctcttagtttcgaaaggctcaggggaagacagcgtgtggggcagggccggtgcccccaacatggccacacccggaggctccaggggcctcgaggccacctgcctgcggcagccatgtcatctggggctcaacccaaagcccctgcatggggaggggtcctggaatagccatgtgaccatggatctcggcctcctcttccctgctcccctgcacagatggcctggaagccccacctcctccccagggtgctctgacatcagaagggctgtgacgggaaggccacacctccacaggacctgcaggtgcctgcctgggacctggctctcagtgggcacccagccccctcctggcattgccaggggagtcctgggtatctgacccgtctctttgtccaggaagtgaccactgggaaggccgtgcaccccgctccaagtcaggactcgggtgtaagctggtcctagcctcccggcctccctgcccccacccccagcatcgcagtaagcctggcaggttggtcatactcagaaaccacccagaggggctgggcgtggcacacacctggagtcccagcactttgggaaacccagatggaaagatcacttgagcccaggagttcaagaccagcctgggcaatatcgtgagacctcatctctacgaaaaatacaaaaattagctgagtgtggtggtgtactactcaggaggctgatgtgggaggctcatttgagccccggggcttcaggctgcagtgagctgtgattgcgccactacattccagcctgggtgacaatgagaccgcatctcaaaaataataataataatgcagccatgggggcccgttttgtgccctggacaaggcacacagtggtgttgctccagccccctcgccactttcagggccacacctgccccagggcagtgggaggcgcaggtatcagggaaatgtggatgtggaaatggacaggtcaggggttggggcaactatggggctgcccacgctgaccccttaaggctgggccctgtgtccaacacgccagctgaggtggcccacgggggacccagacctggttctgccctcgagggctctgggattggagagggcagctgggcagagagtcccacaagttctcaaaaaacagaagaggcttcccagggcccatgagaagccagcacagtcagggagggcttccaggaggcggtatggcctgaaccccacaggactatgcgtggggacaggaggggacccattatctgtctctgtgaaaccccatggccagacccagagcttcgaggagcgagcagagggctggggtatggggcacccggagaagccccgcctgggcctcagcaccccctctggcccccaggcctgtaactgtgaccagtacctaaaggtctccagggacatgatgaagcagctcatgtggctcagcagtcaccaggaggggcccaggagctcaggtgagtgtgtcagggtcaggcactgggtctggggggcctgggatgggtcgacctactgaggtagccagggagaggggcctggcccgtccagcactgagcttcctcagataagggtggcagccaggtgacgacaggtggaaaaaccacagccaggtgacaacaggtggaaaaaccacagccagggtcaggtacccagatggcctctgctcccttctgtgtggtagcagaccagaagatcaggacaccagggcccttggcgaccctctggagtggtgtgcacctccttctctctgctgggcccaggcatgcggtgcacacagacacacacacacgtgcacctacacctgcacacagcactagctgaccccagatgtccacccccccagggaaggccccagcctgtttccctgcctgggaaactagaaagagggcttctttctcctcctgtggagggtgcaggccgcccaaggactttgcagttttagatctgcacgggggctggaagtatggcccccgccccgccgccattagaactgctggcccctaccctcgggagggaggcgccccagggagggagtgaagggtgctgctcctggtcatcctcagtcgggggctggcacgggggctaagggaatggaggtggatagaaagaggtcagtccaggctgggcgcggtggctcacgcctgtaatcccagcactttgggaggccgaggcgggcagatcacaagatcaggagattgagaccatctcaatggtggtggctaacatggtgaaaccccgtctctactaaaaatacaaaaaattagccgggtgtggtggcacacgcctgtggtcccagctacttgggaggctgaggcaggagaatcacttgaacctgggaggcagaggttgcagtgagccgagatcacaccactgcactccagccttggggacagagtgagactccgtctccaaaaaaaaaaaaaaaaaaagggtcagtccaagttcagggtgggaggacggggagcgaccatcacccagggtggccagcagagcacaccccggagagcgaggctggaggtggcctccaacctcaggtcccccgctcgcaaagacacactcagaccagagccccaggacatgacggcacacaccccacccgagggtagtgggcaacacccagatgggctgacgagtgtgacagggactgcagggtaagagctggggccagccagggaggggccagatgagggtcatggcctcctgggcttcaaggaggagctggggctggggtgggggcgtggtgcattcatccccggccgcagctgatctggagccatctgtagcgaaatgcttgctgagcaaattacgagggtcaacaggagcagggcagacgcttctcccacctgctggccagtgttccctcggctaccgtgcactcagccccacagtgacccctgagtggataccggccctgcctgccctgggctctcaatgggggctcggggcctcacagggccagcacgagccacttcccagggtctccaacagaccctgagcctggcagtccctggggccctgcccacccgcccacccttgtgctggctgatttcgaaattcactcactggcagtgggcttatctgctcatcaccacaaatgggctgcccccgcccccgcccgccggttctcaggcccccaagagccctaatcagcagatctcgcgcctagaacatgtttcccagggacctttgagccccaagacctttccgaggtgtgagttcccaagggaggggaccaggccggtaccacagctccttggccccctgccctctgcccgtctgcgaaggctggggggtgtgtgaagaggctgcaccccatgaggtggctgtgctcagccgcatggctgcgtcatggaccccgctggctgccaagccccatccctaggacagtcccggaccagctctcttccttgactgacaggtgacgaggccacccagagccaggcggtgcaggagccaggtgagccccgggaccgcccaccaaggacacagctgcttctctgcggccctggtgccaggcttcccccagaatgggggacttgggtcccggccgggcagagggggctctgtggggctcctgtaggccctagggcctgcaaggtgaggggtggggtccctggataggagaagtgggcacagaagaggaagtggaggacgcagagtcagcggatagggagcagaaagaggagctgctgaggagtgagcgtgggctcagcgtgggccgccaactgcaccactctgggagcagcctgggggccgtgcccgaaggctgagggctcagggagtccacttctatctgtccaggcccagccccagacgcagcccctgagggctgcacctatgaccgcccctgccgctggctgcagatggctgacctgcgggcggagacaccggacatgctggccgacggcacccggctgcagctggcaggggtcccggtgggtgtgctgaggacacctgggctgcggtgcttctactgctgcacgggctgtggaaaggtcttctgggacggctcccacctgggtcgtgttgccacccacttccgagacatgctggagagcgcccccagcccctgcgagccgagcccagcccccagcccggccagcagtcccttctgaggacagccagacaataaacatggaaagtgcccgactgctgggcccatggccgtggactggctcacatgtttcatgctcgccccacaaacccctcgtgggcccctttgtgccagcaagcgctgggaacaccaaggcggggtcccagcccgagccgctgtcgggggaagacagggtttccagatggtcaggatgctgggaccccgagcctggtgggacccacgaggtctctccatcacccccgtcagggctgcgtgattcccacgggagagcagcagccacagcccccactagaggcacctgggcagccggccatggccagggctctgcacacgtggacgccaacgtctccgtcctcacagctgcctggacgtagctgctgctgcccctgtctgggaggaggctgaggcccaggcggccactgctgcccaccctgagggtccgagggtgctctgtcaggtggagcagggagggcagggggtcccagaggtgggagaggaggagaagcccggggagggaccatcccaggaatgtaccccctcccctcacccacatccttttcctctgcttcctgcctggagcggaaatcagctcagatttggccgaggaggtgggcggaagcctcgggcagcaggggcctgggggcgggctggggagaagcagccgcctctgcccagagtaaggagcaggcttcgggtgcgaaggccttgggcatccctggactggcccagtcggggcctccctgtgggtcccgaccacaccagggctggccactgcccctgggtacccctaaggactgcagcccaaccccttcagcccccagcaaccccagcaggggtgtcatttcacagatggggagggggaggctgagacggggagggcctggcctgtgtcagagccaactcgagttttgacctgcccccttgacctgctgggcagccgcagggcgtgagcctgagagtcaggtgggggcaccagggtgagcagagcagcaccccaggagagggtcagggccttctgggaccgggatctgcttccgggaggggaaccccagctccacattcctgtcctggggaggcagccccggaccgaactcctgcctggcagggtttaagagggagtggctgagggcacccaccctccacccggcctggctgcatcctgctcccaacacaggcccaagtgctgctgctggctctcggcagagggaggcagagtggtgcagaggccgcaaggagacagaaccacacatcctccgtccctcccggctggccccgcctccacccgccctcactttccgccatggccgtgctgtgccatatgtgtttcccgcctccacacgtccctcactacccagcataggctcggcctggctctgcggcgtccatcccaggcccaggctttggtgggggtgaggctctctgcccagttcccatcctggtccaggtgctggaagcacgcctcggtcactggggtcagcacccatcaggctgcttcctgggctaggggacagacaccaggctgaccgggtggccgaggctgccagtgccaggccatgccttgagcagccatcccggcgggcaggagccaccggttgcagggattgtctgcggcagttcctgcccgggcgtccttcctccgccgcggcctgtgctggcccgggctgagtgtttgttatttgatctcgatcctctcagcccttctaccaggtgtctgggctgctgggaagaaacactctcctctttcccacgctcccgacacattttaatgaattagctggaagccccgcccccactgcccgccaccctccctccctgcttagcgcctttaaggtggccgcaggcctcggcccagctctggccagctgccccttctgcgctgtcctccctgggccctcccaggcgggccggccaccccgcacagacctccctccccatgttgcccactgctctgagcctccagggaaggaaggaaagggggtgcatgcaaagagaaggggccccaccattgccttctgggggcaggtgggttacaggcagggcacccccggggccagcatcctcaggacaggcaggggaggaaggacagggcccagctgcacagtcggagctgagcctgttgccaggtcccagggcagggcctcccagacagcagaaggctccaagcaacaccggcaaacaccagggggtcctctcgagcacaagtactgggtggctggaggtggacccccgtgtcccagcatttggaacagatgtccaccttttggatgtccctcagcaaacattcgggaagtgctgactcagagctgttgcccccccggcccctccccccttcccatcctcaaatggagcagcttcagggccgtgggtgtgcccaggggagctgggagccacggtggaggagcaggagccagggccactcagcgaactccctgtgggcagtgtggtgtggccagcctctgagtcccacagatgagcctgggtacctgccttgggccacagccacactgccgtggcaggccccaccacctctgcctgaccccgctctggaccccgggcagggggtaggttcccgccctgcagggccgccacaccagcctcactgtgcctgccggggcgcccgcaccgcctggccctcgccaggggccgctgccgatttcacgcccgtggcggggccccgcgttcccacaccgagctcacacagggcccctttgtttgccgccgccacggatgccgacggcactttctcccaggccctgctcctggcccacagcatagccaaatgccttctccaggcccggcttgagcccacctgggcttcggcctgtttgcaaaccacccaccctccaggggaggccctgtgcctgttgagcaccaagggctctgcccaccccccagtcatgccctctgcctcttgccagtctagcctggctgggccctgggcatatgcacaaaatccatcaatgcccaggacagagctcctgccctcctgacagtgagctcagagcaccctgcacacccagccctggtctgaggtccagagacacagccagcaccagggaccagcaggcagcccagcggctccccctccttaagaggccaaaggtgcccagcagagcacggcaggccaggccatgccatccctgccccgggcctgggctccacagcgcccatctctgttctgctgggggcctactccgggactccactgtgtcctcacctgcatattggggagcacccctccaccctccgtggcccccttgagagctcctgggagaagcagtgaggcccaaaggagagagctgaacagaaccagcgggatcacggccccaggaagaccagagcgagctctgagctgtgcctttgagggacagaggttcccagcccaccaggaggaccccagggcctcaggaccctgctccagtcagccagggtctgtcccgaagggagcctgcccagtttttcctgccagtatgggcacagcatggggtggggacacacccctgtggggagccggatgtggggacatggagctggtgggcggaagcctcctcagacaaggcctggcatgggggtctccccagcccgagctcagagctgcctgcgcggaattcccggcttggcttcagaaggaattcaagccccagcctgcctggcctcctgctccgcgcctgagaatcactcctccttaatttccaacgaccacagcgagttgtaaactgtaaaactctaatgaggaaatgcgctgtgcttcccctgctagtgcctcccggtcaattgttagagtggtcaataaaaatgggttttacagtttggaagccaggcgtttcagaattcccttctggccctggcgccacacctagccctgctcacctgggcaggacccatgtgtcccgcatgctggtgcgtgggcagcagagggaggcaggccgcggtcccgaccctcccgctgcgccccggcccggggcttcctcccgagaggacagcggaacccccttcaccgccaggcgatagaagccgcggtggccggccggaggcccctcgcatcagtacggttggggcacacataggctgagccggcggccatgaggctgcccgcgcgcgggaaggacccgcgtggctgaaggccccacgtcagggcctggagttgccacccgcgtggacggtgagcccggaggcgcgggctggccggggtcgccgcgcgcctctccgctcagaggggtctctccttcgccacgggcctgagatgcccgcgaaccccctgcccgggagaggccgccctcggggccacctggcggtcgcgctcgggtaccgggcaaggcctgggtctggctgctgagggagcttggaattaccccgggtggccggagggagaaggggcgggacgaccgcaaagnnnnnnnnnnnnnnnnnnnnnnnnnnnnnnnnnnnnnnnnnnnnnnnnnnnnnnnnnnnnnnnnnnnnnnnnnnnnnnnnnnnnnnnnnnnnnnnnnnnnnnnnnnnnnnnnnnnnnnnnnnnnnnnnnnnnnnnnnnnnnnnnnnnnnnnnnnnnnnnnnnnnnnnnnnnnnnnnnnnnnnnnnnnnnnnnnnnnnnnnnnnnnnnnnnnnnnnnnnnnnnnnnnnnnnnnnnnnnnnnnnnnnnnnnnnnnnnnnnnnnnnnnnnnnnnnnnnnnnnnnnnnnnnnnnnnnnnnnnnnnnnnnnnnnnnnnnnnnnnnnnnnnnnnnnnnnnnnnnnnnnnnnnnnnnnnnnnnnnnnnnnnnnnnnnnnnnnnnnnnnnnnnnnnnnnnnnnnnnnnnnnnnnnnnnnnnnnnnnnnnnnnnnnnnnnnnnnnnnnnnnnnnnnnnnnnnnnnnnnnnnnnnnnnnnnnnnnnnnnnnnnnnnnnnnnnnnnnnnnnnnnnnnnnnnnnnnnnnnnnnnnnnnnnnnnnnnnnnnnnnnnnnnnnnnnnnnnnnnnnnnnnnnnnnnnnnnnnnnnnnnnnnnnnnnnnnnnnnnnnnnnnnnnnnnnnnnnnnnnnnnnnnnnnnnnnnnnnnnnnnnnnnnnnnnnnnnnnnnnnnnnnnnnnnnnnnnnnnnnnnnnnnnnnnnnnnnnnnnnnnnnnnnnnnnnnnnnnnnnnnnnnnnnnnnnnnnnnnnnnnnnnnnnnnnnnnnnnnnnnnnnnnnnnnnnnnnnnnnnnnnnnnnnnnnnnnnnnnnnnnnnnnnnnnnnnnnnnnnnnnnnnnnnnnnnnnnnnnnnnnnnnnnnnnnnnnnnnnnnnnnnnnnnnnnnnnnnnnnnnnnnntgcgcaagggcaacacgcaggagctgcagtcgctgctgcagaacatgaccaactgcgagttcaacgtgaactcgttcgggcccgagggccagacggcgctgcaccagtcggtcatcgacggcaacctggagctcgtgaagctgctggtcaagttcggcgccgacatccgcctggccaaccgcgacggctggagcgcgctgcacatcgccgcgttcggtggccaccaggacatcgtgctctatctcatcaccaaggcgaagtacgcggccagcggccggtgatgcccgccgggaccccggaccccggccctgcgcccgcgtcgtctctgctgtaccttcccgccaactacctcggtgcgcgcccggctcgcaggccccgcacagaaggcccgtggccacggcgaatacggcgcgtgcgtcccggccccagggtccggcagccccgccggccgagcgcctccctgcggcctagccgggcccggccgggccggagcagcttcccacggcccccacccgctcgcctgcccgccgcctcgcgggtgggggcggggcgcgggctccagccccttttgaaatttgagtctcgcaaccagcaagttcggaatcccgagataccggatcctctgcgcaaaatgttttctcccgaaggtgaaaggcgggcggcgggagccgaaggcggactcggagcgctccgccgccgccttcaggacccgcccgcaggcccgggacgcgccgatgccggctgcagccgaggagcagccccgaggtccgaggtccgcgccgctggcgcgcggccgaggagacgctcggctgttcgctgttgctggtgttctaaactatttatcttgtgtgtgtacatttgtgggtggagtttgtgcgcctggtttttttgtttggaaaacactgcgtggtcaatgtggttatgggggggagtgatgcatttttttctagtcttaaaactaaaaacttgagtctaccatttcttggttgcactgaaaataccgcccagcctgatggtgttcccgtgctgtccctcccccttcccttctccccgcgtctacctccccaccccgttctgttccccctccctccttctccctctccctcaaatccgtgagttttggaagccccagggcctctctcccccgcccctcctggatgaggccaccatccccccaaaccggcttgttttgcagtttccccaggatcctggaagctcgctggcgctcgagggtggcggggacacgggggggtgggtgaaggttcgttaccttttctagtgcgttctatcatagttaacggttgcacacttttttaaaaaaagtaaatggatttgccacaattaaatgtcataacatttatgacagaatataaaatattaacatattttaagccaagttttaggtgtattttttgaatcttggttataaacccaattttaaagggcgatgtatccagcgttgtgaaggcaacagagtgtacccatatttatatttttataaaatacctataagactgtgaatctcttgtgctaatggctgagttaattgaaggatcgttttgcccctttttagcctcccagagcttcgaggactcaattcgaacccgaaatcctgccgtgggggaggggttgcgtcgagacctgggcccggggaggttctcctgcgtcactttctgtcctgaaaggcgcccttcctggtttctgtggctccaattttctatgcagccccacaccccttgttgttttgatcctgagaaataaaagggaggctgaattattcaaatttaaatgaggtttccccttcatggaagtgctgctgacccttcgtgcagaaatggggagcacttgaggacacaggtgggtggaggccctttgtgcgtggctggtcgtattcgggcagccctccgtcgctttttataaaactttgtgtgagaagaatatattgataatgtcagtgaaacaagcagacattgaaatggaggcacagattactccacaaggagttcttctgtatattttttctagatgcaaatacctttttaattatgttaattaatgttaagactttctaggcttatatcgaagctgtgtgtgggtcacggggtgatcactgctaactggataaagtttgtgcagcacattcctgagtgtacgatattgacctgtagcccagcgtgaaaaatttataaataaatttttcattgatctttttatattaaaaaaaagtttcttggtccttcttggctttggcacaagttgcagaacaccctctctggggacgagggtcaggctgtgacacggtttgtgggtgctgggtgcacaatgcttggcttgtatttgtctgaagacagagcctggtaaactcgctcccagccccacgcaacggccaagcccaacccggctgcacacaggactcacgaggacccagcacctccagcgtgcccagagctggtgtcacagcctctgctctgttccccagcaaagcagctgagacctccgctggagaggagagttcggcctgaagccctgcccactctgacccgctagggggtcatgctggaggctgcctgctgcacagaaagtgtatcttgtaaattggggggaaatcccatagctgctcactcctggcaggtagaaagtcccctggaggcacccgggagctttggaggcctgcacaggcctggagtcaaaacaccccaaagagcacagaccctgagttagacgagcatcggggccgggcactcccattcgcaagaaaggagagcagagcaggatggctgttgctggcacctgacagaaaggagcagagactcttggtccactcctgagatgcccttggggccctgggggccctgtaccgggctgcaagggagcacacccgcccccagcaagagcagccagcagagagaacttggagaagggcaaagaccgggagttacaaggtaacaacttttcaaacccctctgccgaatgtaaggggaatctgcttccctaaaccgtgtccgcagaagggctgcccttcccacaaactttccccacgcctccgccttcctactctgcactgccgccctgtttacccttggttttccaggcgcgttttccgtcggttacgcatttcctatcctgcagaatcggcctgggagatgggccagctccctgaagcaggctttgggaagtcttgccctgggccagcccgggaatgcccagccgttggaaaggagagtggccacaagaacctggacacgattggggtaaccagagaatgaggtcaggcagccccagtgatggccagggctatgctggaccactccacccttccccacccagggtctgaagaacaaaggtaacatttgttactggcattagcctgcaggtgggtggggtcccagccaattgcttgcccctgcaatatccgggaagttctcccactgcggagaggcctggcctggcaccaggggcctcccaggcacatggctgccaccccagggtactctttgcagctcccttaaattctgtcttctgaaagatacatttgactgagaaaggccttgtgctgctcttctctcgcgcaggaacaaaaggaagcctgcccgggcagccctgtgggcagctgaggagaggagggctgagagggtggagccctggagggggtctgcttcctccccaggtgtcgctgtgtacactgaccggcccggatgactggggacagcctcgctgacctttcttgccaggcacagccctagggggcaggtagacacacactctaagaccaggcacagccctagggagcaggtagacacactctaaaaccaggcacagccctagggggcaggtagacacactctaaaaccaggcacagccctagggagcaggtagacacacactctaaaaccaggcacagccctagggagcaggtagacacacactctaaaaccaggcacagccctagggagcaggtagagacacactctaaaaccaggcacagccctagggggcaggtagacacacactctaaaaccaggcacagccctagggggcaggtagacacacactctaaaaccaggcacagccctagggggcaggtagacacacactctaaaaccaggcacagccctagggggcgggcagacacacactctaaaaccaggcacagccctagggggcgggtagacacactctaaaaccaggcacagccctaggggcaggtagacacactctctaaaaccacaattttcttcccacctctgggggtcagatttatgaatgaaatctcagctgggagggtccaggtgttgagagcccaggaggacggtccggggacgctgagcacagcctacgggcttgtccttgttaggaagcccggggtagcacattcctagaagcagctcagtggagggggaggctggccacctgtgcgccaagagtgggcctccctggccacaaggggaggggggggcagctctggggtatgggcaaaaaggaggaagtacctggtctctgggtatggccaggtcgatgctgctatgtgtctctgatgcctgtttccctcctgagttcaggggcctgtgcacacgcttcttccagtgcttctgtgttcagcaggtcacttactgcagcagggtgttggtaggtattagcagctatggtgggtactggcctatggcagagttactggggagtccccaacccccctccccaggcaggcccctttgtggccagggtgagaaagaaggtctgggtggcccagcctacaccgtcagccccggcctcccagatctgcaggtgtgccttggaggccaggtgaggtgtccggccgagaggcacggaggacagccacggtggaggggctggcaggtgggggctgggtccctgggaacccctgagagaaaggagacagtcccggcaaggtcagggcctgccccacatcccccgccaggactgctgggctcccgtccaactgtctgtctctgatctgaccccggctggaggcaggaagcactgacgttggaacagacgccacggaaagaccaggaaatgcaggaagatggtcagctagaaagagtgatgtctgaagccagcaggcgtgggagccaggacacagcaggccagaggagggtggacaggacttagaagccagggagacgggtgcagggaaggaagagcgggaaggagctgcccgctggggtctgtcccccaaaggcctcatagctcagcacaggttgggacagaggggtcgtggacactagaacacccggcgcacagagcctccgacatcggtaaggccagctgcccctgaagctccctgagcctgcggggaggaggcagcgtccacctgggccttgaaggacgggaaaggaggccccgcgccagggacacctggggaaggaagcctgaggccgggatgcgacggcttggaacacgggaggggccgtggaaggtctgggaacctccgcaactgctgcttccagggcctccagtgcagaccctccggggcttggaggtccccgggaggccgccctccacccacccccgcacactcaggctccaccgcccggagccgctccccccgctggaaactcccaacacccgtccggcgcattcttctgccgggccgtccttccgaccgtcctccgcgcgtgcgtctgtcggtnnnnnnnnnnnnnnnnnnnnnnnnnnnnnnnnnnnnnnnnnnnnnnnnnnnnnnnnnnnnnnnnnnnnnnnnnnnnnnnnnnnnnnnnnnnnnnnnnnnnnnnnnnnnnnnnnnnnnnnnnnnnnnnnnnnnnnnnnnnnnnnnnnnnnnnnnnnnnnnnnnnnnnnnnnnnnnnnnnnnnnnnnnnnnnnnnnnnnnnnnnnnnnnnnnnnnnnnnnnnnnnnnnnnnnnnnnnnnnnnnnnnnnnnnnnnnnnnnnnnnnnnnnnnnnnnnnnnnnnnnnnnnnnnnnnnnnnnnnnnnnnnnnnnnnnnnnnnnnnnnnnnnnnnnnnnnnnnnnnnnnnnnnnnnnnnnnnnnnnnnnnnnnnnnnnnnnnnnnnnnnnnnnnnnnnnnnnnnnnnnnnnnnnnnnnnnnnnnnnnnnnnnnnnnnnnnnnnnnnnnnnnnnnnnnnnnnnnnnnnnnnnnnnnnnnnnnnnnnnnnnnnnnnnnnnnnnnnnnnnnnnnnnnnnnnnnnnnnnnnnnnnnnnnnnnnnnnnnnnnnnnnnnnnnnnnnnnnnnnnnnnnnnnnnnnnnnnnnnnnnnnnnnnnnnnnnnnnnnnnnnnnnnnnnnnnnnnnnnnnnnnnnnnnnnnnnnnnnnnnnnnnnnnnnnnnnnnnnnnnnnnnnnnnnnnnnnnnnnnnnnnnnnnnnnnnnnnnnnnnnnnnnnnnnnnnnnnnnnnnnnnnnnnnnnnnnnnnnnnnnnnnnnnnnnnnnnnnnnnnnnnnnnnnnnnnnnnnnnnnnnnnnnnnnnnnnnnnnnnnnnnnnnnnnnnnnnnnnnnnnnnnnnnnnnnnnnnnnnnnnnnnnnnnnnnnnnnnnnnnnnnnnnnnnnnnnnnnnnnnnnnnnnnnnnnnnnnnnnnnnnnnnnnnnnnnnnnnnnnnnnnnnnnnnnnnnnnnnnnnnnnnnnnnnnnnnnnnnnnnnnnnnnnnnnnnnnnnnnnnnnnnnnnnnnnnnnnnnnnnnnnnnnnnnnnnnnnnnnnnnnnnnnnnnnnnnnnnnnnnnnnnnnnnnnnnnnnnnnnnnnnnnnnnnnnnnnnnnnnnnnnnnnnnnnnnnnnnnnnnnnnnnnnnnnnnnnnnnnnnnnnnnnnnnnnnnnnnnnnnnnnnnnnnnnnnnnnnnnnnnnnnnnnnnnnnnnnnnnnnnnnnnnnnnnnnnnnnnnnnnnnnnnnnnnnnnnnnnnnnnnnnnnnnnnnnnnnnnnnnnnnnnnnnnnnnnnnnnnnnnnnnnnnnnnnnnnnnnnnnnnnnnnnnnnnnnnnnnnnnnnnnnnnnnnnnnnnnnnnnnnnnnnnnnnnnnnnnnnnnnnnnnnnnnnnnnnnnnnnnnnnnnnnnnnnnnnnnnnnnnnnnnnnnnnnnnnnnnnnnnnnnnnnnnnnnnnnnnnnnnnnnnnnnnnnnnnnnnnnnnnnnnnnnnnnnnnnnnnnnnnnnnnnnnnnnnnnnnnnnnnnnnnnnnnnnnnnnnnnnnnnnnnnnnnnnnnnnnnnnnnnnnnnnnnnnnnnnnnnnnnnnnnnnnnnnnnnnnnnnnnnnnnnnnnnnnnnnnnnnnnnnnnnnnnnnnnnnnnnnnnnnnnnnnnnnnnnnnnnnnnnnnnnnnnnnnnnnnnnnnnnnnnnnnnnnnnnnnnnnnnnnnnnnnnnnnnnnnnnnnnnnnnnnnnnnnnnnnnnnnnnnnnnnnnnnnnnnnnnnnnnnnnnnnnnnnnnnnnnnnnnnnnnnnnnnnnnnnnnnnnnnnnnnnnnnnnnnnnnnnnnnnnnnnnnnnnnnnnnnnnnnnnnnnnnnnnnnnnnnnnnnnnnnnnnnnnnnnnnnnnnnnnnnnnnnnnnnnnnnnnnnnnnnnnnnnnnnnnnnnnnnnnnnnnnnnnnnnnnnnnnnnnnnnnnnnnnnnnnnnnnnnnnnnnnnnnnnnnnnnnnnnnnnnnnnnnnnnnnnnnnnnnnnnnnnnnnnnnnnnnnnnnnnnnnnnnnnnnnnnnnnnnnnnnnnnnnnnnnnnnnnnnnnnnnnnnnnnnnnnnnnnnnnnnnnnnnnnnnnnnnnnnnnnnnnnnnnnnnnnnnnnnnnnnnnnnnnnnnnnnnnnnnnnnnnnnnnnnnnnnnnnnnnnnnnnnnnnnnnnnnnnnnnnnnnnnnnnnnnnnnnnnnnnnnnnnnnnnnnnnnnnnnnnnnnnnnnnnnnnnnnnnnnnnnnnnnnnnnnnnnnnnnnnnnnnnnnnnnnnnnnnnnnnnnnnnnnnnnnnnnnnnnnnnnnnnnnnnnnnnnnnnnnnnnnnnnnnnnnnnnnnnnnnnnnnnnnnnnnnnnnnnnnnnnnnnnnnnnnnnnnnnnnnnnnnnnnnnnnnnnnnnnnnnnnnnnnnnnnnnnnnnnnnnnnnnnnnnnnnnnnnnnnnnnnnnnnnnnnnnnnnnnnnnnnnnnnnnnnnnnnnnnnnnnnnnnnnnnnnnnnnnnnnnnnnnnnnnnnnnnnnnnnnnnnnnnnnnnnnnnnnnnnnnnnnnnnnnnnnnnnnnnnnnnnnnnnnnnnnnnnnnnnnnnnnnnnnnnnnnnnnnnnnnnnnnnnnnnnnnnnnnnnnnnnnnnnnnnnnnnnnnnnnnnnnnnnnnnnnnnnnnnnnnnnnnnnnnnnnnnnnnnnnnnnnnnnnnnnnnnnnnnnnnnnnnnnnnnnnnnnnnnnnnnnnnnnnnnnnnnnnnnnnnnnnnnnnnnnnnnnnnnnnnnnnnnnnnnnnnnnnnnnnnnnnnnnnnnnnnnnnnnnnnnnnnnnnnnnnnnnnnnnnnnnnnnnnnnnnnnnnnnnnnnnnnnnnnnnnnnnnnnnnnnnnnnnnnnnnnnnnnnnnnnnnnnnnnnnnnnnnnnnnnnnnnnnnnnnnnnnnnnnnnnnnnnnnnnnnnnnnnnnnnnnnnnnnnnnnnnnnnnnnnnnnnnnnnnnnnnnnnnnnnnnnnnnnnnnnnnnnnnnnnnnnnnnnnnnnnnnnnnnnnnnnnnnnnnnnnnnnnnnnnnnnnnnnnnnnnnnnnnnnnnnnnnnnnnnnnnnnnnnnnnnnnnnnnnnnnnnnnnnnnnnnnnnnnnnnnnnnnnnnnnnnnnnnnnnnnnnnnnnnnnnnnnnnnnnnnnnnnnnnnnnnnnnnnnnnnnnnnnnnnnnnnnnnnnnnnnnnnnnnnnnnnnnnnnnnnnnnnnnnnnnnnnnnnnnnnnnnnnnnnnnnnnnnnnnnnnnnnnnnnnnnnnnnnnnnnnnnnnnnnnnnnnnnnnnnnnnnnnnnnnnnnnnnnnnnnnnnnnnnnnnnnnnnnnnnnnnnnnnnnnnnnnnnnnnnnnnnnnnnnnnnnnnnnnnnnnnnnnnnnnnnnnnnnnnnnnnnnnnnnnnnnnnnnnnnnnnnnnnnnnnnnnnnnnnnnnnnnnnnnnnnnnnnnnnnnnnnnnnnnnnnnnnnnnnnnnnnnnnnnnnnnnnnnnnnnnnnnnnnnnnnnnnnnnnnnnnnnnnnnnnnnnnnnnnnnnnnnnnnnnnnnnnnnnnnnnnnnnnnnnnnnnnnnnnnnnnnnnnnnnnnnnnnnnnnnnnnnnnnnnnnnnnnnnnnnnnnnnnnnnnnnnnnnnnnnnnnnnnnnnnnnnnnnnnnnnnnnnnnnnnnnnnnnnnnnnnnnnnnnnnnnnnnnnnnnnnnnnnnnnnnnnnnnnnnnnnnnnnnnnnnnnnnnnnnnnnnnnnnnnnnnnnnnnnnnnnnnnnnnnnnnnnnnnnnnnnnnnnnnnnnnnnnnnnnnnnnnnnnnnnnnnnnnnnnnnnnnnnnnnnnnnnnnnnnnnnnnnnnnnnnnnnnnnnnnnnnnnnnnnnnnnnnnnnnnnnnnnnnnnnnnnnnnnnnnnnnnnnnnnnnnnnnnnnnnnnnnnnnnnnnnnnnnnnnnnnnnnnnnnnnnnnnnnnnnnnnnnnnnnnnnnnnnnnnnnnnnnnnnnnnnnnnnnnnnnnnnnnnnnnnnnnnnnnnnnnnnnnnnnnnnnnnnnnnnnnnnnnnnnnnnnnnnnnnnnnnnnnnnnnnnnnnnnnnnnnnnnnnnnnnnnnnnnnnnnnnnnnnnnnnnnnnnnnnnnnnnnnnnnnnnnnnnnnnnnnnnnnnnnnnnnnnnnnnnnnnnnnnnnnnnnnnnnnnnnnnnnnnnnnnnnnnnnnnnnnnnnnnnnnnnnnnnnnnnnnnnnnnnnnnnnnnnnnnnnnnnnnnnnnnnnnnnnnnnnnnnnnnnnnnnnnnnnnnnnnnnnnnnnnnnnnnnnnnnnnnnnnnnnnnnnnnnnnnnnnnnnnnnnnnnnnnnnnnnnnnnnnnnnnnnnnnnnnnnnnnnnnnnnnnnnnnnnnnnnnnnnnnnnnnnnnnnnnnnnnnnnnnnnnnnnnnnnnnnnnnnnnnnnnnnnnnnnnnnnnnnnnnnnnnnnnnnnnnnnnnnnnnnnnnnnnnnnnnnnnnnnnnnnnnnnnnnnnnnnnnnnnnnnnnnnnnnnnnnnnnnnnnnnnnnnnnnnnnnnnnnnnnnnnnnnnnnnnnnnnnnnnnnnnnnnnnnnnnnnnnnnnnnnnnnnnnnnnnnnnnnnnnnnnnnnnnnnnnnnnnnnnnnnnnnnnnnnnnnnnnnnnnnnnnnnnnnnnnnnnnnnnnnnnnnnnnnnnnnnnnnnnnnnnnnnnnnnnnnnnnnnnnnnnnnnnnnnnnnnnnnnnnnnnnnnnnnnnnnnnnnnnnnnnnnnnnnnnnnnnnnn

SEQ ID NO: 693 - DNA, 371 bp, Homo sapiens
tgcgcaagggcaacacgcaggagctgcagtcgctgctgcagaacatgaccaactgcgagttcaacgtgaactcgttcgggcccgagggccagacggcgctgcaccagtcggtcatcgacggcaacctggagctcgtgaagctgctggtcaagttcggcgccgacatccgcctggccaaccgcgacggctggagcgcgctgcacatcgccgcgttcggtggccaccaggacatcgtgctctatctcatcaccaaggcgaagtacgcggccagcggcgtgatgcccgccgggaccccggaccccggccctccgcgtcgtctctgctgtaccttcccgccaactacctcggtgcgcgcccggctcgcaggcccc

SEQ ID NO: 694 - protein, 123 aa, Homo sapiens
RKGNTQELQSLLQNMTNCEFNVNSFGPEGQTALHQSVIDGNLELVKLLVKFGADIRLANRDGWSALHIAAFGGHQDIVLYLITKAKYAASGVMPAGTPDPGPPRRLCCTFPPTTSVRARLAGP

SEQ ID NO: 695 - DNA, 109147 bp, Mus musculus
  misc_feature (1)...(109147): n = A,T,C or G
aaaacttgttggttgtgattggacgatgggtcagccagttaagttcttgcctcacaagagctgccgacctgagtttggatacccagcacccatagaagccggccatggtggtgggtgcctgtaatcccgccactgtggagacaggaggacctcagaagttttctggcatgtcatccaggttgaataagaggccttgtatcttaaaagaggcatggtcaagcctggcaaccgtcttgatggactgagttcaattcctgggacccccatggtggaaggaataaagactcccacaggttttcttctgacttttatatacacacacagcacttcagtgtgtgagtgtgtttgcatgtgtgtgtctctgtgtgtgtgtgtatgtatgtatgtatgtatgtatgccagcaaagtgagagcctaactccaaagctaaagtaatgttaaatttagccaggcagtggtggcgcacgcctttaatcccagcacttgggaggcagagacaggtggatttctgagttcaaagccagcctggtctacagagtgagttccaggacagccagagttacacagagaaaccttgtctgggggggggggggaggggggaggagctaaaaataaaaataagatggagaaataattgtggagaccacctagtgtttacctttggacttcatgcatgcacacactcacactcgtacatgcacacacactcgcacatgcacacacacattcactcatgcacgtgcaactttttggccgagagacccaaaaggtcgctaccaattatggtgctttagtaggtcagcaaacagaagagtcaatagtatcatccaggaaagcttagacagtcatgggccttgcttgataaatgttatcaataccagctagaagtgtcttctggccttcctcgggtgacagaacgccaggaatcgtctgaggaagtgaacatgcagacacttctgtagatggggaagaaaccctggagctggaagccgtgggagggaactctggccattccagcacaccagagcatctggaagcaggagcatctggagttgacggctagccttggttacatagtgactccaggctaacctgggctaccagaaactctctcttggaggaggaggaggaggaggaggaggaggaggaggaggaggaagaggaagaggaagaggaggaagacaccactgaaagaagttgggtaaaaaccactttggaaaactttcagcagattcatcaacttgaaggagggccagggacaaggagaacatttcttaaaggggccactgcctgtttctcaggtcgatcttccttcagtttattgcactggaggacagagaatagcgtccttggtagtactcagtgggtctcacccttgtgtggcaggctataaaaagatttgcttatttaaaaataaacaatgtttgtggtctggatccaaccctgctcacatgcttggggctgcctggtaagtgactgcagatgggagccaggctaataatacctatttcaggcccaggaagtgaggcatgcctgcagacccagctactggggaggctgaagcaggcctatcacttgagcccaggggttcagagtcagtctgaacaactttgcaaggcccaggggaagagctgtacatgtctttatcctttggtgtggcagcaaccagggtagcctaagagtagaggctgctgcttagcactctggatcgggaggctcattctagggcctgatatcatgtgaggcaaaaggaagaaagagattgaagggggtgtagaacatgctcagcagacagggaaatgaataaaatgggctctgcctgtcacctagcggccatgatgctgagatatgtgggtagcgggtggagatcagacccaagcagactttcaactggacttcttctgagaaagtgtcccttaagtgctacttgtgctggcacatgcctgcagttccagcatttaaggtcagcctggtctgcatagccagccacagcccagctagagctacacagcaacaatctgtctcaaaaagaaattttcttttaaaacaataacgtataaccaagtgtacaggggtgcatactcaggcacacacacacacacacacacaaacacacacgttttcctttattcgtggctcctagattttacgtggacatatgaaacctgccccagaaacagaagtatgactgccttaggagaaggaaggagactcagcggagcaggaggggtcaggagattgaggctgtggaattcaggattcatgaggaacattcttatatggaaaactaaagcatcagtagaagtcaaggttatttttaccaactgccatggatgtgaagactatagacaggctacatctctgaagaagatacccagacaaaaagagtgcagaggctcagtgctgtgcctgcctccagagatgcaaaccaaggccccagagagataccacgtcccactcatcagagggactgtcgtcagaaaagcataaaaaaacctcagataccggaggacaaacccccaggatgtctccatatcaggccataactagtaatgacttgttggcctgcgctccaacttgagggaaccctgagagtgaggtgctaagtgggtggagccaggtgtgttgtatgaatctgtttagataaaacaggaaaagcaggtaggtccatggtaagctaactcacactggtagttgccagggcctgaggttgaaggccgggaaatgacagccttatagcacatggtgtatgctactaaggtgatggaaatgtctgggtaccaatgggagcaagcagtggctaaacaagctgtgaacacagtatacatcactgaatcatttgcttcagaatggtgagttctagtcgggtgtggcagcacagacccgagattccagctactggggaatggctactttcctggtcctgtgatacttaccttgacctaaacagctgaggaaaggaagagattgtgtttgcttgattttgagacagggtctcactgtgtagactgggctggccctggattcagggatctacctttacagcctcttgagtgctgggatcagtgggataaaaggtgcacgaccctagctgggcagtggtggcgcacgcctttaatcccagtgctcaggaggcagaggcaggcagacctctgagttctagtacagccagggttatacagacacagagaaaccctgtcttgaaaaacccaaccaaccaaaccaaagggattgtgacactacactgggccagaagaaagagtttactttggcttaaggttccaaagggaaaagcagtaatggccagaaaaacaagctttctggcagaagcgggaagctggctcgtcacatcgttatacacacacaggaagcagagaggggacagaaagtggagtgaggttacaaaacatcaaagcttactccagtgatgtacttcatctagcaaagctgcacccccaaaagtatccataatctccccaaatagtgccaccaccaaaggagctacggttttaatacatgacctaccaggggacacacctctttctaaccactaccgggggcaaagcctatctggaccacctagggagttgcaggccagcttgtgaaacttagtaagaccctatctcaaagcacaaagttaaaaaaaaacaggcctggagctaggcagtgttggcagaggcaagaggatctctgtgagttcaaggacagcctggtctacagagggagttccaggacagccagggctatacatagaagccctgactcagaaatgaaggaacaaacgggactgggagagtcaggcatagttgtgtgtgtctggaattccagtacttgggagggggaggatccagtgctctggttttcttttctgctccatacccagtttgaagccagcttaaactacatgagatcttgtctcaacaaacaaacaaacaagccaaacagaaagtctaaagattaaaagaaaatagaaagccagccagtggtggtgcatgcctttaatcccagcactcgggaggcagaggcaggtggatttctgagtttgaggccagcctggtctacagagtgagttccaggacagccagggctacactgagaaaccctgtttcaaagaaaaagaagaaagaaaacagggctggggtgtggcctaggcatactaactacatttacctagtatctctagtactacaaaaacagatgaacagaggccacaaggcttgtcaggtaaagatgcttgctgccaaacctgcgctgacttgagtctgagcccctggacccacatgatggacagagagcctaatcccatacgttaccctctgaccttcacataagcactgtgccatgtccacaaacatacacagtaaatacatataatataatataatataatataatataatataatataatataatataatgttgagagacaagccaggccaggcatgttcacattcctgtaattctatcttgggaggtagagacaggatttccagggcaagctggttaacaagaacagcaaaatcattaagctttgtgttcaacaaaagaccctgcctcagtaaaaataaagtcccaagtagtaagcggtcaggggagatagctgatgctaacctctgacctccactttcatttacacacacatacatgcacacacacacacatacacacatacaagacagcttggcctggggcattttggttgtggctgtaatgtcaaagggctaatctgagacactcctctgtcttcagaaatttaagagccaaggtgaatgctgcaggagacagctgatcttcagctggaggcggagtccggggagttcctcccaggcgctagaaggactatggccctgtttagggccctgtttaatgaactgcagaggactcttgttgctagactctgttgctaaataggttggaagggctgagctgatgctatttaagaatacacatggatggagctggacgaagggaaaggaattcctctccatggaagttaagttctatcaaagcagctgttaattgatctactactactactactactaaaaccagcatgggggatgggagctaaagctcagataatggcgttcactgtatggcatgtgtggtatgtccgggattgacatttttctgccttattgtaattacagtgcttggccgagtagacctctggttctgttttaaaaccactacagttagatggactaggcacgccacacagtttgcctgtggtccaggtcaattccacaaacacattattgtgtttgggtgggcagggtgctgtgggaacccacagggaacctctcttcagattctccaagatgagatttctagaaatggctatcatggttttcactatctagaatccatctattctgaatgtctagttttattttattttattttttttaaagatttatttatttattattatatgtaagtacactgtagctgtcttcagacacaccagaagcagacacaccagaagagggagtcagatcttgttacggatggttgtgagccaccatgtggttgctgggatttgaactctggaccttcggaagagcagtcgggtgctcttacccactgagccatctcaccagcccctagttttatgttatatcagaaatagactggggaaaatagcctgtagtttgatgtgatttttggaggtccttattttgggcttcttgtcattttcgtctgattttccttgctgaggatcaaacctgagacctctcagaggctggaaagtactctacccaacctgcttagtgcttttctatttttattttttagattgttattattttatctcatgtttttgaggcaaggtctcatgttgcccaagctagccttgaacttgttaagtagctaaagattgcctcgagctccctgatccccccccccccgccccccagcccccaagtattagcattataggctgcaggtcctctgcaagagcagccagtgctcagaactccccttcgctatctccctagcccagcagatcccttctcatcgaacccaatcaccctctgaccgcttctgtagcaggctttccttttcctctctgctctcgcaaacagtgccccttgaacacagcaacacaatcattttaacatttctgtttccgacacacttacactggcccgcaccaccatgaaactcaagcgcggagaactgagctagctgtaccacaggttacccgtgggcacagcgactggggtgccctgccagctcagcaggggtgcggtccagctggagcagcggtttccctgcactccctctgaatgccttaccagactcgcaggagatgaatgctctaggactttgaaacgctgccatcttttcaagtggcaggccgcttttagcccttcatccctgggctacaggaacaccaagagaatacaaactaggatgggtggtggatgctggttcagtcagacagactcagggcggatgtcctctgttagggaaactaactcaaagtactaccagatacgcatggatttccacttgtttataggaaagcagctcatctgaccttgctcccctggtgggcacggctccctgacttctatctccagcatcatggaaaatgggcatggggccacacaactaaatctctttaagaacaaaaaccaacagcagtaagacccccatgggtagctattgattatgtggctgaggggaccttgaacccacagttctcctctatctctccagtgctggaactacaggcctgctccgccatgtctggttttatggggtgctaaggactgaactgaaaactttgtggctgctggtcaagcatctcccaggccacagagtatctgtcttttgtttgcgagtttacattttattttatgtatggatgtcctttgtgggtgtgtgtagaggtcagaagaaaacttgtgggaattggttctccccttctaccacgtgggtcttgggattgaactcgggtcattaggcttggcagtgagttccttagcctgctgggccatcttgcaggtccccaaagtacctatttggatgtattgttgatgtacggttggcatgggaatgaacgagtcattctgccttggggacagagtcaccccactggtgtggcttgtatcacacaggcattgattcacagggcttcccctcttagtattcagattgggaacttcgatgaaaaccacagcccagcagcctcactccctgaatctcgatagcagttggggtttttggttttttgttttattttgtttttgtttttaaaatctattgaggtcttgtgaaaacagtcccatgtttgtatagatgaagtcagtaatgtgcccatctgaccacttgaaaatcttgaggtttcttctgtttgtcaggccacccccctcaaagaccaaaatgaacaacaaaaataagcctgtggggtaactcacttccttccagttaataccagccaagtcagaatttttaaggcagatttgggttccagatggagcagccgtggttatctgattggaaatctcgctcactgatttgtgctaaatatcagagcaaattacaagactggccataaaaaatgatttattgaaacaggatctcctctctgtggaatcctgactgttctggaacttccctataattcccgcacttgggaagcagaggcaggcggatctctgagttcgagccagcctggtctacagagtgagttccagcacaaccagggctacagaaacatgcctcaaaaaaaaaaaaaacaaaaaaacaaaaaaacaaaaaaacaaaatgaaacaccagcccaaaaaaaaaaaaaaaaagtgacctaaaatgcttcttaaatcatgccacagatgtgacctacattcggagtcactgtcaaacccaggaaggccatgtatgaaaacaattcagaaagtctccctagctgccagctcctgttggcttttctctggggaaaaaaatggaacagtttgactcacccctgcctccctagaagaggatgactaagaacttttgattcaagcctggtagtggtggcacacgactttaatcctagcacttgggaggcagaggcaggcagatttctgagttcgaggccagtctggtctacagagtgagttccaggacagccagggctacacagagaaaccctgtctccaaaaaaaaacaaaaaaacaaaacaaaacaaacaaacaaaaagaacttttgattctcccagctccacatgcctggtcctaggattatgggctttggcacccaggctatgaaacactgggatggggcccagggctctttgtgtgctacacaagcactctagaacctgaagcacttcctcaaccctcgattggcatgtgtgtgtgtattagggtttcaccaccgtgaacagacaccatgaccaaggcaagtcttataaggacaacatttaattggggctggcttataggttcagaggttcagtccattatcatcaaggtgggaacatggcagcatccaggcttgcatggtgcaggaggaactgagagttcaacatcttcacctgaaggccgctaggaaaagactggctctcacatggttaggaggagggtctcactgcctacccccacagtgacacactttctccaacaagaccacacctcctaatagtgtcactctccaggccaagcatattcgtgtgtgtgtatgggaacatgtgtttatgaaactgcacacccatatgaacacatgaaggaccaaggaagatattggttatcttgctctaaaactctgcctcatcatctcagggcagggcctcagtgaacctggagcttgctgttttccagcaaggctagcagccagccaggaagcccagcagccatcctaaccccctaccacacacctcagggttggggtaccagggacacatgcagtggccctgcttcacgttccactcagtgatggggctccaagctcggttcccatgcttgctgtgcaagcactcggagccactgagccatctccccagctctggtcaacttttacacaaggatttatttggttttgtggacagtttcctcctggctggccttgaactcgaatatctgcctgcctctgcctcttgattgctgggactaaaggtgtgtgtttaggaattttcagcatggaaataacttcttgatgcctaccttcaaagaaagccacgaagacatgaaattagaaaggaggcggtgcttcggaggatggtgtgttgccaggcagctagtgtctgtccatcatctgccctactcacaactgtcatgtccaaggaccaggagatagctcagtggataactttcttcataagctagatgctctggattctaaggatagtttcctgtattcccaactagccttgaacatttatgtctgccacacgtgcttgcctggtacctgtggaggccagaagagcacatcgaattccctggaactagagttacccatggctgatggctgagagctgccacttgggtgctgggaatcagacctgggacctctggtagggcctcgggtgcttttaaccgctgagaccatgactttgaagtgctgacccttctctctccacctcccagtgctaggaataccaccacagctggattatgcagtgcagaggatggaacccagggctttgtgcatgctaggccagtgctccactgactgagccacatcccccgccccatgagttagatgtttactagcttctcaagagcagcagactttcattgatgacagttgcagtcttcttgcagagcatctgccactcattatcctgcttctcagaatagggagccatgcacgggaacagctgactctgaccgatgcccagagcggttcagtaacgggggtggggtgggggtggggggtgttcctttgacttgagcatgcattcagcgaatattgattggaggatacccaggctttgtgcctctggacctgtgtaacaggatgtggtgaatcccacacagtaagaaggagggggcccgtctggggttatacaagccatgccagaagcacatcatggaagatggcctgatgaaaggggagatgcttttggcggtgggttggacatgtaaaaagatggtaaggtggtgaaaaagaaatcctgggctgtgggtttctgttttcattttttaaattcattgtgtgtgtgtgtgtctacaccacagcacacatgtggaggtcagaggacacttgtgggaatcagttgtctcctaacaccacgtgggacccagggatcaaactcaggtcgccaggctacaaacatctggcctctctatttcatgttaagtggcctgtttataaaaaaacttttttccttttagtaaaaaatattaaactgaaacaaaatatctctgctattttagcatgtggtactgtctaagaggaaatgaggctacagccaggcaaaggtagattttttttttttttttagagtgtgtgtgccagtgttctcttgggtggggagcacgtgtatgcatgtgtgtgcctgtggaatccagaggttgacatctgctgtccttctgagtcaccgctttatttactgaggtgggggttctcactgaacccaaagcttgctcgttatgttagtctggctagctggcttggcccagagatctgctctccacctcccatagttagttatctactgggcttgtgtgtgggtgctggaggtccaaacatgagtcttctcaggagcacagccttctccgcggggtcctatctccagtccccagatgttattttcataatagatcttgctttgcatgacttccttagttgcctttaaagtaatgagctgtgaaccaagtccatatggtatgcataggtaaccacaaagagatgtttgctgaggaagctttggctcttatacagaagtgtaaaatggcatggggaccttccaggacctgccccgaaggtcaccaagcatttagtctatgcatcaaaaactgtcttagccagtttggtctgctgttgttaaagccataaaatcagtggctcatgagaaccatttatccctcccgcttctggatactgaaggtccaaggtcagaggctcgcagacatatggtgtctggtgtgggaccacttcctggcaggcagacactaggcactgccttatcatttaaaccgatcttagcagaagttagaaggaagctgccgttactggggcagcaatcaatctattcatatcatgaaggcccctcttagtttggattggatttgggtcacgtataacattcagtctatagcaattatatataaaatttccttctttttttttttttnnnnnnnnnnnnnnnnnnnnnnnnnnnnnnnnnnnnnnnnnnnnnnnnnnnnnnnnnnnnnnnnnnnnnnnnnnnnnnnnnnnnnnnnnnnnnnnnnnnnnnnnnnnnnnnnnnnnnnntcagttctctcctactgtgtggagtcaggattcagactcaggttgttagacatggtagcaagaactgttacctttgacgcatgcctttaatccgagcactcgggaggcagaggcaggcagatttctgagttcgaggtcagcctggttttcagagtgagttccaggacagccagggctacacagagaaaccctgcctcgaaaaaacaacaacaacaaaaacaaaacaaacaaacaaagaactgttacctgctgagccatctttcaggtccctacaaaaaataaaaagaatttattcaaaatgtaacacttaattacctgaaggtataagagcttccccaaaacaatacaagaaatacaaagtccatagaaaatgaggaagtattaagtataggaacaagaggaaactccaaaggctggggaggctcagtggttagataggtcagggttggtggtggtgcatgcctttagtcccagcacttcagaggcagggaggtctctgggaacctgaggctaacctggtctacataagaagttccaacgccgggcttgaaacagtctgtgctggctagttttatgtcaacatgacacaggctagagtcatcagagagaagggaatctcagttgaggagatagatgcctgcagaaggttgggctgtggatagccctgtggggagttttcttaatcagtgcctgtaggggaagcttgatggcctcggctgcagctcctgcctccaggttcctgccctgcttgagttcctgtcctgagagccttcattgatgagcagtggaagcataagtcaaataaatccttaactccccagctcactttggtcatggtgtctcatcacagcagtagtgaccatggctaagacacacagagcttatgttacttattgtaaaaaaaaaaatttgtgcttacaacatccatgaacattttgattgacagggaattaaattatctacactcttggcttttagacaatattaagcctgaactttctctcctttcttcctctctctcttttttaagttgtgtgtgtgtgtgtatgtgagagagaaagagagagaaagagaatatgagaaaaaaatatgagagagagaatatgtaccagtgtgcagagaagccagaagagaagaagaggacacggagctggggttatagatggttgtgagctgtgggtgctgggaactgaacttaggtcctttggaagagctgcaattacttttaacctctaagttatctttcttctcttcctctcccccttctctctctttctctgtctttgtctctctccctctccccattccctcctctccccctcccctccctctcccatccttcccccatctctctgtctctttctttctcatgacagggactcaccgcagcccaggctcaattcaaacttatgatgatccaatatgcccaactaccctgattgatttttaaggttttttgttttttgttttctctttccctaagtgtgaaagcttgtatgcaattgataaacaatccatatgtgggcgtttcttggtgccattttctgaaggatgatttcaatttttttatggagacaaaataggaaatgtatcaatcaaagaaaaaaatcatagttcaatactttgtgacaggctttggaaaattgatgtcggtatctctcttccaaatgatttgtcttcatttttttgtcactggttggcagaggctccagtagccttatgtttctgtcatcctgaggattttcccatcagcccaattacagataagctcataaatgtttacagactaaatatttgtgacatattacagagggatatatgaaattatgtttttctattgtgtatctgtacacacacaagcttgtgcgttgggtgtatttatattggaatggcgccacgattagcttccttgaagtttgtgatttttttttttttttggtttttttcaagacagggtttctctgtatagccctggctgtcctggaactcacttcatagaccaggctggcctcgaactcagaaatccacctgcctctgccttccgagtgctgggattaaaggtgtgagccaccacgcccggctgaagtttgtgattttgtaagcacacttatacctagtttattgtttggggcagagggcagtgtatccacaaggccagaggctgacattaaatgtcttcgtcagttgctctcgtacatgttttttttagacaggctttattagcaaatcaggagcttgctagtttagtgacactggctggccaggacatcttcctgtctcttcctctcgggggctaggatcccaaacgaggcttctaggcttctgacacgggagatgctaactggggtcctcatatttgaatagcccaatgagccttccctcttcatccttgtttacttttatgtatgtgtaagtattgcaccatgtgcctgcagcggcccttagaggtcagaagagggtgttggaccctggaagtagagttacaggctgctgtgaactgccatgcgggtgctggaaactgaactcaggtcctctgcacgaggaagaaaaaaatattctttacaactgagacatctctccagccctgcctatggtggagtttttgtttggtttgttttgagacagggtctcacatatcccaagttgctctcaacgttgctgtggcaccaagaatgtccttgaactccggatcttccaacctccacctccctagtgctgggtgtacatgtgtgcactgccgttcttggctgaaattcttcattttgtgaagtcttggttgttgtgtaagtctctttccttagtgtccgtgttgtgacagaatgcgtgctttagtatgtctgtgtagggcaaaacatttgtatatttatttgcttcaaacgttggactggtgtgttttttttccttgcctctaagacaagctcttgcttatgtgacagccgttttctcactgaatgtagagcaactggtaatacttgttgctaattatagcattctgccttctatgtaacaaattagaatacccggaaaagaggagacagtcaatgataacacgaatgcaaataaattctttttcttatggtagagtaacttcaatgtcaatacttagaagatccacatatatcaaggaaaatattttctaaatgaaaaccttgtgtgcttgctgtcataaaacataatgaaaagcagcttggggaggaacgggttcatttggcttataggttatagtcagtcactgatggaagccagggcaggaacttggaggcaggaactgtatgtagcagagaccttagaagaataccgcttgttgactcagcccctggcttgctcaggtgcctttcctattcagcccaggcctacctgtgtagggatagcactgccctacaaaggagggctaggctaggccctccgatgtcaattagtaattaagttaaaagccccacaaacagttcataggccagtctaatggaggtaattcctcagttgaggttccctcttccctggtacatcacgttgacagctaaggctaactatgccaccagtgaataataggtaatggtgcccagtaaaagcatcattttcagtgtaaggtggactggtgggtttcattgtaactgtcaaggatgttttgttgccatggttagttactatggctgcagatatcatatggtgcctactctttgggaaactattggtgtgttacccaaggaagagatccggctatctgcaaaggccattgagctactcttcttagggctgaggatgtgaatcaatcaatgtatagccagcgcccagtatgccaaggagtttacccacagccccccaccacacacacacacacacacacacacacacacacacacaccactttaaaagggtaaagacttgatcaggtgcacacctgttataccaggacttgagaggtttagaggccgaacccaggagtccaacatcatttgtggctaggccagctagacaggccagctctcccctgaccctcctctgcctgcctgagtgcatttgtctttcttcccagcttcacctcatcaagaatggccacagaaacagaagcagccagtctctgtgaggctactcttcccactagagagttttgtttagaaaactgcagtttctaagcacaaaaatggttgacctcggatacatgacaatccttccattgcagcctcccaggtgctgggtagcgggctgccccacctgggcacatcaggaaggaatatattctcgattctcgataacaccaccatcctcgctggagtctgggatagttttctaaggaccatttataatgtttgccacaaaggagtctttttgagatttggaatttcttcccgttaaattttccacattttagtcaagaatgtaagtgggccgattggtttttcatctgttttgaattttcctgtggctgccttgtccttcaatagtagcggtggggcgtggtcccttcagggatgccttaacatcgcctacggaggatgctgcgtggaggcagcaggcattcatgtattcgttgctatttgaggctttgctgtgaggattctctgtcctgtttggatcctgtgctttgagaaatagctttactacagttggcaaagtggttttggtagctgataactgttgaaagcacattgctgaggtctggagtgtagtgcagctgatagagtgcttgcctcgcatcacaaagcccctgctttgatcgctggtactagcttggcgatacatgcctgtcattcctttgtgtgggaggtagaggcaggaagatcaggagttcagggtcatcttggcttcatagcgagtttgaggccagcctggactaagtaccaccctgtctcaaaactaaagccaatggaaacataactggtcagtgaactttaaagggaactcaggtttctttttgtttgtttgtttgtttggaagaacttaaggctatccacccttgctatagagagtgtcaggcagctgtctcagggagactgtcagcgagacagtaaaatccaagagcagaagctgtcagagttttcagaggtaatggcgctgtagagaaaactcaaggggaggcgggaagggaagacttgtcttgttttcactgctgaggctacaaccttgaacttcaccctttgtactactgagctccagccccagctcgtgacatatatatcaatatatagatatagatatagatgtagatgtagatgtagatgtagatataaagatatataggtagaaagatagacagaggatatgatatattggagggatgtgtgtgtgtgtgtgtgtgtgtgtatatatatatatatatatatatatatgtgggggacatgtgtgtgtgcgcacgcgcatgtgtggggaggccagaggttgacttcagctgttatcttcagacacaccatctaaacatctctttagatacagggtgagtaagctggctggtgaaccccagggatcacctgtctccatctacccagcactgggcactttgacctgggtgttgtggatcagacatggtgttcatgccttcaaggccagtgtgttaaccacagggccatcaccccagctattacttttctgtaaacctggccgatatgaaactaaaccaagacagggccactgaccaacagagtacttgtgggaagtctcggcctgagtgctgggagctcttcattcatagccatcacttgagttacttgtgtatttgcctcttccggttgtttacagaaacctgccgtcttgtttaccccgctcatttgctcagcaagcctcctgtagagataacataaataaataatcttctgagcagtgtttcttacaatggactctgggaggcgtgggggtggatcgagaaccaaaaaaaaagtgatgagaattttaaatcttcgtcctttgatttttacgacaacattttaaaagatgggttgtaaggaccaacacttttcacaggagttatcttcagggcattttagtggcacaagactccgtgtgtcctaagttgacacttctttgttctctgctcctggctacaagcaaggctaaggtcattaatctatagatggtgaccgtaagccagtaatctcagcattagctgtcaacttgatagtgtcacctaagaaaaagagtctcaattgagggaatgtgcacaccagatcggcttgtggacatgattgtgggtgcttgctttgattgttcattgtttcgggaggatccagcccactgtgggtagcaccattccctagacgggtggtcctggacctcataagaaagctagctaagcacaaggctctgaacaagcaggcagtcagcaccctccacagtttctggttgagttcctccttgaattcctgtcttgcctttcttcagtgatgggctatgagctagagtgtaaaccgaagcatacactttctcctctctgtcgtctctagacagggtgttttatcacagcaacaggaaggaaattaggacacatgactctgattgactcaaggctgatgcagaagcggaaagcacagctcagctccagccttcaacaaagctgtgttgtgtttgaagaggtcgcatcacataccagggatcgagacaagagaaagcttttagaaggggtgggtgtgtatttgtggggtagattgtggagatgattggtatcatgggcacacacttaccttcagacacttcgggttatatgtgttaagtgtgtatagctttccttgttgttggcagaatctcattatattgttcaggctggccttgaaatcttgggttcgtgtcctcctgtctcagcttcccgagaggtgagattttaaatgtacacatcactgtgtgcagcctctttaaaaagaagattttattttatttgtgtggggggggggggggtgtatgaaagggtcacagcgttgggaagattgaggccaccactccagggcttccccagcccccacactgcccacacaggcttgcagcacttcctagactttttcttagagtttaatggaaacagtctcaaatgggtccagtggcttagggtccaggttctcattgtgcccctcaggttcatggacatagacaggaaggtgggacggtacttatatgacaagatgcagttcccacccacttcccaaccaccagctacacacatctcactacacatctgccagcaatgcaccaactacacacatctcatctcactacacatctgccagcaatgcacctacttgtactcctcctcttccttcgagttcttnnnnnnnnnnnnnnnnnnnngttggcttgagatgggggggggtttctctgtgtagctctggctgtcctgaagcccccctctgaagaccaggctgacctcagactcagagatccacttacctctgcctcccaagtcctgggattaaaatcaccagccctggtaggcgattttatttttaattattacttgtatgtatatgttcatgagtgtaggtttgaccacgtaagtacagtgcctgtggagatcagaaacttaagatcccctggagttttacaggacaaagagccatatgcgaccttaaccgttgagctctctcagctcccctccccctcttgtgagatggcttcttattgtagaccaggctgttttcaactttgctatgtagctgagggtgaccgtaagcttctgatcttcctgcctctactttccgagtgccgaatttacaggggtgcgggccacacacagttcctgagggattagagatagaacccagggctgcctgggtttgcactaagcaaacactctaccaactgagctgcagccccagcgctgtgccagtggcagtcatatctcagggatggggctggaaagaatgcccgaagtgtgccagttatatattgcatgtcttaagaccttgcatgttttagagaagtgaagcagggattcctgggcatgccagggacacctagcagagctgttgagactgtgtcagtgaagtcctggagctggccagaccctcgttctctcctgaggctccctctgaggcagcagcacgcctcccatctgacctggctcgaaactcttcccgggatgctctaatgcattctctggctctgttccattgctctccggctccgcttcctgggccagtcctccctgctgctcctgtgtgaggctgtcctccccctggcactctgatctgtggctgtagcctcagaccatccacttcccgacatcctcctgcgagcttggtccatctgtgcttgcaggctctgctgtgtgtaccaaaccctttattcacatggccaaagtgcactgagtcttcctcccctgtgtggactatttctttatgtgcaggaagcagacccagactcaccctgaagcccttcccccttttgcttgcgtctccctcagagtctgcagccaatctgtcacttacagtagcatttgccaagtgtcagcatggcttcctcctgctgctctcaccttcagactgtggggacagtctccgggcagatctgtggtcacgattttgcagagcagcttgtgctttctaaagggtccaagctccttctctgtgcattgaaggccttggaaaatctgaccctacaccctctccagctccatcacccctgcccataccctggtgccctcccagcctcacctgcactcaagggacacaaacccatgggaatcccggctgtctccacaaccaggcatcagcagtggctggcacacttacccatctccctcttcaaagcagaaacccctagcctctgtacaaggtgtagtctaacctcgttcagttttggttccctgggtccaattgcttttttgtctgtgagacatagtgtagcgaagtccacagtgagatgtcttactcacttgagaaaaagcaaaatgtgataactgtaccctgaccctttctgctctccaagtgcaagcagctggttctttctttaaaaaaaaaaaagatgcagggtgggatacatgtctttaagcccagcatccctgaggcagaggcgggtggatctctgaattccaagcccctggccacttatcaagttccaagccagccaaggctacatagtgagaccctgtctcaaccaaaaagaggggaaagctagagagatgacccagcagttaaaagcactggctgctttttccaaaagaccagggttcaattcccagcacccattactgcctgtaactctggatccagggacccgagaccttcttctggttagcatgggtaccaggcgcacacacttggtgcacttacgtatatacaggcaaagcacccacatacataaaataaatataagaaattattttttattttattgggtaagtgtgcgcacgtgtgcatgagggtacttaaggagtctaggaagggtttctgatatacaggagctagagttaaactgtgagctgcctgacatagatgccgagaagcaaactctggccctttgcaagagcagtaagtgctctttactactgagccatctcgtctgccctagagtgctcctatgtgtatgtgagtgtgtgtgtgtgtgtgtgtgtgtgtgtgtgtgtgtgtgtgtgtgtgtgtgtcacctgtcagcttttggcatctgagacattttcttttgtaatggaacattaattatatatagacccaatgtgtctaaaaggaggagagagcagggatgctaactctggacgatgctcaaaccaaatttggtactgttgatgtaaagctctcaacagacacccccaccctcagtggcatcatggaaaatgctagagccgctgtcttggaccagtgaatgatggagagggtggctccctggaactggaagccatagagagagacaataaacttcccccttctctctctcttttcaaacaggatcagtttgacaacttggaaaaacatacacagtggggaatcgatattcttgagaaatacatcaagtttgtcaaggagaggacggagattgagctcagctatgccaagcaactcaggtaaggcagcccggagagacggctggggtgttgcacacacaaaaggctcatttctcttttttattaaaacttttattacatttatttatttatagggcaggggagtgtgtgccggggtgcttgtgtggagttggaacacaacccaaggagttggtttttctctccttctatggtgtgagtcctggggattgaactcagatcatcaagcttggcagcaagcctccccaccccacccctgcccccatcttgcctgccagaagcaagcaagcatgatttctgttctcatttcactgtgtgtgtgtgtgtgtgtctgtgtgagagagggagagagagagagagagagagagagagagagagagagagagacagtttcttgtgaagtaatatatcactggaaatagctgtgatggaaaattaatttttatgaaagcaaaattaaaaaaaaaaatctgttaacttaggtttgctcagttttcatgtgtgaggcaaggcctcatgtaacccaggctagccttgaactcattgtataatggagtctagccttgagctcctgcctccctgccttcacttcccgagtcctggggttccaggtgtgcgcctgagctcagtccctgctttaggtactgtgttttgttatggtttcttttgctctgctgtgttctggtttatttggcagcacttcccaatgaagccagggtcttgtgcctctatgtaaatccccaccccaactccatcctctgcacccggcctctaggctcaggtgtttagatttttatcctttttttttttttttttttttgtttttttgtttttgtttttttttgtttttttgttttttttttttttgagccagggtttctctgtgtagctctggctgtcctggaactcactttgtagactaggctggcctcgaactcagaaatccgcctgcctctacctcccgagtgctgggattaaaggcgtgcatcatcacacctggcggatattttttttcttttaaattttttaaaaattgtatttacattggttatctgcctccatgcatgtctgtatgagggtatctgatcccctggaactagaattaaacagttgtgagctgccatgtgggttctgggatttgaaccctggtcctttggaagagcagccagtgctcttaaccactgagccatctctccagtcctgtttttgttttcttttagtgattttttttcccctttaattttggagaaacttggctaccagtaaatttcacattggaatacccatttgtaggtgacccccacacgtagggctctcaattagcccagcctcccaaggatccccaattctcccaagtaacttggctccacagagtctgctgtgagtttccctcggaggtgagccctggctgtaatccttaagagtccgactttgtcctgcaccggttgtaagcttcgtctgcactgtggtcgtttgtttgttttcattgcctttatcgttttgtgatgcgggtcttcaaggtttcttgggtctgctgtcacttggaagctggctgtccccattcctggtgattcccccctcttttttttctcttttaaaatttaattacattatctatttatcttgtgtgtggaggaggtgaacgtgcgactgctgcatcctgtgaggtcagaggacaactcccgggaggtggttccctccaccatgcgggtctctgggattgaactcaggctggcaggcttggcaccaagcgcctttgcccaccgagccatctcgccagcccagcacactcccgctgtgcatatctgagcccttttcttcctttattgtaggagcaggactgtgttgacagagtgaaactctgcctggctttagtaagacttggactagttagtgtttgcagtgggaatagtcccaggaggcaggatttgaaaagaactgtcctaaagaagatcgattttagctagttccaggcacctgtccccaaagagacaagtcaaagtaaaaaagcagagaaaggagactcgccacactgggaagagaaaccaggaagtccagaggcctccgagtctgtccttgggtcctgacaggtcatgtaaatataaagcaagagtgtacagggctaggcagtcttggtccgtcatggtctgttcatgtcttagctctagtatgtcctgcatggtgatgataaggtgtctgaagttttcatcatcacaataacaaccagtgtgtgtgtgtgtgtgtgtgtgtgtgtgtgtgtgtgtgtgtgtgtgtgtgtgtgtgtgtgagagagagagagagagagagagagagagagagagagagaagtgtgtatgggaggtgtggagtatgtgtgtatatgtgtgtgtgtttcgtatgtgggaagtgtttgtgtgtagggggaatatgatatatatgtgtgggaagtgtttgtgtgtgttgtgtttgtgaagtgtgtatgggagtatggagtgggggggagtgtttgtgtgatgtgtatgtgtgtggtatgtatgcggtgtgtgtatagtgtgtattgtgtatgtgtgtgtatgagtgcatgcctgcatatgtgtgtgtgtgcgcgcacacaggtcaaaggcaactccctggaataggttttctccttccacctataagcatgttcctgcccttccagcccagctttagctcttttagccccagcatgaagttccttgggacgttttagtttctcaaaggccgctgtttgaaaggaataaggcatgcgtctgtattctgttctctgtcccgcagagagcgagcgcatgctctttccttaccctttaagatctgagaaattatgtgggacataagatattttaaaattgttgatagaggactggggcccgagttggctaggaaaggcttgtctatgtcccatggggctctgggctccgtccccagcactacataaactcggatagggtacatcacagaagcacctggaggtggaggcaggagaatcagaagttcaaagttagcctcagctgtggcaccagctgacacattctgtttacattgagtagctggcctacagaaaccaaccaagaaagtatgttctctactgtctgggtctagatcaatccctcgagttctgcaagaggctgggtctcactcgcaaatggctgctataccagttagtcccaatctgttgccattcatgaagatgagttacatgtctggctcatttgggaggcagagttaggtggatctctgtgagtttgaagtggaaggagagccagccatgggtccgttggactttcttagttttgtgtctttgtttctcttgtgcttcctcctggtgcctcagtccaggtgcggtggaggtctgtctgtgactatagtggacatgagagcagtcctttgtcctccttggaagcatccttctcccctggagaccaaatgacagtctcttgggttcctcccacctcgcagattttatccttgcgtccagcggtcagttcgtttctttcctgtctcagtctgcgctctctccttgaccccagctgtgactgtgtgtagtgcctgtggatggagcaatcactcacccccagacttagctctccaactgctcctctcccagactccagaaacagcttacctaaactcataaggatttctaaacaatgccttcctgcatccacacctgcctgacccctgacctttccatctctcctgggagtgtgtggccctctcatccttaggacaggagccccagggctctcctcaccaacccatcaggacacaccatccactccactgtctatactgacccaggatccagccacttctggttggctgtgtgctacctctgggtccaggacaccgttgtctcttgcccagatcattgccagttgcgcctgcgtgctgtcccacctctgctggctttctatgaagcaaccactttagttccttggccactccccatttccttctgattagatttccaaagttcttcccagggaggatgcctaagagtctcgagtgcctgggctcttccctggccaggcctttttcctttacacaggatccctacatggcctccgtgggaaggctggggccagtcagaacattttcctggtggacagctttgccttttctgaataactccgtgcagtgtgatggtacatgcgtccacgcgccgcctggatgctgagcatgctctttgatgtccctgtcttggcgctgtggttatcttgctcctttcttgttaaactagataaagccgagtgtgtttattctatggccaccgctgtggggttttttgcccagagttcgttttctgagtctgacattgcaggtcttgtctgtctgtctcgggcttttctgccattctggtttgtgttttagttcgtctctaatgtgaaatactcttgggagtgtgagttgtttatttttcttgtgtgttttcatttttctccaggctgggttttcccttcttctctccgtgtccttgtccctctcccttgtccttgtcannnnnnnnnnnnnnnnnnnnnnnnnnnnnnnnnnnnnnnnnnnnnnnnnnnnnnnnnnnnnnnnnnnnnnnnnnnnnnnnnnnnnnnnnnnnnnnnnnnnnnnnnnnnnnnnnnnnnnnnnnnnnnnnnnnnnnnnnnnnnnnnnnnnnnnnnnnnnnnnnnnnnnnnnnnnnnnnnnnnnnnnnnnnnnnntaaaatgtaaatggtgggaattttttgccttttaaagttggtgagttacttttctcaccccgctgaccaaataccagcgtagtaaacaaagaagggtttgctctggcttgcagttttagggggacacagtccatcacagtggctggagcttgaggtagctgcttccacagtgagggtggtcaggaagcaaagaggtgacttctacacacttcctcctcctcatgcggtctgagaccccagcccgtgggatggtgccgacccatacagggtgtatcctccctcctcagctaaacctcgctggaaactgcggattgctggccgcaaggcccaaaggggagaacgttggaagtcttctggctgaccccagcattctcattgcgcagtgacgctagcacattcaccacatgttgtcccttcccatctgtggactccgaggacctgggcaaagcgtgggcttgcctgtggtctcaagcttcaaacatggggaaaccctcacaaacgtagggatcccatgggagcatgcctcttctcctgaatgaccctgccacggcccaaagcgctaggagtttcgggacagacaattgctctgaatccctaagttggacctcttccccagcggattctcagaggcagctgtgtccagcctccagagggagcaaaaccaacaggtcggccccagagccggttgcttttttcttgagtgtgtcctctctgttcagtttgcttctgtctgaactggctcagggcagtggccttatttcctcttgtgtccattctaagttgcctccaacatcctccatctctgctgttctcaggaacatctttccaaggtgtatagactgaggtgagcatcttgcttcatttgtttattgtctgataatgcaaactttcccacctccccctctctgtctctctctgtctctgtctctctctctctctctctctgtgtattcatatatatgatttttttatttttatttatttatttatttttaagcataaaagccccagctggctttgggctgattccatagtccagacgggctttgaactcaggatctaccagcctcagcctcattagtagctgggatttcaggactgtgctctgggcagattcctggtccccttctctctggtgccttccatttgctgggcgagcaccctccaccttctgccaccctgattcagatgtctcgtggtaactgttcagaaaaataaaagaacagatccaaacattcctaggctccaccctagacgttctggttcagggcacctggaaaagggcccaagtatctgctgtaaaagtccctgtggatcacagggtcggccagatcagagccagcagcctcgggaactcatgttttcctctccacttgttcgtctacccaaagagctggatgagtataggaacacactgggttcctcagcagatccagaaaacgtaaaggcagtgttctgagggcgtgttttttaaaacaaaaaaacaaaaaaaaaaccaaaacttaatacaaggctggaaagcctatcccaaggcaagaggtttggaagggtttatagagaaagaaccttggactaggggctttggggatgcctcagtagataagcgtgcctgttggccaagcatgaggatatgagttcaaatccctagcacccacagaaatagctgatcgtgaccgtttacatcgataattccagagctgcaaggactggagactcgaaggtcaccggggcttgctggctgccagccgggccctgaattctgtctccaggaaacaaggcagagagcgggagaagagggcacttgctggcctctagtctctgcgtgtgtttgtcgaggcttgggtatgaccacaccacacacttcactggggcatggtagcgcacatctttttttttttttttttttttttttttaaagatttatttatttattatatgtaagtacactgtagctgtcttcagacactccagaagagggcatcaggtctcattacaggtggttgttagccaccatgtggttgctgggatttgaacttcggacctttggaagagcagtcgggtgctcttacccactgagccatctcgccagccccagtggcgcacatctttagttccagcagtgagatctctggatttgaggccagctgactagctactgaattctaagaaaagagtacctcaggcactcaggaggttgaggcaggaggatcaccacaaattctaggccagtctagaccacactgaataagcctttaaattttatttcatttttaattaattaattaggttttttttttgtgggcagctacagtgtgcatgtggaggtcagaggtcatccagtggaagtcagttctctcttatgacagtgaaggttctagggatcagactcatgttattgggctaggccctagggactaacctttatccacagatccctcttgccagctcttataaagtaacatttgccacatctagtcaggctccacttccttctggtccatttaacatttaaattacctcatgtccaggactagaggctaaaaagcaaatgtggggggctggagagatggctcagcagttaagagtactgactgctcttccagaggtcctgagttcaaatcccagcaaccacatggtggctcacaaccatctgtaatgggatccgatgccctcttctggtgtgtgtctgaagacagctacagtgcactcatataaataaataaataaataaataattttttaaaaatgaaaatgtagatttaatttttgttttgaggtgagtttttttgttattgttttttgttgttgttggggttttttgggggacagagtttctctatgtagccctatctgtcctagaactcaatctgtagaccaggctagcctcaaactcaaagagatccacctaaaggcttgtgccaccaccactaccacctggcaaatgtatgtttgtttctttttaaaccagtttgagaatttttatgtgaggactgaacttagaagtggagttttcaatttgtaagttatgattaacaaaagaagtggttagtatttaaaactgcacactaaaaatatctggaaagcagccacagggctcttctttggaatcttttgctgaactcagcccggcccaccccactttgttccctgcccacccctcccacctggctttggagtgactaaccttcgttgctctttcagtatgaagtgcttctccttttttgcctttttttctcccttaaaacaaacatttacagaaaatgggctttaattgtacaactttatgactttaaaaaaaaaacaaaaaaacaaagcaaaactcgtaaggtgcatgcgtcatctgtcattcctggttcctctgtgtacttccaaataaggtgacacatctttcattttggtcttaggaatctttcaaagaaataccaacctaagaagaactcgaaggaagaggaggagtacaagtaggtgcattgctggcagatgtgtagtgagatgagatgtgtgtagttggtgcattgctggcagatgtgtagtgagatgtgtgtagctggtggttgggaagtgggtgggaactgcatcttgtcatataagtaccgtcccaccttcctgtctatgtccatgaacctgaggggcacaatgagaacctggaccctaagccactggacccatttgagactgtttccattaaactctaagaaaaagtctaggaagtgctgcaagcctgtgtgggcagtgtgggggctggggaagccctggagtggtggcctcaatcttcccaacgctgtgaccctttcatacagttcctggtgttgtggtgacccccagatgtaaaacgatttcattgctactttgtaactataattttgctactattatgaattgtaatctaaatagctggtgtgcagaatatcggaccttgtaaaagggtcatttgacaccccgctaagaggtcacaacccacagattgagaaccacggccctagagtctgggctcccttctgtatcgccagaagccttacgtcacctgctcatccagccaagagccttgactgtctcagtcagcagcaatgggtcactgtgcgaggtggaagtaccgtctttgatgtaggtccaggggcctggtgttctttgaggacccggtcggacacgggcgggtgagtttgcgaccatctctggcctgagaataaacagaggcagaggctgcatttcacagagcacccgtggccgggtttgggttgtaattaattctgagctgttgtgtaatgaaccggcaagatcctctgggaggcagatgcagggcagactgattttaattactatttcctcaagtgaagcgagtgaggctggaggtgggcttgagccggtgcaatctgtcctcaggtacacggcttgcaaagcctttctttccaccctgaatgagatgaatgactacgccgggcagcacgaggtcatctctgagaacatgacgtcacagatcacggtggacctgatgcgctacgttcaggagctgaagcaggagaggaaatcggtaatgcatcttggggtgtcctcctccaaagacaaggatgttctacctgagagacacaaggactggggtgtggtggctcacacccgtgctcctagcactgggggtgttgggaggaggcagggcgaaaagttttctgcaaattcgatgaccacatgtgatacacaatgaatctcaggccttcaaggctgcatagtgagaccgccagactggtctacgtaatgagtgctagaccagtcaaggtggcatagtgagaccctgtttcaaaaacaaacaggggctggggagagggttccttggttaagggcactagttgctcttgcggaggacccaggttcgattcccatggcccacgtggtggctcacaaccatctctaactccggttctaagggatccaaggtctcttctgacctccctggatccaaagcacaagtgtggcatggatatatgaatgcagacaaaatgctcatacagataaaaataaatataaagcaaacaaaattagatccaggcgggacagtgcacacggaagggcagaatatcagacatgcaagaccaatgggtgcgtggtgggcgcgtggtacctgagttcacttatcatgttgtgatctgtgtgtagaggtcagaagacaatgtgcaggagttgatttctttacctgctgagccatctcattgcagctgtgtcttgccagtggcggttctaaaagcttcctgttagttaggcttcccacaagattgaattagctgagccaagcggccatccacagctccaaggttggagacctaaggctgacaacagtctctgctggaccagccattgaggacagtgttttgttgttttgtttgtttgttgttttgtttttcaagataaggtttcactgtttatcccaggctgttctaggactcgatctgtagacctctgctggccttgaactcagagatttgactgcctctatctcctgtagggctgggattaaaggtgttcaacaccacgcccagcaagacattttaatttgtgaaacagctaggatgcagtaagactgaaccctggggctcagaagaaaacattaccacccagtataaaggtaaaatgtgtgcacagaatctgcagccagcccaggcctgctgtcctgcttttgaccttgccttgatctttgcaaaggtttctcttcctgtttagggctcccagttctcgccactgacccttctctgctcacagggtttagcattttagcctgctccccaaacagaaactgctctcacctttgtagcaagtactggttctgtttcaggaatgagtcagaagatggacagcccatgagagccccgcccctcccggtccctcgcctccagctgtgtggtcttatcgaggcagggttcactggcctcagggtctttgtacaggtttcctccctgagaaagccttttgccagacctcaggcctgttccttaggaatgtttccttctccctgcggactttcccatctactgcacttaaaaatgcctctcccttttcaccttttcttgctttgcaatgttttggttttttgcaacagggtttttgtgtgtgtagccctggctgtcttggaactcactctgtagactaggctggtccccaactcagagatccacctgccatgctagtactcttaactttcgagccagctctaatcgcctgcattattctttttgtatagtgcttatccatattttgggggaagttggagaagcattagaaacagaaccaggcctgtgtgtatcctaatcacacgatcacacgccccactaaccctgccccacagcaccgtgaggtgttgtgtggaattgcttgctgggttctttcctatctcatatcaagacgtctgctcctccaggacagggatgtccatgcctacttcatcaggcatacagaaggcaggcatgcaggaagtgcaggggagaaaggaatggcaatagctgagaaataataaatgtggccaggactgggagtgcagcccaatggtgagtgctttcctagggtttaccagtaagggaccagaggtgcagctcagtgctgcagacctgcctctcatatacagagcactgtgttccacactagcatgcgtacacacacacacacacaaacacaagctagggttaatgtctgcttagcttatagataaggatcgttatatgccttgggtagcttgtaaatagagtatctcttatttattgataatcatcattttacaatctattatatcttctcctaaatcatgtgccttaaaaaaatttttttttaagatttatttcttttaaggcaggtggtggcagcacacgactttagtcccagcactgaggaggtaaataaagtcaggtagatttcctggccttttttattttggtttttcgagacagggtttctctgtatggccctggctgtcctggaactcactnnnnnnnnnnnnnnnnnnnnnnnnnnnnnnnnnnnnnnnnnnnnnnnnnnnnnnnnnnnnnnnnnnnnnnnnnnnnnnnnnnnnnnnnnnnnnnnnnnnnnnnnnnnnnnnnnnnnnnnnnnnnnnncctgcctctgccgcccaaggctgggcattaaaggcgtgcgctaccactgcccggcagcaggtggatttctgagtttgaggttagcctggtctacagagtgagttccaggacagccagggctacacagagaaaccctgtttcaaaacattttgtgtgtgtgtgtgtgtgtgtgtgtgtgtgtgtgtaaaagagtattttgcctacctgtgtgcctggtccctagtgaggtcagaaaagggtattggatcccttagaacagaagtcacagactaagctcccagctcttcccacaagagcagccagcattcttaaccactgagccacccttttgtttttaagaagtgtcagtcaccaataaccagtgcagccctggcagtcagaggttctgttaggagatctgcaaacaccactctatttgtcatagcattaaattcggctggcatttaagagcattgtgaaatccctagcatgctggaaagaatgtcaacaaatacaaacttgtgggatgttcatacgtggcctcgtgaagccatctcttctctcctatgtcatagctaccattattttgaaggaatgagtagttaagtgtgccaacacaggcctttaattccagcatttgggagttgaggcaggaggattacaaattagagggtagaactggctatctagcaagacaccacctcaaaaaagtgtgtgtgtatgtgaacgcgtgtgagtatgtaagagtgtgtgtgagagagtgaatgtgtatgtgtgaatgtgtgttgtggccgtgaatatgtgtatgtgtgtgtttgagcttgtgtgagtgtgatgtgtgtgagtgagtttgtatgtgtgaatgtgtgtaagagagaacaagatggttctgtggacagaccgtggccctcaagcctgatgacagtgaccctcttttgatccccaagattcacattttggaagcagagaactgactcctacaagttgttctctgtcctccacacaggatgcatacatacacacatagatacaaaataacatttaaagatagagtaaagatggccgtggtggcgcacgcctttaatcccagcacttgggaggcagaggcaggcggatttctgagttcgaggccagcctggtctacagagtgagttccagaatagccagggctacacagctcgaaccccccccccccaaaaaaaaaagtaaaaaaggccagtgtggtggagaatacttaggaggtagaggcaagaagatcctgggctcaagatcttcctcagctacacagtgagtttgaccagcttgggctgcaggagatcttggctcaaaacagcctgagtggtggtgcacacctttagtcccagcacttgggaggcagaggcaggtggatttctgtgagcttgaggccagtctggtctacagagcgagttccaagacatccagagctacatggcaaggtcctgtctcaaaacaacaacaaaaaatcacagacaaaacaaaaagcatgcaggactgtgtcagtacactgatagtctgggagattggtcagcccccctctttcagattgcagtagctgacatttgctacaacttcgggttaacctttcctataggaagtctggtatggtacctactgctcaggagcctggagcacaaggaggtggtttgggtctgttgggtcatacacctgggggtgacacgcaggcaccctggacctcgaggctagcatatgcttttatttctaggttacccacaaggccatgagttgtacggtatcaaagctcctgcttctactccaggcttccctgcctttccttaacactggccagaggatctcatttctgggtttctgctgaggtcagaacaaagtgctgatctgagaagtctgttttctcgtccctcttttacgtaggtcacagggactgaacttgggttggcaggttcactcgctggctgagccatctccctgttctttaaatttaacagaagaattgttttctgtgtgtgatctggaaaatggattgttttcataatcagatagttaacagataacttgtccttcattcgtaaatgaatttacagctccaggactcaaagccagacccttgaacaagctacactaatactctgagccttttgctcacagttcagcggtttgtttattgtttaagtactttttattgttgtgttgatctgtaggcttactggttttgactggcttagattagttaaacaattctacagtcagctcttcttagctctttgttttgagacagggttttgctatgctccaggctagaatttaggatgtagctgaagggggcttggcctctaaggggagagcaagctggccccatgacgcctggactagctttttcctatgtgtgggaggtgagatcacctccccaccctcacccccacccacacacacaccccagagctcccagaaatgggatgagcttgtattctcgtcacatactggtttatggccttgggtcaacctcttatcatttactagattaaccgtctccagcccataccaaccatttcccaagcatctctgtgccctgcatcactgagacccagactgaggtccaggttgatgtattagaatggtgggtcgcgtctcaacagcacactagaccaagacagttccacatggaagaggttttattgggagagaaaaagagaaggtgccagcagaaagagaaaagggggagagagagggagggagggggtgttcttattcatatggaaaaggatgtaacgcaggtaaaggtgggaggtgagccaagtagatgctgggaatatggtgcctattgccttggcaacaggtctacaggttgcaggtcccgctatcgcctatgtgatgtgataggtttgggaggtcctgatgccaacacaggccattgaggaggtgacagatagctccactgatgacgtctgtacagtgaagggacccacccacccggggtccagcacagtgaaaccctctaatctcagagacagagtttgaagagaccaaggagcccagatgttcttgtcagccctgcagaatggagcgccaggcgcacgcacgtgtctctgctgctggagaagctgcctcaccaatcaccgggtgggcactgggcttgactcttcagcaggaactaactaggaagttgtagaggaaacaatcactattgcccttggtggcacttgaagcgttcacaatcctcagcattcacctggtggttgattggtttgttttgagacagggtcttttacaggccaggctggctgtgaagttgctgtgtagctaaagatacatctggtcctcctggctgtatagcccagaagccagggtggtcagcatgcactggctcgccccatttgtaaggtgcccactgagccatttccatcacatggaccaagaagtttaaggttcattgcgcgtacttgcccgtccagccctagtggggctcaggggtggagggttcaaggccagctagactgtaccaagggacctggagtcagggttgggggtgatggcgtcccagctcacaagacagcccctgccacacttgctgtctgggggctccttctgtctttgtccttttaaagtctctgtgtcctttgtttccatctgtggaaactgagctgtgtttaaaattccagaggggtgactgcgcgcgatgcaacgtgtgctcgctcctttacttttcctgcttggtgtttgaagcggctatttccacaacagctccgttttgctttcttaattaaccatctggggttggatgagttggccgcttgcagggcgagcggtaagcacgtgtcacctgcaggacagtagtcactgaaagaactgtcatctctgtgtcccttgaagctgatgctcccttttccgtagcttccagatgccctttcgttcgttttctgctgcagttcgaggttgttttgagactgtctttgtatgaaccgttaattggcctggaactttctttgtaggtggccaagttggcctataatttagcaatctcctgcctcagcccctgccctgcccaccttatctcaccccacccccaagtgtcaggatttcagcctcatgatgcagggtccatctttttctcccctgaaacaaggttttgctatgtagccctggctatccaccttgctctgtagaccaggctagcctcaaactcagagatccagttgcctctgcctcccgagtgctgggaagcactgccaaattcaggcttttcatccccccacccccttctctcctgttcctgtacctgtggtggcctaggtcagtgctgggcaccttcgttcatcacctgatttcccgagacgggatccctcactgaatttggagcttgacaatttggtcaggctggttggcctgggtttcctcctatgcctgcctccctggtgctagctagcattactgtggcacactcagcaagcgccttctctagagcatctagagcgccagccaattctctgaaggaagtttcttctgtagagactcaagtacaactcagaacagaactgagagccaggtgcgttagcgcacgcacaccgctactcccagcactcaggcagggggatgtctctgagttccaggccagcctgggcttacagaaaggccctgccctgtcttttaaaaaaacaaacctgacatgaaaatgaaaacaagtgctttgtagctgacctcagattcctcttggcttctcttttctttttcttccatttatctttttttttcttttctttgtttttcttgttctcttttaaagtctattcttgtgttttaaagagagaaccaaagcttcctattacagggagagtaactagcgtccctctggttccccagagatggcatttcctgtcgcttttctgacaggagagatgagcgctggtgacttcatcctgggctcccaaagcagcccttatatctttgtcctgggaacaatccccctttattctgagccgtgagggcatggttctccaacacactccctcactgtcccaggaagaagcgccctgccattgtttgttcgtaaacaacaagtgcatctggcaaagctgctttatttgtttaagttttctaactgttcaaaccactgtttcccctccaaggagccagctggagctggtgacctcttcctgagggcagtcatacgcagagggatgagggggggtgtgtgcacacgtctccatgggggagggggagggcacacccagcagaagaaaggctggaggagtatccctcaagctcagtgtttgggtgttggtaatgaggggcagtctctgaggtgcccttatggaagacagccatgtaaggtgcacagcaaatgtgagcgcttcccacacacttacctaacagacagccagagaacttcctgtctgggtttttattcagaatcacccaacatatgattttttttaagatttatttatttattgagacagggtcttgctgtctagaccaggctagcttgaaaccttgaaactcacagcaatccagctgcttctaccttcctagtcctaggactaaaggtgtgccatatgtgtgtggatagaagaccccagtgggggtgtggtttgagatgggctttcatttccatcctgactgcctttctcccccccccccccacatccctcccccttcttcctggcctccactccttccttcttacaagctgtgcacagcttccggtccatcctcccggcagggttcttcacaccctgtaatcagcaagctggtctcccctagccttgcccctggctcctctaagcctgaggctctgtcttcccttcttccctgccctgtttctcttcggagattaaagagatggctccagggacaagatctttgaggcagtaaagaccgaaaactgaagggttggggctggagcgatggttccccagttaagaacatctacagaggtcctggatttatgggttcctagcacccctatgaaagattgcagctatttataactccagccttggagaccccaggccttcttctgacctcctcagtatcaggcatgctcaagagacacaaaatacatgcacccaaaactcttagacatatacaattaaagtagcaatataaaagaaactttaatctttaaaacaaaaaaaacaggatgttcaaagttgaacttcgtaagaccttggaacagtgacctccggaaagacaagaacttgtccctttataaagtatcattgttcaggcaaaaggctggccttgtcccctcccccaggcttccccagcacttggttgtccccagactctgctgagttaataggtctgagtacggagactcaaggaaaggaggtttttgccgaagcccagaggaggatgctagggacctggcacttcctgttaatcactctgccatccctccttacggtgacagtcaggaagcaagtggctaacaagggaaagtttatccacaggagcatgtaggggcccaggaggctcagtgggccaactgtttgctttataaacaccagctgagtttgaattcctagcacccgcgtaaaaccccagtgtagttatgcacacttgtaacccagtgaggggaagcagaggtgggcagactccaggaggtcaccggcccaccagtctagcagaaccagtgagctctaggttcagtaagagagctccaaaataaataaatacattaataataataatgtggagagtgatggtggagccactagcctttgacctctgatctccacaggtgcacatacacacagaagggtgtttaccaggaaagccaggggaggggggctgctcctgctccttgtcctcaaagtcaagggggaacccctgagtttacagtgtccttggtcaagggactcagccaagctggcaacctccctggctgggcagcttcaggcagcaaatctcatcagacccagagggcagagcctttacccaacacaggtcctgcagcctttggccatgcagacaaggtctactgatcccattaatgtgtctgttggaagtatgttaaagggaaatggtagttttaagatgctgagtgagagagatgctgtttcctctgtgtagctgtaacgggtttgttgctgttgctgtttgtttgtttgtttgttttcctagcgctttcgtccttgctggtctctcctggctctaactacccacctaaggaggaggcttctccggtgtatgtttcatgctagttcttctcaactctcagaccccaggccacattgaacaggactctggaatcttatagaaatactaaccttaaaactcaagatatatttaccccctcccaccatggtcccccttttttcttccctctgaaactcaggtcaaacgcagggtcattctggactttatttaaaaagggactttatttattgggcatgtgtgttgcggtgttcaattggaggtcagaggacagctctggatttggtttctccttctgccttgagggactctactaacatgtcttcgggtcaagacccaggacacctgtgcacaggggaagcacgtgactggaggtcagaggacagctttgggaaggtggttctcgttctctccttttaccctgtgggaccccaggtagaactctgggtatccatccgtcttggcatcaagcacttttatccactgagctatctcaaagaccggggacttctgtttattcatgtctgattctgacctcccagtggcttggctaatcagaggacatctatggtggctgctggtggggctggcattcgggtgcttagagttctcccacctgcagcaaaaaccagcaacagcctccattctggaatcttcccttcacaccatccaaattcagactcacccacagtctctgtccagtcagaccctgagccaccaggtctcctctctaatcccccttcctagcaacctgccctgacctggttctctggggtccttggaagttaacactagtcataggcctgccgtgaggcctttctgttttaaaagattctagagctagtgagatggcccacacattgaaaagagagagccaactccagcaagttatgctctggcctccatatgagctgtggtatgctcacccaaacacagcaatgattcaccattttaaaggttctaaggtgcaatttctattcacagagagcccacagcactgcttgtaccatcaacatctgtatctccctgaactaggaacaaagcaaatatccaccaaccagtgagcagctacagaaatgtggtccatcttctcggtggaatcttactcagccagagaaaagaattagtgggcagatacgtactacaacaggatgaaccttaaaagcatactttcatgtgaacaggaagaaataaagtcaggagaggctagggggacaactaagaagtacagttcttcatttgtgggaggtggaatataatatatgttaattgaccagtgctcaaaagatgaccccagtgattgctgtatgcttttcttttaagatggggtctcactgtgaagccttggccagtctcaagtatcctcctgcctctgccttccaagcctgggatgaaaggtgtgctgagggggctggtgagatggctcagggggtaagagcacccgactgctcttccaaaggtccgaagttcaaatcccagcaaccacatggtggctcacaaccacccataacagagatctgatgccctcttctggtgtgtctgaagacagctacagtgtacttacatataataaacaaacaaacaaacaaataaataaatcttaaaaaaaaaaaaaaaaaaaagaaaggtgtgctgagccacgtctcctggtgtgaggactatctcagcaaggcatggctgttgtttttgcaagtggcacacaatttcacattcagtattgctgtgtctgaaacttgagaaggaactcctcaagccgtcttattttcatttccccttaacttgtttatcatttaaactttggttgttgtttgagatggggacctcacttgggtttagggtctggcttgaacttctggaaatccccctgaatcaaccacacttgtcctggattaccagcctgaactcttacgtttctttggaccacacagactagaagttcaatgtttgtttgtttattcgttttggagggtctcacacatactaggcaggcaggtttccactgagctgcacctccctcccagatgatgcctaaaggcttacttaaggggctggagagccgactcagcagttaaagctcttgcagaggacctgaatttggttcccagcatccccctagtggctctggatcatctatagctttagccccaggggatccgatgccctcttctggcctccacgggcactgcataaatgcggtgcacatacacacacgcagagaaaccacacatatataaaaacaaatctttaaagctacttaagttgatagagggtttttcctcttgcattagtatgaggagggtaggtgctgacccctgctctgatttctacttcacagaacttccatgatggacggaaggctcagcagcacatagaaacgtgttggaagcaactggagtcagtaagtgggtagccggaagccggcagctaaaccagtctctttcccagaccagctcatttctatctgaatctggcttgaatggctcgctaagggggaaaaaaaaatcaggcagagacctctaaggaggcttctttctctctagatttttctcatttgtatttcacttactttgctcctagaactattatggcaaagtgctgagctggacatgctggatgctggagcgatggctcagtgggtagagtgtgtgccgagggaccaggagggcctgagtttggatccctagcaccacttaaaaagctgggcgtggcgacacacacctataatgccagcactggggatgcagagacaggaggctctcaggggctcactgtccggccaggctgcccagcatatcagctccaggcttagtgagagactctcagagagcaaggtgggcggggtgcagagataacagctctgctagcacaagcacctgatactttgcagaggacctggtgtgtcccatgtcgggtgtctcacaaccacctgtcattccagttcctggggaatccaacaccacttgttctgaaggtacctacgctgcacacataaccacacgcaatcaaaatgaaaagcaatcttatttatttatttatttatttatttatttatttatttaaaataaaaacagtgtagagagtgattgaggaaagcacccggtgttgacctctgacctcttcatgcgcaagcagcaggtacatacactcattaaaatgtgttctggtagaggcaggtagctcctgtgcagagaacagataggggtcactccaatgtagagaggtgcgcaggtcacttctggaaatgaccaagcatgaggcatgggttcctgggagaatggccgtggaggtctctctagaggtggcagggagggtgggtgaccagcagacttggctgtgctctctgcagagtaagaggaggtttgagcgggactgtaaggaagccgaccgggcacagcagtacttcgagaaaatggacgctgacatcaacgtgaccaaggcggatgtggaaaaggtaaggggtctcggtctcacttccctggagcgtgcttcctgcacagccgctgagaggcctggccttggcttcctctttcagtcataaccacacgagggtacctgatgggaggaagggtttcattttatctcatcaccctggggccagggttgaggtcatgtgcttagtcaccaacgagtatgatggggagacctggaacgtcacagcgggcgcggttcaggaggccacactcttctgtagtggcttgtcgaaggccgagttccatgtctagggagctgaagcagccatctcagcccacaagggagagtccgtcagttatcagaaaggccgatccctctggcccgctgcgtcacggattcctctgggctgggatgagaggggcatttggaagtctgcgagcgagagctttcctctgaaggctcagacataaagtgctccttgtcttccgggccagtggatgtgggttttccctagaagccccattttcttttttatgaaagtcatcaagataatgtaaacacaattatgccattaaatagtggcattcattcacgatgcccagggccatttgggcaccgcagtctgcgcttttctctggaaaagccctgcttttcttggtaccactcggttctgccagatgagtttgaaatgcctcaagttgggcaatgtcccagttggaaaagtgtgtgtgtgtgtgtgtgtgtgtgtgtttaattacttagcatactaaaatgcatattcttgacatcatgaggatagacttttactttaccaaaagacactcatgttttaagtgaccgtacttaccataaatttctactaactaggaatttaaagtgatgcttttttttttttttaaagttgaaatcatttatttttgtgtgagcatctttgtgactggtagcactcgtgtggcctgggcagagggtaactttattgaggtggtcccaccacgtggggcccaggaatgaacgagtttgactgcagcagtcagccgctcttcagactttaacagtgttacctgagagtgatgagctgagagtggtgctttcaagcctgaggtcccagcacttgggagtggaagccggacagtcaggtgagggaagtcatctttggctagacagtgggctctcaaactgaaattctggactggagaggtggcttggtgtgtgagagcagtggctgctcttccagggagcctgggtagctgggtagcagtcccagcaaccttcaacactgtttctgaggccttccttctcggatggctagaatgtaggctgcatatctctatctctattggagcccggaacctcctgtggtgaccctgttttggctttcagcagccggcctgtactggtggtagtcagcctaccacttcctctgtctttctactttgtatttatttttcttatcttcttccacactctgtgacctctttgtatccagagctgtagtgtttgtggctttctttatcttcttcttgattgtggagagtgcttcagcgtttttttttttcctacttagattttaaagcagaggcctctaatctgaggtggagtcaagaggacaggggttcaaggccagctagggctactggagaccttgtctgaaaacaaaaagaaaggaaggggagggcaagggaagaaagaggaagccaaagactgattttagtgtcctttttatcatgaaagaaatgtttgctcttgttttgccaaaatatcttcattttactttgtgggcatttgcctgaatatatgtttgtgtaccatgtgagaccagaagagggtgtcagatcccttggagctagagttactggcggctagacccccctctccccccaggaacgcagattcctcacttccccactggagagaagacggctcctaaccactgagccatctctacctggactccttgcctattcctgtgcttcagctttcctggccgtgaagccgtggttttgttgctgctgctgtttttcctgaaagcaccactgtggccctcctcgggaatgtgaggatcctaatttggaagacgcagacatcagaccacaagcatcggtgtccaaacactgcatattttaagtccttttgctttgaaggtgacctaaaatctgctgcccagcacaggccacgtagaggcatgatgtcagcttttctccttgaattccctgttgttatctttgctttgtttcttgaaacaggtttccctacatagcctaagctggctaccctcctgccccccatcaatgctaaaatttcaggggtgcatggccacaccctgctttccattgctacttctgacagtctttgactctacacagatgtctgtctctcccccagtttcctcaaattaagtggcctgattgtatttgactcagctcaccttcctgacctagcagccagccacacaatttctagaacgctatgatgcatctcccaggctacattgtgtagactctggattgtgcccaggggatgtgtatgtagtataagtttgcatgaatgtctgggtctagttatgagctgaatctccttttctttctgaagacgtcactgtccctcttgctgtggctgtatggcatgattgccatggcactatgttcaaagttcctgcatgaacaatcccctcccaccttatgacgcctgtggccaggagcctgttaattccctggaagggtttgtttctctctgggcaggagcgtgtatttgcatgttacctggatactgtgttcctctgcggtctggtgatgaacgagaggacaggatgaatggaagttgccctttaccaagacgcagctgtcagagagtctggactcatcagctttggggggggggggggagggctcagttgcttaatctagttatgttagaatctaaatatgttggaatatattttctggttttcgtaaaaacagatcatatcctttccccaacacaaacccttaagctcccttctggggctggggaaatggctcagtgggtgaagtgtttgtattggatctccaggacccatgtaaaaaccaggcatggtaatgcatgcctgagtctcggcactcgggaagcagagcccagtggatcctggaggccgatgaccccatcatgttggcgacagctcctgaaacctctgaacaagataagagatgccaaccagctctctcaggccttggtcctaccctagagataggagatttcagtatttgttttagaggttcggttttgtattttactttttgagacagggtctccatttgaagaccaggctgaccgtaacaagtaccaggatgacagcttatttcatgctgatcatggaactcggggtcctatgcatgtcaggcaagcaagctacactccaacagagctacacatccagacctatgtcttatttttcagaaaatctagcaagttgacgggatctctaatatttgaactgtttgaatccatttctggtcctttgttctttactgctggtgaggtgtggctgtcaccattgaggccttaaagggacttgccttccatggcctccccaatgctcagcgagcagtggctttcctgtagatgactctggaatgactttcaagtggcaaaaactgtgatgtcaggatcgccatgaaactgcttagaatcaagccatgctggataagcccggcaggggttcctggagtccccaaagtgccatggtttgccagcccggtagggcttgggaggggaaggccatcaacacaagcagcctgagaagcagcttcccgacagagagtgcactgttttctacacacccgcattaaactgaagtgtagctgaggcctggtgcagaacctgaccctgtcctgtgactgctgtctcttctgtaacttctactgcaagacagggcattgtctaacaaactacaggcagtggctgctacaggcagctgcagagatagacagtgatggttgagctgggttctttgtcttttataaacttgcagtgtcaaatttttgtttttcgtgtgtgtgtgtgtatgagtgtgtatgtgtgcgtgtgtgtatgagtgtgtgtatgtttgtgtgagtgtgtgtgcatgtgtgtgtatgagtgtgtttatgtgtgtgcatgtatgtatgtatgagtgtatgtgcatgagtgtgtgtattagtgtgtgtatgtgtgtgcgtgtgtgtatgagtgtgtgtgtatgagtgtgtatgcatgagtgcatgtgcgtgtatgagtgtgtatgtatgcatgtgtgtatgtatgtgtatgagtgtgtgtgtatgtgtgtgcatgtgtgtgtatgagtgtgtgtatgtatgtgtatgagtgtgtgtgtatgtgtgtgcatgtgtgagtgtgtgtgtgtgtgagtgtgtgtatgagtgtgtgcacgtgtgtatgagtgtgtgtgtatgagtgtgtgtgtcccacagtgctcttcaggagttggttctctccctcaactgtgtgggtgctggcgacagagcttggattgtcaggcttggcagcagatgtctttaccactgagccatctcctgaccctttacttttcttggaaatacaattcttctgtggttccagtctcaatgtatggtctctcttagccacaaagagtttgtgcggcttctctccacacttcgagaggggtgacaaggcagaactctctagatgtttattgtgtgttcactcctccctccccttcttcctttttcctttgtgtgtgtgtgggggggggcatggttgggggagacaaagtttcactctgtagtcctggaactcattttgtggcctccaactgagatccgcctgctaggacacaaggtgcgcgccattgccacctgggcgaccttctctctggtctaatcctgagggctttttgttacatgactcaatttgaggaaatactgaaaagttaaattattgccaggtgtggtgactctcagctttagtcccagcactcgggaggcagaggcaggtggagctccatgactgtgaggccaggcttgtctaccaattccagaccaaccacaaaacaaaacaaaacaaaaaggttaaattagactagaattctcaatataaattccaaagagcagaccggtttctgtgagactgtgcctcccatttttctatggtaagatgacttctaaaagtatggtggtgggggggaacatcacagctgtaacaccagcactcagggtgatcgttcacgcccagtgtgggcaacacagcaaattccaggccagcctaggagacagagaaagactctcagatcacccctcccggaagtaagggcaataaaagcataaaagttttaagagtttgaaggtagttgcgttgaagccataacacagatgtctccattttgaagttggacaggaggtgggcctgagtctttatgaagggagaattataagcagtatggacagaggagtggaagctggggtgtggttgatttaggtcctgggcatggaattagaatctctcactttttcccacgaagctaagtccagcattttacatttgtctttgtatttagatattcatgggggggggattagctcaccagtcgaggtcaaaggacagctttcaggagttgggtttctctttccaccatgtgggctctggagattgtcagacttggccgcaagcacctttaccctctgagcaatcttgctcacccctgatttcaggctttagttttgattccttttgtgtgtgtgtgtgtgtgtgtgtgtgtgtgagagagagagagagagagagagagagagagagacagggtctcactctgtagccctggctcggaactcactgtgaagcctgtgctggtttgccttttcattgccttggtaaataccataaccaaaataccataaccaaaagcaacgtgaggaggaaaagaggaattgcatcttgttacttacaatccgtgatgaaggaaagtaaggacgagaactcggaggccgcggaggggtgctgcttactgggtgctccccgtggcttgctcagcctgcttccttatactaccatgaccaccttcccagggctggcaccgcccacagtgagctatgtcctcccatagaaaacatcagttaaggaaatgtgtcagagataggatgctgtacatgctgttaatcccagcactcaggaggcagaggcaggtggatctctgagttgaaggccagcctggtctgtagaacaagttccaggacagccagggctatacagagaaaccctgtcttgggggaaaaaaaagtggccgggcagtggtggcgcacacctttaatcccagcatttgggaggcagaggcaggtggatttctgagttcgaggccagcctggtctacagaatgagttccaggacagcagggccatacagagaaccctgtctcgaaaaaccaaaaaacaaaaaagtgttgtggggctggagcgatgactcagtggttaagagtgtgctctgctttggctgagaaccagagtttagttccccagaacccacagcaagctcatgactgcatgtaattccagctctatgggatctgacgctctcgtctgtcttcctcaggtccctacagaatacacacacatatacacgcacacacactcacaattaaaaataaaatagaatattttagatgtccatagatcatgtgagagtgtgtgtatatgtggtgtgttttaatggtcttagattatatgataaactgttttaaagagaaaaattaaattgaagccaagaacctctgccattattaagcaagaaggtactttgctcacacaattgtctggtaattatcttaagacccttgccatgggcagcctaggacacagccaccctaagaacccagttctagtgcttgaagcaggggccaggggcgcagatctgctgagactggatacagatgggcggcagagtgttaaattgctttaccatttgaggaaatagtgtgtgtctccagctcgccgctccttcagcttttggacacatctggaatgacatggttgcgtgcttcctctgcagtccctgggcaactgagttgcatctttattgaatgtgtaagcatctttctcgcttgcccctaattttgttttggatgaaagtgtctgactagttctctgacggaatcctgcaggactcaggaaggccatggaaggcaagttttttggttgtttttttgtttgtttgtttgtttgtttgtcctggaactcactttgtagaccaggctggcctcaaactgagaaatccgcctgcctcttcctcccgggaaggcaagtttctttctttctttttttttttttaaagatttatttattatatgtaagtacactgtagctgtcctcagatcttccagaagaaggcatcagatttctttacgggtggttgtgagccaccatgtggttgctgggatttgaactcgggaccttcggaaaagcagttgatgctcttaaccactgagccatctcgccagcccccagcaagtttcttaaagacagcaatggtgtggtcctgtcagtacctgggacacccatagcctggcagcaatctagaaaacaataaaaaaaaaaaaaaaagaaagaaagaaagatcaaaagaggaactaggaactagttggtacaaatgcaggaaatatattttgcaactgcagcttcatcttggaacctagaagaatttaaaaacactttctttgcttttgggggtgggggttaggaggaggttgagacagggtttctctgttgtaaccctggatgtcttagaacttgcaatgtagaccaggctgacctcaaactcagagagccacccgtctctgcctcctgaatgctgggattaaaggcatgtgccaccaccaccactacccagcaatgatttatttatctttaggtacatttatatttaggtacattagtgttttgcattcatgtgtgtctgtgagagggtatcagatcccctggaactgaagttacagacaatgccatgtatgtcatgggaattgaaacttggtcatttggaaaagcaaccagtggttttttgtttttttggctttgttttgttttttaagatcttatttactattatacataagtacactgtagctgttttcagaagtgccagaagagagcgtcaggtgtggttgtgagccaccatgtggttgctgggatttgaactcaggaccttaggaagagcagtcagtgttcttacctgctgagccttctctctagcccaatacttgtctttcttgagacagggtatcactctttagaccaggctgccctcaaacccacagatcggttttcctctgcctaccaagttcctgagacacaccaagctaaaatacttttcatttaaaccaagagaaatttgtagaaaactaaaaggaaaatcgtagatattggtcttttataagtgggtccctaaaagatactttgttattctgtgtttgtttctgggctataatcaggggtcagagctgtggagactgcatttccttctaaaagcaaagctgcagcttttgagttaatttgcaaaaatatccagtgaaccccaaacattttagctcctgcaggggcaggaagccgtccacggctcagagagtgtatccctgccttactaatgggaagagcggaggcaatttactttatctctgaggtttccttcttaaggaataggattatacacctcgggggctgtctgaggtctccgtggcctgtgatgaatgctaagtggggtggcctagccctctcctacaggaccacatgtgtgtgccacggatctcacacaaaggtcagaggacagcttttgggagacagtactctccactgtgaatttttcagaccaaactcaggccatcaagcatacaagtgttttacccactgaaccatttcgccaaccgacattaggtttttgagagcacagtttgctaagtagcccaggctaacctccagctcacagtcctcatgcttcaggctcacaaatgttgggatccaaggcacgtggccactacacatggctttaatgctctgctaatcaagtgaatataggtggcctcaaggagttgcaagcatctagacgttcagaagagcactcattgggcaagtactgcttcgcactagttaggtcataatagatgccttcatgaggactccgactaagagaagacacacaaagagtgtcggatatggatggcgaacattccgtgaaaagcaagtggcctgttagtgtcatcatcactgtgaccaaaggcctggcagaaacagctagagggaggaaaggctttgctcaaggttctagaagtttctttctgtcctagcagaataagcatggtatagaggagcagctcccatcacagaaaccagcaaaaagagacccagacagagggcaggacaagagctcttcagaaacagggacctgcttcctctagccacgcctcacctgagacggcccatcctctcccagtggtctgctcaaatgctaactcaatggaaggcttagtccattggctgtgccagaaccctcatctccctctgtggacaagcccttgagactcacccagaagtgcctcacctcatgggtagttctcagtccaatcaagtttacattcaagactgacgtggcacggtggtgtgatacagtctgtctatactcctagtacttgagatgctggggcagtaggattgtgagtttgaggccagtatgtgctacatagtgagttggaggtcaacaacggtcacatagtaagattctttctcaaaaaaacaaaaacaaaaatacccacaattttgaaagagagagaaagagaagatgatggactgttgagatggctcagcaggtaaaggcattagccaccaatcctgttgacccgggtttagtcttagggactcaactctctcgcacacgttgtccactgacccccatgtgtgcactatgacacacacacataacttatataggaatagactcaaacaggaaggaggggaggaattgaaaaggtggcttagaggcagagtggctgggccatggagaactcttgcactacagaaggcccactgcacatgtggccttgcaagagaggatgggggaccctgaagcgtctcagaagctggatgtagggtgattgtgaccttctgggatgctctgaagccccttcctcaaaaagcgtgcactgaaaatgcattagtctgagccttccccatcatcatcatcccacagccatacaaatggaaaagaatggagctgagaatgtgttaaacgtcaggtagcctacatgggcattgccagtattgggggttgggacgggagtggggggggattctgtgctacgtggtcatgggtcatggttcttgccaggtggctctaccactgtgctgcactgaataaactccttgctgtcagccaaggctcttgatatgagagaagcagaagagagtaagtgagcgggctactaaaaccaacaagtgggaatcagtacaaggtgtgaagatccaaaacacagaggtgtaaactagcctggaccaggcagcctaggttccttctaaaggaacagctattactcaccacctacccaccatgatgttgatgcgatagtttggctaggtattaaattccaggctgacttttttttttttttttttggaaagacaaggtttctctgtatatagccctggctgtcctggagctcactctgtagaccaggctggcctccaactcagaaagctgacttttttcttctctcaacagtttgaagcaatcattcccttgtcaaccacctcatactttgttaggaacttgtcatctacctagcatttacctacctaccgtgtcatttagctttagcattcctctgagagagctggctttattctctgtcggctgagaccccatgtttgtctttgatgttctatggcatggttattgcatttcaaaactcatagttttttattttaattttctcttcttaggcgtccttgagtatctaagtgttttataaatgaaaggaaactttaggcattaaagcttcaaaaattgctaggtgtggtggcatatacctttgatcccagtcacagaggtagggggaggcggaggcaggtggacctctctgagtttaaggctggcctgatcaacaaaagaagtgccaggacaaccagggctgttacacagagaaaccctgatttcaaaacgcaaaaccaaacaaaaggtttcaaaaattatttatatctttctgtctctgtgactgatggttcagggacttgtgctaaatgtatgtgtatttcttcaatgtatcccattggcctcttcttcatatcatcatcaccaccaccaccatccttgtgagagtgacacattgacgtcaggagccagttctctccttccacttttgcatgggttctggtgatcaaactcaacttacagggcctgtgtggaaggagcttttgctcaccaagccatctctctggagtcattgtgttcctttatctccagatgtgaacttttgtgtaacatttattcattctcttagctcatttttttttgagcttttcaatttcagcaactccttttccatttctagaagtttcactgagtcttcagaccttcactgataacttcttactaaggtgacctctgttgctttttactttcagatttgctttttgcatcttgtcttatttctttcagacactcggatagtctaggttctgtggtaactattcttctctgtggtattggatctcatggtagcttgttccctggtgtgttgtaatctttatctttaacagtgattgcttctcttctggaggtgtaggactgtggaaatgccaacctagtgaaggtgtgcattgtttatgccaggcaacttgtatgctaatttgtaggcttggcatcctttttcaaagaggtttttattgatgattttacgcatatgtgtgtgagagtctgaatatatatgtgcgcatcaagtgtatggtatggcctcctccaggctttgggtcctctggaaattgacttacaggcagcagggcagcagtgagccactatgtgtgtgctggaaaccaatcttgggatctctggaagaacagtaagtgctccaagcactgagctgtctcaagcttggcattccgttctgtttgttttgttttgttttgttttggagacagggtttctctgtgtaaccctggctgtcctggaactcactctgtagaccaagctggcctcaaactcagaaatctgtcctgcctctgcctcccaagtgcagaccaaaggtgtgtggcaccactacctggctgtgtcaagcagtctttattagatgattgttgtgacacagacaataaaggacaacagctgctaccaggaaagttcagattaacctcagaaatggaggaaagggccagagtgacggctcagtgggggcaagcaccaggaccagagtgcaatcctatagtctactttgtttaagaaataaacaatataagccgggcgtggtggcgcacgcctttaatcccagcactcgggaggcagaggcaggcggatttctgagttcgaggccagcctggtctacaaagtgagctccaggacagccagggctatacagagaaaccctgtctcgaaaaaccaaaaaaaaaaaaaaaaaaaaaaaaagaaataaacaatatgaaataaccagtacccccaaagctcgtgtctccagctgcatatatagcagaagatggcctagtcggccatcattgggaagagaggccccttggtcttgcaaactttatatgccccagtacaggggaatgccagggccaagaagtgggagtgagtgggtaggggagcagggtgggggaagggtataggggactttcgggatagcatttgaaatgtaaatgaagaaaatatctaataaaaaaaataaataaacagaaccctgagtgtggtgcatttacaatcccagcactagggaggtgaggacaggttggatcctagggcttgctggccaggcacactagcctagttggtgagtttggggccagtgacaggctgtcaataaagaaatgtggctggtgcctgaggaacaataccctgggctccagctcaagtacatacacatgcacatgtactcaccaaccgcgaaggtgcgcgcacacacatgcgcacacaccaaagagaaaaataaaataaaataaaataaaataaaggaagcatgtttgtattggcttggtttatgtgtcaacttgacatgagttagtgtcctcagagaggaaggagcctcccttgaggaactgtctccttgagatcccactgtaaggcatttttttttggttatctgatcaatgagagagggccagcccactgtgggtggtgccatccctgagctggtcctgggtaggctgagcaggtcagtaagcagcacccctccatggcctctgcatcagcgcctaccctgttcgagttcccactgtgacttcctcagatgatgagcagcaatgtagaattgtagaccaaagaaaccctcccctccctaactagctttttggtcatggtgcttcgtcgcagcaatggaaaccctaagacaatgttggttttgtttctgtatgagcaggactctgtgtgagcctcctttagggtgtttcttttctaaagctgcatttacaaaccctttaagtgtctctaccatgacccagagaagcaaatgcagcgctgttatgttaaccccggtggcctaggctggctgtgtgcccttgcccttcacctttctccagagcatccttggcaatgggtgttgggagctttgggggccctgggtggagttggctgttgagaaaaggtggagggagtggagtcccagccctcaggagacagaggcaggcgggtgtctgtgagttcgaggccagcctggtctccatggaaagttccattccaggctaccaagggctagctacatagtgagatatcagtttcaaacaccccatgatgaaaacactcctgactgctgcaatggcagtgtagaagccagggggtgggggggagcacggtctcgtcctagggaccgtgactcattaccacggcgagtgtgagctcacaccaggactgtttccggtctcctctctggacaggagactgcacagcctgtgcagctcgcagaagctgcctttctgcttgagttaacagagattttgaattctactttgggtaactggggtacggggcaacagaaagccttttatagccctgtttagcaagtgaatggcctccggatggagatcctggtctcatttgctgtctttctgttttgggtttttttgttttgctttctcctatttcaatgactgtgcaccagagtaacccgcagtcctgggactggaactctgtaagactggaaagaaaaaaaaaaaaaaaacaacttgaggaaattgctggaatagttcaggcatatttctttggttaacttattttgaagttttttctgttttgtgttttcactgcctcataatttatcccagacagactgcattgtttggcaagcccttggcctagccgttcccaacaccagctcccagcactctgactgaatagaaattgtctcttagttttgaagttgaaaatgtattctagatgcaaccctttgctggaaaagttcaacaatgccacttacaccaccacatgacaggacaaagactggcttcttctcccttgttcctgcccctcccccctctgctggcttcacagagccggtcctcagaggcaagcttgcctctccaacctctgactcggacaaaggatgatattccttaataattcaattaggctataaatattgttcatgccggtggactagcattgaggtacagctccccacccccacccccacccagggtttctctgtgcagctctggctgacctcgctctgtagaccaggctggcagagatccgcctgtctctggctcctgagtgctgggattaaaggcatgcaccacaccgctagcttgtggtacagcttgtgtgtgtgtgtgtgtgtgtgtgtgtgtgtgtgtgtgtgtgtgtgtgtgtgtgtgttagtaggtttgatcccggttgagtgtgcattgggtgtgctttagaagctgaagagaaagcttaaggacacttgctgctcttgcagaggactcaccacccacatcaggaggctcacaaccacctacaattccacctccagggcatccgactctcttctggcttccacagacagctgcactcacttgctctccccctcacacacacaattaaaaataaatcttaaaatatagttttgacgtctttaaaacattatataaagctatgaagctttcatttcttttcattaattttttttcatcatcattattatgttgttattctgagacatggtctcactgtgtatccttggctagcctggaactcactttgtagaccaggctagcctcaaactcaccgagatcctcttgcttctgcttcctgagtgctgggattaaaggtgtgttacaccacacctagcccacattattctttttgaaccagattggacattgggttctgtttatctgtttacttattaatgcagagactgatctaacccttgtgcatgcgaagcaggccctgagccaaattccagccctagtttccaattatcagttcaaattactagctgttgaataaagccagtgcactagctagctcttttcttttggcttgttgtttgttgagacggagtctcatgatcttagtgcccccctccccccgcgcgcgccgccgcgccccaaatgctgggattgtaggagtggtccattctaggcctggtttgtagggtacctgtagtgaacattttggggctggataggcagttgagtccttaaagggtttgcttgcctagcagcccggattgctctgagttgcatgaagcacaagctgccgtcgcagcctgcctgcagtcaggcaagccctgctgttcaaggtcatcttcagctacacaaggagctgggggccagcctaggcagtcaggggggtctgccgcgaaattaaaaataagtagtcaaatcaatcaaatatgttcgcagttgcttgctggccggaggctggcctagagtcattctggccagcccctaagtgtcagcagatctagagagctttcgctttattggttagggtatcctgggatcatctgtgggtttgtatcttttgaggtagaagtgcctagaaaacaggtaatactgtgctatgttactaacatcctatcacatgattagtatctggtggcctgtatgtcctgctctctttcctggccgcatcagacagacagcagacagacagacagactcggcagttgggatgggcaggaatgtgttactttataaactacacaaactctaagtttaatgttggctatagtgtgcatgtctgtgatcccagcactcaggagactgaggctggaggattgctgtgaatttgaggccagtctgggatacataaggagctccaggccagctagagctctggtgtgaggtcctatttaaatagaacaaaacagacagataagaaaaacatcctgtaaacaagttattttcaacgaccccttgttgttgttgttgttgttgttgttgttgtggtcatcccaagaaaacgaatgcagggtggagaaaggctaactgacccccactattacacttctgagtttacctttctcttggcacaaggaatttgaggagtgccagaatccagagaccctgctggattccccaacggcctcccttgcagggaagtcaggcccatctgccagttccagggacagactgccaagcactgcagggtctgagcagcctgagccgatgctccatggagccctaccccaggcagggcgatgaggggcagtgtgagctgcctcttcttgcaatgtaaaccccagcccaggccttcctgacaaaccgacccatgcagagcgacgatgttgagaagccagtgctcgctctgaccactgggcttcctaaggtggtctttaccaattgccccaagcctcaaacttttggtaataaaagatagggtttttataattttctggatttgtttggtttttcatgacagggcttttctgcctactcctgaaactataactgttcagactgtcctgacattagctctgtagaccaggctgacctcaaacacagacatccccctgcctctgccaccacccagctggatctttataattttttaaaattatttcttttcattgtatgtgtatgagtgctttgcctacatgtgtggtcatggaagccagaaagagcattgaaccccctggaattggagttaaggataactatgagctactatgtgggattctgggaacttgggtcctctgcaagagcagagaatggtttgtgctttgagacaggatctcactatgtagccctagcggtcctgaaattcacttagtacaccaggctggccttgaactcacagagatcccctacttctgcttcttgagttctgggattaaaagcatgtgccacaaggcccctagcttgcttttattcctaatatcctgtatcaaagcaaacaaggctgtccccttccctggctgtcacaagtgccatgggacaacagatgagaagatgcagcttaggttggttctgtcaatcaccaggagttggtgacagtactcagggtcatcatgacacaggaaaaggctgaagtcctgagggtggccatgggcataaaaagagttctgattgatcggcatttttctgtctccaagactgtcaagtctggctgaaggtcagtgtaccactttttcaacctcactaaagtcacatggacgatggcaaggcttccaacttgtggtcttacctgagtgagggtcacatgggccctctgtcgtcccaggatgcactgcaaatggaacctagagctgggaggagactgcctgttatactatccaccgtggtccaaagctttccctcgttatcctgtgtgtgtgtgtgtgtgtgtgtgtgtgtgtgtgtgtgtgtgtgtgttcatgacgacaagtattgttggttctctcctttctttatgtgagaccctggaatggacctcaggcatcaggcttagcaacaggcgcctttacccaccgagccatcttgccagcccttaccccatggtttgggattctggaaactctcagagagaagtttctgcacttttgtggaagtgcttgttttcctgcagtgagttgttgagatccttgaaggagtgttagtcaattggtgagaggtgagaagaatttgtagcccagctccctcaatttttgaagggttggttgtgcggtgtccccttaggtgttgccatggaaagaaatcaagcctcttttgttgttagggcttcgctgagtctcaaagctagagagtgcagtggttctcaaccttcctgatgcttcacccctttaacacagtgagtgcctcatgttgtggagaaccctaatcgcgaaattgttactccacaaccataatttcgctgctgttatgagctgtaatgtaaatatctgatgtgcgggctctctgatattgcaccactgctatagaggatcagaacccatgcatgactaccaaccagtgactggctgtggctgaccttctctggtacaaactggctttgggaaatactggggatggctccccttctagccagtgagcagtttgtcacatacaacctacttttttttttttttttttttttttggtttttggagacagggtttctctgtatagccctggctgtcctggaactcactttgtagaccaggctggcctcgaactcagaaatctgcctgcctctgcctctcaagtgctgggactaaaggcgtgcaccaccaacgcccagcacaacctactttttaatcacacatcacaatgtggccagaaaaggactctactgtttcgtagaacaaaagaggacagctgttcgtgaggtgcccctgtacttggaaacctttccaatttacttcaaatgccaaacaacggggcagacttaatgacatgggtacacctttaaccccagatctcaggaggcaagcaggcctctgagttcaaggccagcctggtttatgtagtaaaatcctctctctcttttttttcaatatgttagtttattcttggagtaaacacttctttttctttctttttttaaaaaaagatttatttattatttattatgtaagtacactgtagctgtcttctgatgcaccataagagggtgtcagatctgatnnnnnnnnnnnnnnnnnnnnnnnnnnnnnnnnnnnnnnnnnnnnnnnnnnnnnnnnnnnnnnnnnnnnnnnnnnnnnnnnnnnnnnnnnnnnnnnnnnnnnnnnnnnnnnnnnnnnnnnnnnnnnnnnnnnnnnnnnnnnnnnnnnnnnnnnnnnnnnnnnnnnnnnnnnnnnnnnnnnnnnnnnnnnnnnnnnnnnnnnnnnnnnnnnnnnnnnnnnnnnnnnnnnnnnnnnnnnnnnnnnnnnnnnnnnnnnnnnnnnnnnnnnnnnnnnnnnnnnnnnnnnnnnnnnnnnnnnnnnnnnnnnnnnnnnnnnnnnnnnnnnnnnnnngatccaatgccctcttctggtatgcagctgtacatgcagacagagcactcacacattaaataaataattgggtttttttttttaataaaaagcaacctagtaatatttaatctcgtcactcatgtgctcaggccatacataaatggaaccagcctttgtctaaccaaatatagtcatgaaataaccattaagaggagcacacctggcatgttttcttagtgcaccctgcattcctggctaatgacatggggacaaagaccacactgtcattttctcctttatgttccaagccccaaggaaggaaaatcacactggattaaccaggtagtagtcaactctctttgaagagtatgagatgagatgtccaaatagaagacgggtgattttatctttagcagtacagaacactgggctgtagtctgtttctggttaacaatggccctctgaccttttcatccaaaggcctccctcccatgcagaggccaggtgggaacagtgttaattaagatccaagggggctggagagacgccttagttgtaaagagcacgggttgcttttgcaaaagacccaggtttcattccgttcccagccctgacatggcagctcacaactgtctgtaactctagtggcaggggattccgatgccttttgctggcctccacagacatgataaatgcacatggtacacaggccacatgcaggcaacaccacacacattaagtaaaaatatttactaaaaaaaaaagttctttaagcaaactcatgcatggtagggcccacacttggctcatttggatttatctggggagattccccgggttttctcggtagaattttgaagtaaaggtttgatctttccaatggcaacaagataacctgagtctcattcagtttgtctttgacttacgtccactggcgatgtgggccttttgaattgtgtagatccgttctgaaagtctgattcattcacacacacaacacacacacaacacacatacacacacacacacacacacacacacacaccaccttggtgtgtctttgtactacagcagtgttgcatgtaaaatgttcttagaataggaactttttttttaagctggtgagtcagtgagttgggttaggagaggaaattcggcctctgagatagctaaccacagcttcccctcgcccccctcctttttttttagttttaggttttagtttttttgagacaagatctctctgtgtagccctggctatcctggaactctctctatagaccaggctggcctcgaactcacagagatcttactgcctctgccttccagtgctgggttaaaggtttgtgccacctatgccctactgaccatggctgtttctacacaagaaaccatgttggctaaggccttagatgccaggagacaccgtgtcagacttgttaccttcagtcctcccgccaacctccccccccacttgtgtcccatttgcggcttcatggaggtacttctgcagcttgccttgaggtcccgaatggtttcatcctcactgctgcgtgggacttggggaaggacacctgaagtgttaataagctataacattgattccatggctgggttgagacatgaggggttcagaggagctgagggacagtgccagacaatgctggaggaccatagccacagctattagcagttaaatcgccatgagtagatttagatcaccaccaccctcccctttctggtgtgtgtgtgtgtgtgtgtgtgtgtgtgtgtgtgtgtgcgcgcgcgcgcatgtgtgacatccacacatacatattctgttttaggactatttctctgaaataaacaggcaaccgctttatctgatggcagcagtgttgtgtctgaagcgggagtgccccccctttccctcccctatgagactttccgaggaaggtctatgaatgaagcaggtgttttagaagttttggcgcacttgggaatcccccttttagaatattcgtgacgatgatagcggaggagttggggtgctcaggttggagcccttggccatggagatggaaggcgggcagcggacgatgatctggatggctgccatctgccatgaggggaggatttttgaaggtagctagggatgactgtcacagagacttcagttaatgcgcttggcgggggactctgtcggtggcggaagggcagagcacatggccaggatgttgacaggcctcctcgcccgcaaaggggaagaaggtggtggctgaaaccctcccaggttagctgaacatatggctaggaggagcagccaggctgccagcgaaggggaaaaaggtggtggctgaaacctgcctgggttagctgagaagactccggccatactggaccgaaaagccccagggaataaggaaacacttggaaatatttggtgacatttgctcatgaatagggaagaaaataaaggaagccaccaggactgtccccttggcctgcccagcaagactggaacgtgtgggtgtggggaaagtgggactcgggttaaggtcaccaggtcagaagccagtgagaaccttggagaataaaaactcccctgagcgggctggagccgcgcgtgcctagcatgagcccgcccatgggtttgactggcacccagaacccctcccgcaaaaggacactaaagagcactggctgctctttccgagaactgaggtttgatttctagcacccacatagtggctcacaaccacctataactctaggggatccaatgccttcttctggcctccttggccaatagcacacacagtgcatagatatatgtgcacacaaaagagccaaatacatttaaaacaaaataaaaccctcctgaggctcctgccgtggttagtggctaagtgtatgtcttagttaggtttcattgctgtaaaaagacaccatgaccaaggcaactcttaaaaaagaaaatatttaattggggctggcttacagttcagaagtttaatctgttatcttcatggtgggaagcatggcagcgtgcaggtagacttggtgctggaggaagagctgaggattctacatctacatcagaaagagactgtgtaattccacactgggtgtagctaaaggaaacctcaagaccacacctactccaattagaccacacctccctgtgggccaagcattcaaacacctgagtctgtgggggccaaacctattcaaacacacacacacacacacacacacacacacacactcacacacatacacaaacaaaatgagtaaatgctaaaagttaggggaatgggagggaggattttggtttacaagaccaagatacattgtgtacatgtatgaagttgtcaaagaatgataaaaaaaaattattgccaggcatggtggcgcacgcctttaatcccagcactcgggaggcagaggcaggcgggtttctgagtttcgaggccagcctggtctacaaagtgacaaagtgagttccaggacagccagggctatacagagaaaccctgtcttgaaaaacaaaaacaaacaaacaaacatatatatacatgttaaaaataatacaaacaaaaaacaaaaaaaaaaaaaaaaaaagaaaaaaaaaaaaaaaaacaaaaacaaaaaaaccccaccaacctcatctgagctgtgccaggcagtgggcagacgtggcaggcagctttggtctttgtattcacatctgagcatgccttctttcagtcctggatcttaatcctctatggcatgggtgcagacaagacagtcgaagcaagtgagatagatgctcatgtgccctgcgaaagctgagcccttctaaaaaagcgagtgcgcttttgactgtgataccagggagttcaaggccttgtctcgatagatagatagatagatagatagatagatagatagatagatagatagagtagatttgagactgtgtttggtttgtttttaagcacctgctgacctggaggtgtggctcagtgggagatcacaggtaggcaagcataaggttctgggttcttcagtcagtccccagtaccacaaaagggtaattttttttttcttttttcttttcttttttttgagacatggtctccctatgcagccctgactggcctggaactcatgctgtagtccaggctgacctcaaactcacagagattgatctgcctcagcctcttagtagcctagaagtaatttttcagtgtgtaagatagagacagttgggctggtgagatggctcagtggttaggagtgccgactgctcttccgaaggtcccgagttcaaatcccagcaaccacatggtggctcacaaccatccgtaacgaaatctgatgccctcttctggagtgtctgaagacagctacagtgtacttacatataataaataaataaatctaaaaaaaaaaaaaaaagaacaaactgactcatctttaaaaaaaaaaaagatagagacagtctatcaagtgatttgggctgtggtatgccccgatgtaggcttttgtctatctgtataaacagtattttcttacttttgccccaaggcacgacaacaagctcagatacgccagcaaatggcagaggacagcaaagcagattactccttaatcctgcagagattcaaccaggagcaatgggaatactaccatacccacatccccaacatcttccaggtaagcgctccccagtgctcagggtttgtgaagacaggatgttctgatgggacaggctctcactgtagcctggaagtcactttgtacctcagctggcaatctcctagcctcggcctcctggtataacaagtatgcataaacacatctggcttcccaaatgtcccctgagtgtgtttgtgtgtgtgtgtgtgtgtgtgtgtgtgtgtatgtgtatgtgtgtgtgtgtgtatgcgtgcgtgcataagtcagaggtcaatttgtagggagtttcccagaagctgcatcaggtgacttcactactgccttcaactgcagccccaggggatctgccatcctctctggcacctctgaggacatctgcacacacatagtatacataaactcacacacacacacacatacaaataataaatcttaaaatctcggggtggctagccagcaagccccatggattctcctattttgggtacccttacaggtgtgtcccacacgcccagttttttttttttatagaggttttgggtattgatctcaggttctcatgcctgcacgacaagcatcttagtcacctagccatctccccggcccccgctgagtcgtttccccttagcatgtagatcaaacgatggccagcaataagaatgaagcacaatgttagcccgccgttcactgggtgcctgtgtggacatcctggtgttcattgcaccctcgttttttgcaggggctgagattttacaactgtgccttttagatgagcgcttcctctttaaagcatactctggctacaagaatcgcctgcctagctttaggagacaaagcagcattcagagctgtgggatttgaacaaacaagtattgtttcccttgaattgttctccttttctttttaaaatctttgtgagagagagaagagagaaagagcaagagcgcatacagacagaatctcactgtggccccctggctgtcctggaattagctctgttgacaggttggccttgaactcacagagatccatctgcctctgcctcttgagtgctaggatgaaggtgtgcaccactatgctggcccaccattctattctttgtggaggcaggctctctcactgatctgcagcctgccctcccagctgggctggccagcagccagtgctggagatcttccgagctctgctgccacagtgctaggcttatttacaccctacccgacccggccctggcatttttgcatgactgttgacatgtccttgtggcaagcactttaccaactgagcctggatcccatttatttatttttctaagacaggttttctctgtgtcctggaactcactctgtagaccaggctgggtttgaactcagagatccaccagtctctgcctcctgaggtgctgggattaaagtgtgtgctgctactggctcttgcatctttttgggttttttttttctatctcaagttctcaaaaatggtataagagactctgtgtgacacttactgtggagcactggcttgtcacagtcacagcaagccttaccttccatttcagcatgacagtcaatcaatcaatcagtcaacacacacacacacactcctgtttggaaactttttgtctgtttcttatttgtttttgagatagaatcttgctgtgtattccaggccagactcaaactagtgatcctcctgcctcagcttctagaacacaaggattacatcaccacaccatttgaggaatcttttaggatttgagttccaaatgtagaaaagccaaagtgactgactgaagtaaacccctgatgaggttctcagggtccccaccacaaacctttaggtcagtatttctcaacctgtaggtcgagacccctttagggattgaacgaccctttcacagaggtcacctaagaccattgaaaaccacgggtatttacgttatgattaataacagtagcaaagttacagtaacaacagaatacttttatggttggaggtggcaggtcaccacaccatgaggaactgttattaaagggtcatagcgtagggggctgagatcactgctgtgtgctgtggagggcaggactctagttctgtctcagcctgggttgtgttgagactgttaccaaaatggttttgtaaaagatggaaagtggagggatgtatattgacagggaggattctaataaaactaaaaacaaacaaactaacaaaaaccaaacatgcccctctgatgtaatcccaggacttgggaagtagaggcaggaggatcatgttaaagctagcctgtctccaaacaacaaagtaataataataaatagcataatagggccactgggatgggttgtacttcctttcggtggcactgtgataaggtcctccctcaaggccagcttcaggaaggaagggtttattggctcccagttgagggtatggagcaggatatcatggccctgactgcaacaggaggtcacatgctggcaggagctggggacaaggaatggtgcgtgctagagcctggctcaccttcttattttaatttttttcctatatttttattttgtatatttgagtgttttgtcttcgtgtatgtagtctgtgcaccacatgcatgcagtacctgcgttagccagaagaggtcactgaagcccctgggactatagttacagatggtgggaaccaaacccaggtcctctggaagaatagccagtgttcttaaccactgagccatctctccagccccctctccatatatatatatatatatatatcacttttacatttatttattcatgtgtttagtatgtggctatgtgtggggtagatgcttgtatcacagcacacacagtgggcagaagacatactgttttctccttgctaggtgggctctgggttttggatttgggttatcaagcttgatggcatgagccgtcacacctgctgaggggtcttgtgggtctgcctttttcccctaggctggaaccccagcacaatgaataatgacaccacatttagggtgggtcatcccaccgcagttaaactaatcaagaaactccttccttggcatgcccagaggatatttggtgatggtagatcctgccagttgaaatcaacgttccacatcacaggagtcttccagcaattacaatacagttgtgtgaagcaatcactacgcagcccagccgttcattgaacacagcacagcaggctgatctatgaccgtacagtaaacacagggggagcagtagtcacccccaaaccactacctggattagcagcagaccattttatacacggtctgatttttgcagaaaatacaagagatggaggagaggcggattgtgcgtattggggagtccatgaagacgtacgcagaggtggaccggcaggtgatacccatcatcgggaagtgcctggacgggatagtgaaggcggccgagtctatcgaccagaaaaacgtaagcatgctctctgggcttctcctggggccatcgtcccttccttgtcccaccagcagcacctccttcagggaccctgggagttgctgggtgtggtctttgtctttttctacctgaaagccctttcttgaagccttcagggtttagtccccactcacaaaacacactcgcagggatgtcactaagttgaatggaagtgttttgctgggattggactgatttctggaaagattcaaagttctctgcggcacccgtgacccagctgcctgcagaggcgtggggtgtttgacaccagatgctgatggcacccctcattggatagtccatgtcactttcaggtgttgccaaaagtcccttgggagacaaaattgcctttgccttttgtttaaaataccactttttttttttttttttggtttttggagacagggtttctctgtatagccctggctgttctggaactcactttgtagaccaggctggcctcgaactcagaaatccgcctgcctctgcctcccaagtgctgggattaaaggcatgcgccaccactgcctggctccctgcattccacttttaatgatctctgaaaagttttatcagtctggtgtgccctgctgccttggaatgttttaaatggtagatttctgtaagagaaagtgccaggcaataggtggttttcttgtgtagagttttgatggtaagatatcttgcctcccatttcattaagacatgttggctttgagcatccttcaggggcctctgccacatttgtaagaaaaaaattatcagtggtccaaaaggaacagcaccccctcccccctctgactgcatcctacaggagagctttctacctgaggtgctcaaaccaatcttaccttgactggaatttcttttttcttcataattatgtcaccagttcaagatctctcagaaaagtttaaccgtctaagcgaagctccctccaggcaccctgtttaagggttcagtgacacgtcatacaacacgtggacaaaggatgagtccttcaaaagcaaagcatcatgggaggtggaggcaaaactttgtgagacaatctctctagcaataaacacagtgctgaggaccacagtgctgagaaagagtgggattctcagtagcatttcttgggtcctccttggtctgtatcatcgccactctggtggtgacctgcctgtccctgggtgtgattgcaggactcccagctggtcgtagaagcctataagtcaggattcgagcctcctggagacattgaattcgaagattacacacagccaatgaaacgcacagtgtcagacaacagcctttccagctccaaagaaggcaagcctgagctcagatttggcggcaagtccagaggcaagctctggccattcatcaagaaaaacaaggtactggccatttggaccctgcgtgggctgtgagctacagatgcagagtctcagagtttatcttttggtcttaatcaaactaagatctggacttccagagagcgagagaggacagttagtgtgctgcgttcaattcacgattcaaacggtctgtctctggtgttggagtctttgccatggcctctgtcttattgcagatgcgttgtcccaggaccgggtcacccacactaacatcactgacctcacagccctgtcacccacccccatcctcccagactgctgggagcaaggggaccgagtcccatctaatcaagcttgccagcctgaccttggttttgacacgttaacctgtctctgtgaatatttttcccttttcttttcatagcgtggtatgtaggtgcatgacagctaacccggcggcctaaaccggatggaagtggccttactgcattaaccttagattagactgattgtctgagttttccaggacaggactgtccccctgttttagaccccctctcccccatcgaactgcgttagcttagatgtggacgtgtttacctctggcttaaactggttctagaacgactaacgagagcctagattgcatgtcactgtctgcatgagctttgggtcatgatcttctgctgtcctgtcgcgtactcacggaccctctcctttccgccccctctgtggaccgcatcctccatgatttcttttgtaccgtggcatcgatattaatggtttgtgttttacttgctttggatcttgaatatgatttgatgcttatttctgttttgtgtcttcttgtttctgattttttttttctgtcgtcattccacccctcacattgtagcttatgtcccttttaaacatccccccatcagcctccccctccgccccctgcctctgcctcaccctctgctgttcccaacggcccccagtctcccaagcagccaaaggaacccctctcccaccgcttcaacgagttcatgacctccaaacccaaaatccactgcttccggagcctaaagcgtggggtaagttccgctccggagtcctgcgtctcttgcgcaccatgttgcatgtctcattctgcgtctttactttgtgagtagacccagtgtgttttcccgtagcatccagagggagagagagcctgagcctagactcccagagagcagacgaatgacagaaagagaggaaggaaagagccatgcggaggggaatgagcagcagagagccaggaggcctgaggtctttgactctctagtccgtgctggaagcacctcacacttccccttcagagattccgagtcattcattttcctccttggtctcaccaactctgactcgctctctcagacaatgtagaagatgaggaagtggaagcgactagacagtcagaaaaatctgtgttgagtaattacagacagggatgcggcacaggctctgctgcccaaatgatgctgctggcgaggaggaaggaatcggaccgggcttactggttcccttgtgaagctaaggggtaacaatagcatacctctcacacctgcatctctctgcaaagggagaaggcaccacagcggcgacattcctccacggctccctctccactcagtccccaccttcctcggtggtgaatccagtgaattactggaagctgtggagccgggatataagtgtcagctcacgtggtcctgtgctctgtggcacccaagttcagggaacagtctcttagactgcggttgctgttacgactcaggtttgaaatccttcggaggaccagaagttcagggacatccttgggtatagaacaagtcccacgccagtctgagctacctgagattctgtcacaaaacagtttgttaccatacatgaacctctatgagaattaggcagtcgtccagcatagataccagcttagcttaatgggaaaaggctgggaaaaaataatttgtgacctcccaagtaaaactaagtgagcctcctccagttgtatttataataaatgtctgggctgagcgtggcggctcatatctgtaatcctagcagctaggaggctgaggcaggaaaatgttatgtttaaggctagcttggactacatgtctttccaggctagcctggaatgtaacgtgagtccctgcctcaaacaaacagacaagaagtctgtagccgaatggtcagtgccgcacccatgtgcaggtcctggcctgtggcgttcccctgcagacagatgtagttgaatgccttcctctgggatctccaagcatccaagcagctgagtactgagacacttcttccttttctttttttggagacaatctctacatataaccctgtgtgtcctgaaactgtggcccaggctggcctagagcctctctggagtgctgagattaaagtcatgtgccaccatggccagctggagacacttcagtgtagtccctgagagctcagttatccctaaagccagagttgggtccagaccgtgggctgataagcagcattcttgcaaatggaaagttcccaagttttgtgttttctcccccaccgtcctctggcatgggaaaaactttcagccgtggctaattagatgagtgtctgcctcagatccatgcgctggtggatctctttatctgcagaatcccagtactgagagactcttcatttcataggaacagtgttctggtctatatctaaccttagtactccagaggctgaagcaggaggattgcagtaagtttaagaccagcctgggcttcataatgagatcctatttccaaagaaagagagagaaaggaagggagggacggagggagggagggaggggcctggagtgtggagtagctggtagagtacttactttgcacgaattcccagcactgcacaaaacatgcagtggttcagcctgtgaagatcagaacgtcagcctagactacgtgagatcctatctcaaaactgaaataaaagaatgggtggagaagctgggcagtggcggcgcacgcctttagtccaagcactcgggaggcagaggcaggtggatttctgagttcaaggccagcctggtctacagagtgagttccaggacagccagggctacacagaaaccctgtctcgaaaaaacaaacaaagcctgggtggagaaatggctcagtaggtgaaagtgctgagggaagcctgattacctaagtccagttcctcggccacagtgagagagagtcgtctccccaaagctgcccactgccatcgcatgcatacagccaatcaatcaatcaatcaataaatgaataaataaatacatgaataaataaataaataagaaagagtatataaaaagaagagtagtgtccaaaaagatcaaggttgaaggaaggaagggtacacttgagagaacttgttctaaggctacttagtaggccaagttagaaatcagaaatttgggttggtgaggtggttcagagatacgtgctcttgctgcgaagcctgacaattaagtttcatctctgggacctataaggtggaaggagagaaccaactcttgcaagcagctctctgatcgccacgtgcccaccttagtgctcgaacacactcacacacacacactggataaatgaatgtaatcattttttttaattaaatcagaaatttaatttcctaaaagtgtcaggacagccactgtcagcaggcagagtagcttcagaagtgcatgatggattgtgctgagctctgttgttgggactggctgagcaatcagccgcttcctggctcgattattctggcttttagaacttcactcttcatcagagaaatttccatgaatgtaaccagggtgaaccaggctcagagtcattaatttcatcacattacgacatgatcattcgtgtttataaacatctgcatctgtctgtcagacatgggggataagacgtgctgagtggcttcagttaccatccatgtgcgtgtatggtccatgacaccatatcccaccgtctcctggtcatcgatggtttctgcgtctgtgttctgatgtccccagagtgtgttgccaaagtgttgccaaaggccaaagaatgtctgtgttcgattagtataagaaaagatggtttaaaaaaaaatttgatttcagcaaacttctttgatggaaactttcctggaaggtaagtgcattctcccagtggcagacaagctagaagctgtgacagggggaccggagagcggttgtgctgtcgtcagatctgcgtagggtcagatctgacggttcttctggccaagagcggtgggggaaagggaactgggggatggtgggtgggagggaggaaggaagaggggaacagcaggccttggaaaagaaaacatcttaaacccaacatctggggaactagatagaccctatttgttaagcagcttcggtggggggtggggggatgccgttggtaggtccatgcaggccagggtcagggagccctctctcccggtttactttcccctgcacctgaacttgagactctcgagcaaatgcgctccagggaggattctcggagaataacttggctgtggctgtggtgtctcttgttcattcccttcagattttttttcattttgtgttttgtctgtgtgagcgttccctgtgggcatgcctgcaccacatgtctgtctattgacttcagagtacacaagaaggcactggatcctctctgtctggagttaccaatggttgtgagtcaccccgtgggtgccgggaatcgaacccaaatactctgcaagagcagcacgtgctcctaaccactgagccatctctcccgtgccctgtggtgtgtcttataatctatcatatttcacagccttcagatttgaattctaagtatctgatttaatgacgagtgtgtagaaattgtatgcaaacatttctctttcttttctttctttttttttgagatggagtctcactgtgtaaccctggctgtctatgaactcactatgtagaccagtctagccttgaactcacagtgatctgccttcccctgccttctgagtgctaggactacaggtttgcaccacccccacctggctcagtgtgcaaacatttcttagcatagcttagtttattttaacataattaaacaagattaaatagttttgtgatatttacagagggtttgcactgccagaccatcactgttccatccttacacatgtaagatgtacaaacatgtacaaagattagagtggagaatgtgtccttagcgctgtgtgcgaaggcacatgcctatgattccagacccggggaggaggtgagaactggaggactagaagatcagagtcatcttccctacacagggagttcgagactggtgtgagctacgtgacaggaaaggcaaggggtgtggaagagatagagattgatggtgtggatagatagatggatagagagatagagatagatagatagatagatagatagatagatagatagatagatagatagatagaacgaacctgtccttaatttgagtctacaaagggtaattctattgtcttaaatgagggtttccttttgaacctgtgcaaagtacagctaaaactagatggcttccctcatagtttagagttaatcttaggaaaagccatcatagtagagcaagacattttagatgtccattgttgcatgttacattgtgaatgcgtggttttccttttttctttatcttaccctgttctcttgctgactgttggcagactcagtctctgtgttatcacaaagagctcatgaagaggactctagggaaacccacacacgccttggaggctagggactatgttgtaagtccgcctgtgatgcagataagacagtcacagccaaagcactaactccatggacagcgccaagactggggacacaggtgcagctgtaacacttctatcccaccgaacaaaattctctgggacaaggaggggatattactgtataaaattaacagctaccgtagctccaaaacctgtataggaagatccaagccctctcatgggcatccaatgccccaatgataccactgagctagctcactgtctgagtgcccgctttttgtcttagttctggtaaaatctttaaagagctgcagcagccacctgagatagccatggtatctctggatatgagtttacggcagaaatttacccaccaaatacagctattgcgtgtggtcaacagaaagcaacagtttagggctggtgatgtgaccgtgcagagatccacatctgtgtttgtagcctgtaggtcactagggagtcatgtcacaagcctggagaacaaaaactcaaagaagcatgggcagagacggttccaggagagttcaccaacttgtgtctgctcgggcacttaccgtcccctttctttgcgcttgaggttagtagctgtgaccgtccaatgacacatggacacgctggctctgtctccctcctgtgttattgatgcttgcttctcccagagcccctaactgtcacctgaagctgatggcgtttggtcccttagtgtctagtcacacactccatggggtctttgccgttattcttctaggagactgctttctaatcggaagtgacctaattgtctggcttatttatgacttacaacctgaaaaacactttagtcatctttaaaaagaattccgcacactgaggtggcacctctggcaggtgatctgtcaccacccacttcagaaaatggaatttgggagttccggtgtttccaaaaaactgagtgtgagaatttggtatttcctgttcctctcttggaacaggtgttcagttttaatcacttgctcttattttgaactggaaaccttcctattgatactacaaattcgatgctaggagatttcgattataatctcaagtcatgggaggagccccatagagaataaatagtgagccgggttctagaacttcgcaagaagattgtgtgtgaggaagtgctagtgtctgctggtgtgctctgtgggcgccgtctcctgctctgcaccatgggtgttgtctgtctgaatgacgagctcagcttgtgacagacaatctgtgctttagctccaggaggctcaacaagttcagggccgtgcctaagcagacattcttgaaaagctgttcaatttctctcctatttaacaatctcttccttctacgtgggaacagtttctttaaaaagtgattgcctatatgcaaaggagtatcaacttttttttttcctttgagacagcatctatgctgcagttcctgctggcttggtactcactatgtagaccaggcctctacctcctgagtgtgcgccatcaagcctagctagaggtctcagctttaaataatcttaaggatgcaaataatataaaaactggctaaggaattttaagccctccctatgcagcctagcaatcaagtgtgctttctttggtagtttatccatgtctgcaccatatcacccctactaggatcgtcagagtgtcgcatgtcgagcactccctaggcagacagcagggtctcagaatcgtgtttctattctgagttctcagagccgtcctactatgctttactccagcgattgagggaggtttctagtctctaggcccagcagtaacggagctgttgtggccctgtagtaattagctcacacatacacgcagcagtagcagcactgggacctaaggcagtgcttacccataccctaaagtcagcttctacaagctgcagctcctggtcccgcaccaatgctgtgtagcctctgtggacagtcatggcgtccagtagcctcaggtagcttggcatcccactcctcaggagctgaaggatcaagagatcaaggccagactgagctacacagcaagacccaagctccctcaaaggagatcaattcattttgaaaaagaccaagccttgaaagaccaagcctcacggcccaggaggggtgctggtgacaggtgggaaatcacattgtcctgcatctccaacctgctgtcaagaggccttccagcttctgacctccacatgcacgctgtggtatgtgtgcacacgcctacacacatgcgctcaggagcacgtgcacacacaccccgcacacacaccatcagtgtaaggtgggacgtgctggagagatggcacagcagttcagagcccttgccgttcctttttttttttttttttttttctttttcttttttttcttttttccggagctgaggaccgaacccagggccttgggcttgctaggcaagcactttaccactgagctaaatccccaaccccgcccttgccgttcttacagagaaccagaattctactccagctcctacatgtctgctcacaccccatgactccggctccaagggttctgttgccctcttttaggcgagcttgtacatgccctagagtgtgcgcacacatatttacacacataagtaaaaataagtatttttcatttaaaaagccaatgttaaaaaaataaaaactaaacaccagaaggagggctggctgccaatgaccccagcgctgggggtgggggacagaagagaagaatcgtggggagtggggggctatggggagaagctgcctatgaccccagcattcaggagacagaagggaaggttccctgaaaactgaggccatcccagccagggatgtacattgggtaaccctgtctcaaaagtaaaattttaaaaagactctgcataaagatgttctgggagagaagtgctatgcaatttttttccctcttagggtcattatttgtcaccgatatgcctagcaggtttaaagtcctagggtctgttcccagcacttccccaagtcaccctccccaggaagctgactttcagaagcatccagtggaaggtgactgactctgcagggccatgacgaccctctcacaccttgtctcagctctggcacccaagatgctaagaagagtttctctcccgagcagcccctcctgtgaacttttgcacagatctgcctggccatttcacaagtcagcagggaactgctgttatgcgtccagtgagaccggccagtgcctcctcttctgacctgtgtttctctctctctctctctctttcccgtttgttacctcttcaatttcccacgaagctttctctcaagctggtaagcaccacatcccgtgcatgtccctggtctaattgggttctggtgtgtgctgtgtgtgctctgccccgggcagcctgcccccgacattaactgttccccttcattctcctgtgggtgcttttgttggtgtttggttgcgtgactgtcttacttactaagaaaattaatgcttaacatgattttattttattttactttggggaccttagagttgccaagcattgatcaattatctatattcatttgaatgtaattgtcagaaattgaggagcaggggggggggtcttcctactggatcattctgggtaggtagtcccttcctgggagccacaggagtagataggtaaaaacaaaaaacaaaacaaaactgagagcctaaaggagacactggggaggcagaggcaggaggatctctgtgagtttgaggccagcctggtctgcagagtgagttccaggccagccagagctatgtagagagaccctgaaggagacagtcatgcatgtgtcatgcctgtcatgactgctcaggtttctggtagggaagaccagtgggaagctatgatctttggtgggagcattgggtaaagctgattccaggggccatagatgctttgatggacaaagagaactcctggtccatccttgcctgagctatctacttagcatctgtctgtcttgcttctccttcatggtgtaattcaagcaaacagcctgagtaactgatttattaaaagaaaatcttaaccaacataacccactatgctttgagaatgaatgaggactgcggacatggttcatggttcagtagtagagtctgcctaacacaggcaaagtcccagattccatccccagccacacacacacacacacacacacacacacacaaagattaaagtcatggaatcttcctgaatgccaaggcagagcaattcctccattctcacagtaatggaccatgttagctaaccacagagtaatacctggggtatcactcttgctgggtgtcctactcttgatggcctggcatgacatgtgccatgtgcccatgaatttcctgtagctgtgcacatgcatacgtgtacatacatcatttctcaactgactctattttatccacagtccagtcaatctcaaagacatatataattaatttttttattaaataatatttctcaaaaatgaaaccccgggaagagtctgcagtcaagaggggtctctcagatggaagaggtctggatgctgaataactttaagcagtctttccttttgggaaacaaatcctttcaccagcttgggagtgggctgttgcttccatggcatttagagatggcacagtgggtagggctgcttgtcctgacaagcttgaaggcatgtttaaattccaataccatcaagaaagccaagtatggctgcatatatcttcagccctggcactgaggggtggagataggtgagtgtgaggaaggcactggggcacccagcctcaactgaaaagccagatccaaggctgtaagatacagagggagaaagatgcctgacgtccagctggagcaaccccttgggtatgcacgcatcagcatgtaccacaaacatgcacacagacgtgaactatgaggtagaaaatgaattggctgtacaagcaaacatctgttttatccgggcttgtgcccgggagcagtgtgggtcccatcagaagatggggcaaggccgaatacagacccctctaacctgggtgtgtctggccacaccctccagggcaggttccaccattctacaaactgggtcactctggctgtgtcagagacatcccccatgactcagcgctagaaacaagagccccttctccgcagagtgagtcacctgccacagctttgtttgagaaaatctaaacttcaaaagcccaattgggtgagacaccctttctatagatcctaagtttctatgagaagctgctgacctgaatctccatagcaaccaaggtgtgaggttttcccagtgacttgttttcaagtaataacactgttgacatagccagggtagctattgagagggacctggctcttcgatggaccttttatcaattgaagatgatgattttgttgtcatgagtaactagtccttcctcttctagggccagtcacaagccaccagcctgcagtgttccttacaggcgtctccaaagccattcagatgccgtccaagcctcatacatgtcctaagagtcgggtcaccactgaaccagccacattcaagtggggcagtcagctgtagtagctgtacagtgcagccacacaatgtccccagcatcacagaaagttctagaaggctctctggccactgcccagatcaccttgctgacacaactccatgacttgcattgaattttgttccgtctgagatttaaaagcaaaacaaacaaaacctcagggctgggaaaatgagtccagaggcgaaagtatttataagcccagcagcaggcagacgtgtatataagcctagcactgtgtgggtagagtatgcaatgggaaacaaccaagataccctgtctcaaactacacacacacacatacaccaatctaggaaacaatgatcagggtcgccaagctggctcactggaatgggctgtttggtgctaacccgatgaattccagagacccacatggttgaaagatggagctgactcccacagattgtagaatgaatacatattgtaaagatggattttcctccaagctcagtgcttaaatagaatgagtagaaagctagacagtgatgtttcactagtgtgcgtgggagaggggagccgctggcctgtaggaccatgcttggcctggtgacaggaatactgcccatcctctcccgctcccacacccaccacacacccagggggtctcaggatggagtgctgacctccacctggcctaaggggcgagccatttgctgactcctgtgctcccccggcagcagcttctcctaatcagcctagaagcctctgtcacaagcccccatgtaagctgcttggcaaatccagctggattccagaatcacgttccctgggccaccaagtcagtctcgctcttgtttgaaaagaattgaggttttcaagtaaaatctctttttataaatttcctggctttctctgggtccattgaatacatttcattctttatgaaaatggcctcacttaaggaagagctcttgtactgccttgaagccaaggaggcagtccttggaggaagaccagctccccgagagcgcctactgaaagtacagtaagagccaacagtgcagtaggagcttaagagagtcccagccaggtgtggtgactcatgcctgcgaccctggcactcgggagtctgagtctgaaggattgcactcagctgagccagagctggagagacggcttggtagttaggagaatgcagaagacccaagttcttttccaacatcctgtagctcacgaccacctgtaactcattccagggaccctaatgccctcttcactgaacacacaggtgcacgtgtgcatatgggctatgggcacttacacatacaattttaaaataaaatcttttaagtctggggaggggggatcaggagctagatgtggtggtttacccctttaattccactacctagaaaactaaggcagggggatcactgtgagtttgagactgtagtctggaagtacaatgcatgtctagcacatgtaggcctcaggttcaaccctgcagagaaggggtcagggcgtgttaccacacgctctgacagtagaagcacgggaggttggttttgtacactgtaggaagtaaatctggggtcccagagtcagcgagggacaagtgacaccagaagggggtgatggtttttaaatcgtactttttgctcacatccacaatggaaagcctgtctgtcatctcacaggggcaggagctctgactgcctcagcattgagaggagagatggttagggacacttcaactaaggggaaagcagagacttagacacaatactgacaggaactggattacattagagaagcgtcacttcctgtcctgggtgggaatagtcagagtatgcagtctctaaatgtgtctttgggtctccttctgggtcagagctatttccccccatctctcctgcggtgtggttgaccctggccttccctgtgttgctctggcccttgcagatgacacgtggtgatttgtgggacttcccaggtctgcatgtgtttgatttttgcatctcagctggtgcagcagggaaacatagctggctcagcaggtctgcaggcttggtctgcctgctcctgcccaggggcactgcaaggctctctggtgtctcatttatgtttgtgtctgcagggtgtcacaccagaagacttcagcaacttcccacctgagcagagaaggaaaaaactacaacagaaagttgacgatctcaatagagagatacagaaggagacggaccagaggtaaggcagatgtgccctgtcaaagaacccaagctcagtctggaaagaagaaatccagtgtgtgtgtgtgtgtgtgtgtgtgtgtgagtctgtgtgagtctgtgtgagtctgtgtgagtctgtgtgtgtgcatatacacgcatgcatgcggtacccacaaaggccagaaggggcatcagaactcctggagctggaattataggcaagttgggaaccaagctttactcccttgtgatgaagcagtacactcttactgctgagccatctcttcagcctctaaaacatagaaaggcatagtcttggcaggtgggtttttttttttttttggtttttgagacaggatttctctgtggagccctggctgtcctggaactcactctgtagaccaggctggcctcaaactcagaaatccgcctgcctctgcctcccgagtgctgggattaaaggcgtgtgccaccacgcccggctcttggcaggtgtttttgtttgtcaagtgcagggcttctctgcagaggttgtattttgagtctgggaaacaaaacacacatggctagctttcataggtctcttgttctgagtgaatgtatgaagtgttgtttgctttcccagtcaatggaaggaagatattggggtcccagggtcatgagctggagaggccaccagagcgtccctcagccccaaggtacagaggttggcacgactgtacttctgatgcaggcatcaaggcacagggtgcaggtgtccatgactctccaagcagagcatcacggtgtctctgttttatttctgggcacactggcgacgggacagtgcagggtagacactttcttgaggtcgtagtcatacagtagacagtcgtttctccacgacttgccttccggaattagctgctgctggtcagacagggtcttgggtctgggtccggacagtctcagtgatagactccacctcaagggtgagggtctcccctgtcagggcccttgtgaagttcttgttggcatcagccacatcgcctcaatacgagtagtcttaggggttttctctcaaaggtcaagggggtttttgttttttgttttttgtacaaaggatggctaagattctctcctctctcccccatatcctgcctttgagtctaaaatctgtttctctttttagttgaggataattaaatattagtcttccagcagattctcaagtctccttcctctcccccccccattgtcgtagtcgtcgtcgttgttgtcgtcgtcttcttcttcttctcctcctcctcctcttcctcctcctcctttcttcttctcgtcctccttctcttccttctccttcttcttcctcctcctttcttctcttcctctcctccttcttgtctgtttgtctgtctgtttatttgcagaccaggttgactgcaaactccgattcctgcctctctgcctcctgccgtctgagactacaggaggtataagcaccccaacacaccttcgttgttttgatggttgtttgtttgtttgttttttgaaagagtcctaccctggaagtcattatgtcacccatgctggcctcaactcagagtagcaatcctcctgctgcatcctccccagggctgggattacaggattgcaccccgtatgtcttttctctgagcggtatagtggtctggaaacaaactgtaactggtctgctctggtcactaacagactagcatcctgtgtgcagctctgccttgggtacagggagtcttaggaggtttttctcagaggttaaaaagggtgttttaaccgggcagtggtggtgtgcgcctttaatcccacataaaaagccaggcacagtagtgagagtctgtaaccccattgctggtaagaggtcctgactcacaaaacaagtgaggtggctggagaaatggctctgcaattatgcacccatgctgtgttccaagttcagactccagcactcagaacaaacccaacatccctcagacacttctaacccaagctccaaggtgggtggagtcggcaggatctccaggccctgcctcagaggaaaggggacagagtgatgcaggcacgggactgcctccggtggccgctgggtattcacacaggtgtgcatctcacaggcacgagtgtgcatacgtgcacgcatgtacacacacacacacacacacacacatacagagttgttgttgttgttgttttaaagaaaaagaaaaggtagacaacagataaagactcccaacgtgacctccatgtgcacacatacctacacacacacacacacacacacacacactaaaatcagtgaacttatagattcatctgaagcaaagggatggtctcactgtgtagcccaggcttgcctcctgccttgaccacctgagtgctgagatcaccagtgtgtgtcgccaagcaaacagggtgataggttttaacagtaccttttcttgctgggcggtggtggcacacgcctttaatcccggcacttggaaggcagaggcaggcagatttctgagttcaagaccagcctggtctacagagtgagttccaggacagccagggctacacagagaaaccctgtcttgaaaaaccaaaaaaaaaaaaaaaaaaaagtgccttttctcttttaaagatttgtttattttatgtatatgagaacactataactgtacagatggttgtgagccttcatgtggttgttgggaattgaattttaggacctctgcttgatggggtcaactccactcgctccggttgacctgcacactccggcccaaagatttatttattattatacctaagtacactgtagctgtcttcagacactgcagaagagggcatcagatcttgttatggatggttgtgggccaccatatggttgctgagaattgaactcaggacctctggaagagcagtcagtgctcttaaccactgagccatctctccagcccaacagctccttgtcatttaaagaaaaaaaaaattgagtaaaaggtggtgtggagcctgtgatgttggggatggggtattctggaaaggacagtgacaaaaaaaaaaaacaaaaaacaaaaaaaaacaattggctccagtctcagtgcccgtgttcttgttatccctttctcagagatgccatcaccaaaatgaaagatgtgtacctaaagaaccctcagatgggagacccagccagcctggaccagaagctcaccgaagtcacccagaacatagagaaactgcggctggaggctcagaagtttgaggtgtggagaacagggagaagctggaaggggaagggtgtctctgggcaggcccccaggggaacccccatacctacctcctaccttttcagtggtaggtgttacaggagagctgggctgtgtcccaggagaggaaaaccacccgcctgacatgtggcgtgtggggtttcccagggtgacctcacagtcaccggactgagtcagaaggaagtatagaataattttatccgtgattacatggctgcccaagagtttggcccagtggagcctgctgtctgtcctgtgaggtgattggtaaatttggtcagtgggggctttcctacctgtctcccaactttcagaagaaggaagtcgttgtctgtgagcctacctgtatagtgcagggtctgagacatcaggctttaagtgactgtctagctctgaattaaggcccaacagctcatgatctagcctaggctagcccgggtctaagtcttctgtggcttttgcttccaggcctggctggctgaggtagaaggcagactcccagctcggagtgagcaggcacgccggcagagtggactgtatgatggccagacacaccagacggtcactaactgtgcccaggaccgggagaggtacagtacctgcgaggccctgcctctggcagagagacggtctagctttgtacttacttttcaattctggaataatttctcacggacagaaggcaagagtgtctattgtgtggcctctgattcatccaacgggagaatatctcagtttactttacatccagtccgggctggtggtctgaggtagcagcagctcccacagcctggttgagcattgctccacggggtggggcagagcaagtctccaggttggtcgctatagttgtcctgtgtcttcctctcttgagcagcccagatggtagttacacagaggagcaaagccaggagagcgagcacaaggtcctggccccggatttcgacgatgaatttgatgatgaggagccgcttccagccatagggacctgcaaggccctctacacatttgaaggtactgctgcccatgggaggccctctgccttcccagactgactgggctgctgccctctctcatacatacgataaaattatagaaacaatgtatttatttactttatgcatatgagtgttttgcctgcatgtgagtctgtgaactgtgttagtgcctggtgcttgtggaagccagaagagagcatccggtcctctgcaactgaagtgacagatggttgtgagtcaccatgtaggtgctgggaactgaatcccaatccttcggaagagcagccagccctcttaacccctgagccatatctccagttccagaaaaagaaatttaaattaataaataagatggaagatcagtaaggaagacatctgacatcaacctctagctacgacacactacatactcacatacactcacacattacacacttatacacactacacacacacaacacactcacacatttcacattcatatacacactacacactgttacacacacacaacatactcttacactacacacacatacactcttatacacaccacacacatattacacactcacacaccttacacactatacactcacacacaacaccctcttatactacacacacatacactcttacacacaccacatacacacgtacactcattacatactcacacactacactcttacacacttatacacacattacacgcttatacacactcttacacactcacacatttcacattcatatacacagtacacactcttacacacacaatatactcttacactacacacacatattacacactcacacaccttacacactatacactcacacacaacaccctcttatactacacacatatactcttacacacaccacatacacacgtacactcattacatactcacacactacaatcttaaacacttatacacacattacacgcttatacacactcttacacactcacacatttcacattcatatacacagtacacactcttacacacacaacatactcttacactacacacacatattacacactcaccttacacgctatacactcacacacaacaccctcttacactacacacacatacagtcttacacacacgtacacacattacatacttacacactacactcttatacactcacatacacactacacactcttacttatccattcatactacacactcacacattacacaacacacacaaacacctcagagtagggaatagagtaactgggtgctgttacttggctggcactaaggagctgctgatggtatttaagctgccgataggcacaccactgtcccctacataggatcagcagggtaacaggtagagcgtcagcacatgcctccgcctggacatgatgcagtccagagaggtacagaggatgctgtgagagaagagcctctgaggatctgtgataaaggctgtaccagggcatcatcagtagggaccaaaggtgttcgctgtgataaaggctgagccagggcatcatcaatgaggctttgctttgtgtcacacccaacacaagcacattggtgatcctgctgacaggtccttaaaccacttgaccctgccctatttcatttctactgctgggatgaaatatcctgagagtcaggggagaaagggttaaccttagctcacaggccaggtctcggtccatcagaggagggcagccaaggcaaaatggctgctcatgcctgtgctaagccagcttctactcttacacagcccaggaccttaccagggatgtaaccatcaattacggtggttatgacagcttcccaccagccaggtggtgtggcaccaatcccagccttcaatcccagcactcggcagacagaggcagaggcaggcctagtgtacagagagagcagagctccaggacagccagggctacaaggggggcgggggagacagcctcccacagacacagacatacctctaggccgacctgctgtagacagttcctcactgactcttcctggtggtttttcacagctgacaaaactaatcgtcacacgcttcccaaaccagcctacaggtgtggctggcttttaaatgatcttagagaactgtctgggggccttggctaaaaagaggacacagccatactgtggttgaaagacctgagcaaaaggcagagaagagccatggctagcccgatggctcatccttaggtcctcgagatgtcctggggaaggacgagtaagagtgtcccagtgaacccgagtctcctaggctaccaggcaacattaaaggagagctgggaaagtagaaccttgactttttagaaaatgccagaaaggaaagagatgagggtacagtggaagctgaggaaggacccttgcccctgcccctggcccaggaaacccctgaggggagtggcttagaggagcaggttctgcaaggcttgtgaggagtccggagtggcgggtaggagggtgaggggtgacctcagaggacctgaggaagggtccacagacggtaggagaaacctagagatgcgcatgcggaaggaaagcacttagggcggagaacccagcgtgcatcagaggaccgaggggacattctgtgcacagatctcactttgcctctagtacgccattggcagggccctcccagcactgcctgagacctcacgcctcactgtactcctgcaggtcagaacgaaggcaccatttccgtagttgaaggagagacgctgagcgtgattgaagaggacaaaggcgatgggtggactcgcatccgcagaaatgaagacgaggagggttacgtccccacttcctacgtcgaagtctatttagacaaaaacgccaaaggtgctaagacttatatttaatccacttaaaacaaaacaaaaagcattggagttgtctctccccaccactgtggctgttacaggccttcaagaggtcagcagagagcaagcgactcagacactcggggaactgggggcatcttgtgcctgggttcgcttgtccaacttggctgtgtacagaactgccaccggctagcttacatctgtgtcgtttgaaatctgatcggcgtttccattccattcaacaaaatgtgtaaatttaaaatatgatgtatggtggtggctcgtgcctataatcccagctctcaggaggcggagccaggagtagccaagtgagtttcaggctagcctgggcttcagagcatccaagtgagtttcaggctagcctgggcttcagagtaagacccagtaaaaataagtcataaataaaagttccttcatcgatggaagtagcctggaacgttctcctggtgcccacactgagtaacctgacgttgcagctcgggtttcctgtgttacccatttcttgtctgagtgtcccaaacaaccaaaagaggccccaggatggtgcactccttgagcgattcattttgacttgacattcatctcctggctccatcggtggtagagtatcttcaagctgttgaggcaagcttgcttagcagcccggcgccccagcgcccctgtgggcctaattttgctcagacttggttcaactgtnnnnnnnnnnnnnnnnnnnnnnnnnnnnnnnnnnnnnnnnnnnnnnnnnnnnnnnnnnnnnnnnnnnnnnnnnnnnnnnnnnnnnnnnnnnnnnnnnnnnnnnnnnnnnnnnnnnnnnnnnnnnnnnnnnnnnnnnnnnnnnnnnnnnnnnnnnnnnnnnnnnnnnnnnnnnnnnnnnnnnnnnnnnnnnnnnnnnnnnnnnnnnnnnnnnnnnnnnnnnnnnnnnnnnnnnnnnnnnnnnnnnnnnnnnnnnnnnnnnnnnnnnnnnnnnnnnnnnnnnnnnnnnnnnnnnnnnnnnnnnnnnnnnnnnnnnnnnnnnnnnnnnnnnnnnnnnnnnnnnnnnnnnnnnnnnnnnnnnnnnnnnnnnnnnnnnnnnnnnnnnnnnnnnnnnnnnnnnnnnnnnnnnnnnnnnnnnnnnnnnnnnnnnnnnnnnnnnnnnnnnnnnnnnnnnnnnnnnnnnnnnnnnnnnnnnnnnnnnnnnnnnnnnnnnnnnnnnnnnnnnnnnnnnnnnnnnnnnnnnnnnnnnnnnnnnnnnnnnnnnnnnnnnnnnnnnnnnnnnnnnnnnnnnnnnnnnnnnnnnnnnnnnnnnnnnnnnnnnnnnnnnnnnnnnnnnnnnnnnnnnnnnnnnnnnnnnnnnnnnnnnnnnnnnnnnnnnnnnnnnnnnnnnnnnnnnnnnnnnnnnnnnnnnnnnnnnnnnnnnnnnnnnnnnnnnnnnnnnnnnnnnnnnnnnnnnnnnnnnnnnnnnnnnnnnnnnnnnnnnnnnnnnnnnnnnnnnnnnnnnnnnnnnnnnnnnnnnnnnnnnnnnnnnnnnnnnnnnnnnnnnnnnnnnnnnnnnnnnnnnnnnnnnnnnnnnnnnnnnnnnnnnnnnnnnnnnnnnnnnnnnnnnnnnnnnnnnnnnnnnnnnnnntttcctttccttttttttttttttttgctttgttttgttttcttgttttgtgagacagggcttctctgtgtagccctggctatcctggaattccccctgtagaccaggctggccttgaactcagagattcacctgcttttgcctcctccgtgctgggattaaaggtgtgtgtcgccactgcccagcttttgtgtttttgctttttttttttttttttttctttttttaaatttgaggtggtgtaacccaagatagccttgaactcacaattcctattcctctgcctcagcctcgtgatggccaagataaagacaatatttcatagtagtgactggctgttggcagttacataagtggcacaaagaggtccccatggccttcctgaagccccagcagccacacctcagactagtgcagtctcgagctgacccagcccaccagacctgtttaatacacatcagctttgtagctcacattttctccgagtgagtcttgctgtcacagtacttttaaggtcagccattgtggggctcaatccccctgcaggtaccctgaacccctgaagagccttctgattggataggaggaagggcaaattgggcatgtgaccaggtggctagaaagactggagaagccctctttatccagaactcacttcttggctgtgatctccccctccttttcctgttcttcctccttctcttttctcctccacttctacttcttctcctcttcttcctcctccttcttctttttggcttttctagaaagagtctcactatgtagccctggctatcctggacagcctgaactcactctgtagaccaggccggactcagactcacagagatccacctgcctctgcctcttgagtgctgggattaaagaagtgcatcactcccactccgttgataggcagaagccagcagagttctgtgtgtttaagatcggtctagtctacacagtgagttcctgaacaactagaactacataagatagaccctgtcttaaaaacaaagcccaaaacatctcaaagagagaggtccagcagtgagctggtgaacggcctgctaggtgaaccggaggggtttccctctggtttgtgcaggtcctggcttaagtgtgtgctattaagttgactaccttaggatccgaacagatgaatgagttcagcattgactaactgagtgatgctctgtagtttctatctcctcagtggcgaacacagacatttcttccaatagtttgctgtttaaaaagggagactggagatgtgtgtcaggggaaggtggctcggtatgtgaagacatttgtccccaagcctgacgaattctagtgctgtccccgggactcacatggttgaaggaaaagaccaactcccctaagttgacctgtgtcccagaagttgacctctgaccttcgtgcaccatggcacatgtgcacacttacacaaaacacatacaaatcaatgtaatcccagcacttgggacccagatgaaggtagatctgtcagttcaaggccagcctggtctacatagtgaattctatgccagccagggctacagagtaagatcttgactcaaaacaacagaaaataagtaaataaggagagagctgagctgcctgcagccttcttttagctgaggaccatatctgaggttagcagccatgcaggagccgcccccacttagcctcttccacaccctgccctcctgcctccaacaccagtgggcccagctgctcttccccaactcccagaaactcaaagcacttctcagatttttaaaaaataacgcaaaggcactttctctctctctctctctctctctctggtatcaatgatgtgcctaaccattgccaaactccttagactcctccaaccctttgccttacggtggcttttgacatcacttcctgtttgaccatgtctgtgatcctgcacagcaggatatatttgtatatattgcactttggaacctagaaggatgccttacgtagtattgttttatttgttattcttctgcctaaccacctttttgtttttataactgctggggaggcccctggactcttgcactgtagctaggtccccggctggctgctgcgcacttgactttattgtaaacccctgggctctgagtaagtcgtttgaatatagccatcatgattgcatctttctattcttatcctaagagaaaagaatattcttatctgtcgccttccagttgtgccctcgtatctgcctctctaataaatattattatttttctcagtgctgtgtattttaagtgatttttctcttttttgagaacattattctctgtaataacactttcatctctagtactgaggacttttcaagccaaatacttttcccccttgcaaataattgtgcctctctttcttacccctcctgtcctgagggcttggagcatctgcttttcttgcatcttgtctccctctggcgatggagagctttcgcatttagtgaggccctgggcagccttagattcccctctcatcaaaggttcaccttactacagagacctgtggtcacaacgggagagagaatttgccctttaacttcctcacaccatcctgaaccaaaaaaaaaaaaaaagattcagtttgtgaagaagatgagcaagtgggaaaccttattaatcttttttggtccagaaatggggccagctaaacatgggaactaaaaggccagggctgttgtgccagaggatgggaggcagagacatgcggatcctgggttaagttcatcttcagccatatagagaatttgaggtcaccctagactacctgagagcctgtctccaaacagaagacgtagcctcgaaagctccccatggcagagccactgtggtaaccaattacttaagcccctcccttctccacaaggcaagcagtttgccagcggcaaaccgcctgcctctctctcacctgctgcttttcctaactcagggttttctcttctttctttttgtgccgcaggttcctaaaggcgtggtgcacatggccagagtcccccgagagcctcccgggagggagccatcatcgtccagcccgcttgtccccacaggcctccagcaccactcaggctggctgggcagcctccagcccacctgcaggctgggtccccatatcctgcctccccttctccttcacagcatgttcctgtggctccgccagtccctctgcctgtgtacggcacgggtgtttctctcctgcagccccccacgggggctgtccactttactctgctcccttcccacccaggccaccaagacagctgggcatgtgccctgtgtccctgctccttccgggctcccagtccacctgctcatcgcctggccactccttgcacatctcacactgtgcctttgtcaactgtcacccctggtttcctggtgactaacaaaattctgacaaggagggccagttgtgcatcaggtggactgagcacccagctgtcatccatgcgtctcttgggactcatcgtcagatgtgtccttcatgtccagaggctgctgcctcaggccttccctgtcatccagcactgttaccttccacactccattccaggggatctagagtaggactggggcacccagcccccattcacccccactcttgttataaaccatctacatggccctaattcatattggagtcccaaatccagcttgtgggccagccccgctgtcttgtctgtgtctaccttctatgagcgctgcctacctgtttgtggtaccctgtgatggagggcctcacagccacactagttactgtaaggcgggcctgcggagtcccataagtagcatttgaggactctcctctgttcccaccaaagaccttgtgcctcttgtagtccctccaatggctctggccactgcttcttcatcggatcctgttctccagaagccccagagaatggatggagctcgcttttgaagctgttgccctcctagagtggtggagcttgggggagtaccgaggtggtccttcgcacctttgagccactctctcctttcctggtacagaagtactcaaggctttggccacaagcccctgtgaagggtgccccacaagtatgagcttgaggaggttggcgtctccctctgggcagttggtagcttagcatcaagtcagaggatgaaagacagggaagtcttacaaaaccagagacagggacagagagggcaggtcctcagggttgggcctgtgctttgtccacggtttgtggaagtgctgacatccatgcattggggccagtattacagacattttgtgaggtaccacctcagagcagaggggagggtaccaaggtgggggagcagctgacaaggtgggcctggctttgggtttcaagagcaagcaaggattagcttcaggctttcttggccccgcctcctccccgtaaggccaagcccggcacactgccctctgccctctgggacccctgtgaggctgttcaggactcacatgaggaagacctaggggacagtatggaagtctggtacctaagagtcagggtctcagcgctgacacagttagtctgacctgtggcccaggcagtttcgctccagcaggttaccaggcatctaactccagaacctctgactttcagcaagttgggctgaccacagccccctccagagtgttttttatgggtctgttcacagatctcattaatgcatgaaggacaaggaaagacttgccacaaaggtaaaatggagaggctgccagtcttcttcagatgacctttaaagcctgcgcctgtccctgtgtcccctcacttcttttttaatttcctgtactaccttacatccagaaaggatggtggatgagcgtcttcaggccgttctctgagaaagtcggtctgccgtggacatcctgtggaactgtactggctctggggggaagggaatgcaggatttccccagaagctctacactccctgtccccaggacccactgcctgtcacccctagctgctagtgtgctgagacaagaatgactcactgtaaaagaacctgccctgcagatgacttagagatggaaataaaaggaacgtgacatttaccgctttttttttttctatgcaggacgtgaagctgcaatggcccctccctctaggctgagcatgcttatccagggccccagcccaaacaacacacagggaggccattaatgccttctggtggcatctgtagtgaacgtagaatgtccacatgaagttaaaaaaaaaaagttccgttcctgccagtatttttcccagaaattgccgttttgtgattccttttgattttgtgtctgtataacatccaaaatgtctctaatactggccccaacttctcttttaacctgacatcaagcaccttttaaatcatgcgtgtgcaagttcgtgtatgtgtgtgtgtgcctctgtatgtgtgtgtgtgtgtgtgtgcgtgtgtgtgtgtgtgtgtgtgtgtgtgtgcgcgtgctaattctaagccttgagggcagggcactgttgggaaggccctcagagctgtcaggtcttggtcttgcctgtgactctggaggtggaattaaaaccaaacaaagtgctttcagtagagagcactcttacccatgtaattaaatgttagtcctttcaatgttaaataaagtataacttctagtgtacctggttctctgttgtatgaagaaatgacgctgggcctggggagatggcttagtgggtaaaaagctgagcacagcaggcgcctgcctgaaccctcaacactagggggtggcagaagcaggtagagttctgtgagttcaaggacagccaggacacccaaggttacacagtgtgacctgcctcaaacaacttaagaaagtgacagagagcaatacccaatgatagtgatctggtctcctatatgtgtaagttgatgaaacacacccataaaaaattgcacacacacacatacacactcagggagggaaggattctagtcacagaagctcccaaggctgatggctggcctctggtcttctctatcactatgtaaactcaagaggagtcactgtacccagggaaaggctagggacctcctcatctataaatgtcacttccacgtcctatcacagtgacacattgtgtccaggaatggcaggcatgtgggggaagtagttctgatgggggtgactccttggcaagtgagcatttccttttttgcccctcctcctccagctggttggcctctgccctcagggatgccaatgtgtgtggggggagtttaagcaaggaggacatggtcacggtccacttatgcccctcttcccgatgactaggctagatctgtaaaccaggtcagcactctttgagtctaaaggaccacatgcaggcctggagtgttggcacacaccctcaatttcagcactcagaaggcagagacaggaggatctctgtgaattccaggccagcgtgactacatggtgagtttcaggccagctaggactacatagtcagaccctgtcttaaagcgggtgggtggcacatgcctgatacccactggcttgcctgttggagagcaaggtcccacagctggctttgaaagactgtaatactcaggaggtagacacaggagggccagggccagttcaaggctggtctgggctaataaattaccattcatcatagggacaatgtgctggagagtaccaggtgactgttgctagcaaaagattaattttggaaagccatttccagaatgttctttgaagacttggttgttccttcagaaaggactttagatctgaaccaggtatctctttggctctgacactcttaacaaagcaggtgacatggctccaaaccagggagtgggctgtaattgctatcctggtactggggttgcagagacgttcttaattcacaagatcagaacagtcacatgctcttgggctgggtttctccaaataccagctccaaatattctggaaataccaactggcccaggcaccctcagcgcccccttgccctggccacacccaggccccaggcgccttggtgagagaatgtcgacccctagtggaagaaagcagaactgaagtagcatccctaagtgactatggaggaagcctaaggggctgggaaatccctcatctcccctcttcccctccagtatcagctttgtgagaccccaagtcacactcttaactgctgctgctgggcagtagaatggctcaggggatggaggcagcagagtctttgtggctcccaaatcagagaatcaaaagaaaggactctcaaattgctgctatcaaacatgagcactgtgttctgagaaagtaggtggtggctgggcagtgaatgtggcagctgtaacctgggttttcaggagttccaggccagcctgggctacatagcagaaccctgtttctgcaaaaaaattaaaaggtagactaagcttggagggatagatgtctcctgactctgcccatcactcaaaaagaatcctcatttccctagtccctgcagtccttccctctggtgtccaaatatgggaagacaaccaaccagcgcccagtagcccctcggtgtcatataaggtacccattagactccatctggaacatactcgtccctgtccagttggtttttagtgacatcaactagggacaaactgcctttgtccttagaaccaggcaggcaggaaggatatttccagtcctgcagtgtcctgctggacagtgccccagaaagggacagcaccagtctgtgcggcctcacacacacacacacacacacacacacacacacacacacacacacacacctctccatgtgaggacctcaaggttagctgctctattttcagggtccaggttggtactggtgcatctataccaattttctctgctccattctcctggtcccggagagagaggaagcctgatgctaaaattctactgatttctggctcagaattaggtagactcaggatggttgtctttgccttggatctaaagcagaacatggacagaaagtacgcgcttgcagtccatgcaactttgtggacagaaccgtagacaattagaaattgcatgggtccccaagggccagccacctgctctgcagtgatggatggtcacctgcttccacagagaggcaccgtccttcccagactcctcctcaaagaacctgccgtagggctggaaactggtcccacctcccaggccccaggaacttcttctgtgtctcagcttgggtaaatagctaccgactagttgagttgctagataggttcaccagagcatcttaagagctgagtatttatttcaagaaaactacaggtatatgttgaggcaaatcagggtcatttctagcttgctcattttcccacagttaccaagcccctgaaataactccagacagaatttcaccttgggaagccccccacaggtagtaacttgttacatgtaaacagaggtggggcacagggactcgtgtagtctagaccggcctcctcgtttcatcaggtggccaaggttgacccttctgcctcctcctgtagtttctaactcaagccggttccaccagtcctggattaagtggtggggactgaatccatgcatatcagatagatggattctctatcaacagaggcatattcccagttctaaaggtgactttttgtttagtggactttttgtttgttttgagatgaagtctatagcccaggctagcctccagcccactatgtagctgatcttgaactcctgaccctcctccctctgccttgccaacgctggtctagagatcatcattgcttctggctttgggaaggttttaaccttggtttctattctgtgctcctaagcccttcagtatggcgggacatcaatggccacagtcaactctcccacacagaactgattaaacgtgggacccataacaggcttgaccactgagttacaccccaagtccctaactgaatgcttttaaagtgatacaaactctaattcttcttcccccagaaagcaaatatagatgggactggagttgggaagccaatatgtgggatgtgctggccactaacacatccctgctgggccctctgtgtggttggtgggttggtggggtaaagatacagttggtatttcaagtgttccaccagctcttgccagaagcttccacagggtctctggctgtgttcatcaccactgaaggcagacgccacagtgtcacagtacaagctaggggcaggagaggaacaagtatttattgtgacattctgaacacaaaccagactgcgtcacagtagtgcaatgagctaagggctctacaacagagacttcaaaagatggcagccaacagggcacgtcccagcagcagccggccatggacccacttgccacccaccacagtgggacactgaacacccaggcctttggggatgagctgctggtacccacttctgaagagacaggtggccactggagccctcttggtcccaggatccccccctcaccactccagacttagctttgaacaccctgccctggaagttcggttaggtttctccaggatctcagacatacataggacaatctctctaggctcagcaggtccaggacacagaccacatctcagaattggctcaagacaccaaggctagggggtggctaggggaccaggctcactccagaccgcacagaggatgaaggagcgtcagacagtgggccagtgcatgaggtatctgttttccctcccccagggtcttaggagcctcttcacagagcaaatgacagttggtctgccagtggtctcagcaggacaaggtggcaggtcctctaccctctaaagcaaagcttgccctttctctgtcccactacaatagtcaacagaacaaacacgggcagcaggggtctccatcatgatataggggctgctggcctacacaaagagccctgcatccattctgcccctgtgtgtagacatctacttctctgagtccccaaggggttgggccaagtatacagcagataatacccaaaaggttgcagctgctcctagccccccatcccaggggtcagcattacctaaggggcagcatggggctcctgggacaaaagctgggcccaagttagcaagagggcaaatttggggacacagcgatgacagagtcctccgagcgaatatatttcccagcacagcatctctcagggcggaccagccgctctcagcctctgtaccaggcacacagcagctcagctgcagggcagacacaccctctggggaatgtcgaacaccagccttcagggacagtgggcactcagcaggacacagccttcagagggatgcagcgctgtctggagagggagtagggccagccacagcaactcagcatggcccaagtcacagagcccgggtctcagcctcaatcttctgctctccgtgcaagctttctgggtctgggagctgggccacactctgccggatggcaatctcagggccgcccccatacagactgctcagataggtccaggtctcctccgaaatctggccacagtcagcccctgcggaataggagaggcacccaggcacccttacacagaggccgtaccgtgtaccaggccagggggacacctgccaggtagggaacctaccttgggatggggatggtgccttaggccctcccacaagctactgcacagagaaaagccagaacgacaggactctgcctgttgactcttgtttcccagggccagaggacaaagggtcaactaggctagcagtgggtagaagaggcagggtgtggtgcagggcctggaggacccgcacagaggccaagtgcctgaaatccccctacatggcctggacttggataaaagactttgagacagatggtaaagcttcctggaaggacgggaactctcgtggtgacctggtggtctaaagggggaaagggtggcagggctagtgggtcctgggagactcaccctgctttagctggatatggccactgcctttgacctgggcaatcctgctgttgtcgatgggcccgggaggctctggaatagacagcttagtgttacaggcaggactatccttcatcaaggtgcccacggggccagcctagcctcaggtcacagccatggctaacaaaggatacttggtgtaccaaagccttcctcttgactctaacccaacctctcaggactctggaaccagaaaaggggacacctaataaacctgagttcattttagaccagtgttttggcaatggccaccagtagtagctgcggtgcagtgagtgcacttttctgatctaccacctcatctagccctcagtggcgatgggaatgagaactgtttatataggacagaggtttgagcagatggagagcattgcccagctcagagctgatggaaggcaaggccagcagccaggccacagtcagaagcccagcacttttccaaagcacaaccacactgactgcttcagccagcagggcacagtgtgctggggaacagtggtccaacactctccagtcctgtttgctcatcctctaagatggaggcaaatgcctatcacatgacacttctgggctctgccaacctgccaggcccccaagagcctggctatgacagtgtcccagttccaggactgctactctttactggtgactttaaggaatcctgatagctcacttataaccaggccatcttcatttctgcaaatccaagtcctccagccatcctaaaggtctggaactatccaccccaaggaggcaatcaaaccccaagatcacagccttgcaggagggaagggcagctgcccaggggtcatcaggagtagacaggggatgcagggtaggaacagggctctaccacagtggctaagagagcagtgaagctagcctggaagaagccatgctctctgcatccctggatagagcactaacgccttgctaggcaggccctatcccagaaggcctgggcggctactcaccactgtccttccccttgacgaaggcctcccactctcggaaccagtgcatgctgatacagtagatgaccgcgggagactcctcagcttggaatgccttgttcagctgtgtggtaaggcaggaggcagtcagtcaatctgtcccctgttcctcatgacttcccaaagtcccaccccaggccctgagcctcataaacactggataccccagacagaaaaatcaaggactccttgacacactcaagaaaaaagaaaattcataaggctgcagcgatggctcagtggctgagagcacttgctgctcttgcagaggacatgggttcaattcccagcacctatatggtagctcacaaccatccatacctccaattccgacactcccctctgacttctgagggcaccaggcaacacatggtacacgtacatagatgtacaggcaaaatattcaaatacatgaaatcaatcttacagaaagagggcaattcccccactgacccaccaggtcatggcagataaggcctttagcatctcctaagccgactagctcacagagcagactctcctctcactgactggacggaacatctgctcacaaggttcgccattccaacagctccagtgcttgagctgggcacgaggccagggcagcacaggtgctaagccacacctatgggctggcactagcgcctctccaaggacaaaaggagacctctactattttaaatgcttgtggacccatcctatatcctgttgtaaccagtatgaggatgggtacggccccacccacagcaatccctgtcccagcagcctctttcctgacaggccagtgcgccattccccaggtagcgagtgagctcttcacactttccatgagtctcaggcaccttccacaagagagcctagcgatcctcagctaggagtgctccccagggacagcagtactcctgtgtcactcagcttgaaacactgacccaaggcacaagcagagcactctgcacttcactacagccaatgcctctgctagcctgactgcacacggtccccaggtccccggtgcccacatgcaccttgatgaaagtgtcaatctccaccctcctgcgcttggccagggcctcaatctccacctggcagatggagcacacatacagatggttcacagcagggccgcccccaaacctgctcgggaagggagagagagagccagcatcagcagggaggtcccctctgtgccctcagccgtcagctctatcatactcttgagcacaggggctggcaaaggtccccagtgtctgcttctcttcagggtgtctagagctctgcttcatcctaagcagcactggggcctcgtggcccgagtgcagggcactgaggctgcaggtagatggtgaggtcgccagccttgaggccttacaggtcaagggactgtttctcaccacccactggagctggcaggagctccttccaagggcagatcccacaaacccagcaccacaggaacctgggtctggactgggctacagggagagctgcctactcttggtgtcactacacttgaccctggaagtccccaggctagattagtcgtctctaagtgactagtcccagccccacaccagggagcctgtgcttggtgaggctcctggaggagcttaccaccaacctcagccttgaaggcaatactcaaagggctttccacagcacagccctcaggctgactgattctcactgtctccttccctgggactcggagaaggcggggctgctgctgggctggccagcttccacccactggctcccagtacttgcctgctgtacaggtgctccctgcccccagcacttgcctgctgtacaggtgctcccggcccccagcacttgcctgctgtacaggtgctcccagacgctctgcggcaggatgaccaccaggtcatcgatgtagtggtatttgttgggtgggatacctgtgaagagaagcatggggggagctggggcttggcccaccgcaccccc

SEQ ID NO: 696 - DNA, 2807 bp, Mus musculus
atacaagccatgccagaagcacatcatggaagatggcctgatgaaaggggagatgcttttggcggtgggttggacatgtaaaaagatggatcagtttgacaacttggaaaaacatacacagtggggaatcgatattcttgagaaatacatcaagtttgtcaaggagaggacggagattgagctcagctatgccaagcaactcaggaatctttcaaagaaataccaacctaagaagaactcgaaggaagaggaggagtacaagtacacggcttgcaaagcctttctttccaccctgaatgagatgaatgactacgccgggcagcacgaggtcatctctgagaacatgacgtcacagatcacggtggacctgatgcgctacgttcaggagctgaagcaggagaggaaatcgaacttccatgatggacggaaggctcagcagcacatagaaacgtgttggaagcaactggagtcaagtaagaggaggtttgagcgggactgtaaggaagccgaccgggcacagcagtacttcgagaaaatggacgctgacatcaacgtgaccaaggcggatgtggaaaaggcacgacaacaagctcagatacgccagcaaatggcagaggacagcaaagcagattactccttaatcctgcagagattcaaccaggagcaatgggaatactaccatacccacatccccaacatcttccagaaaatacaagagatggaggagaggcggattgtgcgtattggggagtccatgaagacgtacgcagaggtggaccggcaggtgatacccatcatcgggaagtgcctggacgggatagtgaaggcggccgagtctatcgaccagaaaaacgactcccagctggtcgtagaagcctataagtcaggattcgagcctcctggagacattgaattcgaagattacacacagccaatgaaacgcacagtgtcagacaacagcctttccagctccaaagaaggcaagcctgagctcagatttggcggcaagtccagaggcaagctctggccattcatcaagaaaaacaagtctcccaagcagccaaaggaacccctctcccaccgcttcaacgagttcatgacctccaaacccaaaatccactgcttccggagcctaaagcgtgggggtgtcacaccagaagacttcagcaacttcccacctgagcagagaaggaaaaaactacaacagaaagttgacgatctcaatagagagatacagaaggagacggaccagagagatgccatcaccaaaatgaaagatgtgtacctaaagaaccctcagatgggagacccagccagcctggaccagaagctcaccgaagtcacccagaacatagagaaactgcggctggaggctcagaagtttgaggcctggctggctgaggtagaaggcagactcccagctcggagtgagcaggcacgccggcagagtggactgtatgatggccagacacaccagacggtcactaactgtgcccaggaccgggagagcccagatggtagttacacagaggagcaaagccaggagagcgagcacaaggtcctggccccggatttcgacgatgaatttgatgatgaggagccgcttccagccatagggacctgcaaggccctctacacatttgaaggtcagaacgaaggcaccatttccgtagttgaaggagagacgctgagcgtgattgaagaggacaaaggcgatgggtggactcgcatccgcagaaatgaagacgaggagggttacgtccccacttcctacgtcgaagtctatttagacaaaaacgccaaaggttcctaaaggcgtggtgcacatggccagagtcccccgagagcctcccgggagggagccatcatcgtccagcccgcttgtccccacaggcctccagcaccactcaggctggctgggcagcctccagcccacctgcaggctgggtccccatatcctgcctccccttctccttcacagcatgttcctgtggctccgccagtccctctgcctgtgtacggcacgggtgtttctctcctgcagccccccacgggggctgtccactttactctgctcccttcccacccaggccaccaagacagctgggcatgtgccctgtgtccctgctccttccgggctcccagtccacctgctcatcgcctggccactccttgcacatctcacactgtgcctttgtcaactgtcacccctggtttcctggtgactaacaaaattctgacaaggagggccagttgtgcatcaggtggactgagcacccagctgtcatccatgcgtctcttgggactcatcgtcagatgtgtccttcatgtccagaggctgctgcctcaggccttccctgtcatccagcactgttaccttccacactccattccaggggatctagagtaggactggggcacccagcccccattcacccccactcttgttataaaccatctacatggccctaattcatattggagtcccaaatccagcttgtgggccagccccgctgtcttgtctgtgtctaccttctatgagcgctgcctacctgtttgtggtaccctgtgatggagggcctcacagccacactagttactgtaaggcgggcctgcggagtcccataagtagcatttgaggactctcctctgttcccaccaaagaccttgtgcctcttgtagtccctccaatggctctggccactgcttcttcatcggatcctgttctccagaagccccagagaatggatggagctcgcttttgaagctgttgccctcctagagtggtggagcttgggggagtaccg

SEQ ID NO: 697 - protein, 599 aa, Mus musculus
YKPCQKHIMEDGLMKGEMLLAVGWTCKKMDQFDNLEKHTQWGIDIKYIKFVKERTEIELSYAKQLRNLSKKYQPKKNSKEEEEYKYTACKAFLSTLNEMNDYAGQHEVISENMTSQITVDLMRYVQELKQERKSNFHDGRKAQQHIETCWKQLESSKRRFERDCKEADRAQQYFEKMDADINVTKADVEKARQQAQIRQQMAEDSKADYSLILQRFNQEQWEYYHTHIPNIFQKIQEMEERRIVRIGESMKTYAEVDRQVIPIIGKCLDGIVKAAESIDQKNDSQLVVEAYKSGFEPPGDIEFEDYTQPMKRTVSDNSLSSSKEGKPELRFGGKSRGKLWPFIKKNKSPKQPKEPLSHRFNEFMTSKPKIHCFRSLKRGGVTPEDFSNFPPEQRRKKLQQKVDDLNREIQKETDQRDAITKMKDVYLKNPQMGDPASLDQKLTEVTQNIEKLRLEAQKFEAWLAEVEGRLPARSEQARRQSGDGQTHQTVTNCAQDRESPDGSYTEEQSQESEHKVLAPDFDDEFDDEEPLPAIGTCKALYTFEGQNEGTISVVEGETLSVIEEDKGDGWTRIRRNEDEEGYVPTSYVEVYLDKNAKGS

SEQ ID NO: 698 - DNA, 178024 bp, Homo sapiens
  misc_feature (1)...(178024): n = A,T,C or G
aaagggtcttgctctgttcctcaggctggaatgcaatgagtaatcacggctcactgcagtctcaacctcctaggctcaagtgatcctccagcctcagcctccccagaagctgcaggcgtttgccaccacacctggttaatttttaattttttgtagagacaggtttggggagggggtccttagcacgttgactaggctggtctcgaactcctgggctcaaacaatcctcctgcataggcctcccagtgttgggattacaggcatgagccacagcacctggacaatttcccagatatagtaaactgctgaaccaccttagggtgcgtttcagccttagaggtcttttctctgctagttacaaagcaagatccagagtatcattctaggtttatcaaaaatctctcttccctagacaatggctggatagaggaagaaaaagcaggccctttgattagagacacaccttaatgctggctttacattctcagtcacgtgttttaagcaagatttgaaattccttctctagagtctcgctccagagagcgccctaaaccgaaatgggaaactgaggctaaggttccaagtaccttcaaaccgccggtacagtacaagggcacagaagagcggagaccgcggacaaggaaagccagcataaaagctggaggggagaaagaagaaaggcgatcgggctgccctgagtgaggaattcagggaagccagcagggatttaagagcagcctcccgagtccgtgggggcaacgccacagttcagccccttcccctccctcagctcgagtcttcccgccccgtgccggtcagcccgaagaccccagcgccgcccagacccgccttccccacagaccccgccacctgtcagtgaaaggccgcagccaggggcaaagaggtggtccagtggctcagaggtccccaatgggccaaagttgccctaaaacccgggggagtggcctcggcctccgccccccggcccggccttgccaagctttaccttgagtgccaggtgatggacgcggcccaggccaggctcggccagcaactgcagcaaacccagcattgggagcagccggaggcccgcggccagcctaggaccgcgggaggcgggggagccgacgggcgccagagcggccatgtttgttccagcatcaccagccgcttcctctcccgcccacgtccggggtgaaagggcgcagccgccggaagggcccggggagcggggctcggcggctagctccgctgaccctgtggtcgttttcctggagattgcgacctaggaagtcgtcgaggagcctgtgctgcccacctcggggcccttcgatcggccgctcctgtgcagactttcagttagagatgaagccaacctattggcggttgccataacaacggtggccgaaccagaccagcccgggccgcacctccgcctcgctgagctttggaagcgaccttgggctccggggacccctgatctcagggtcgggggataagctgtgtcagccgcacggtgtcgggccactgattgaactgatttcactgagcgttgactcggaggaaaatatctaaaaattcccggctcgccgtaggggtcctgtggttttctaggcgcttcacactcaaatacaagcgaaatggttgcaataatacgattgattgagcccttatgaggcaatttgttaggccttttgttgtatttaatttttggaacaatttgatgagctaggaggtacgtattatcattattcctactttacaggtaagcaaactgaggctctgagaaataagtcatttgctccaggttgagctgggaatcacacggaagctcttaactcctgtgttctgttgcctcatgctatttcatccaaccccaagtctgggtcttaacatttttctcttaattctgtatggaaactttctttgcttctttcagaaattataggaacttcttttttttgagacggagtctagctcttgtcacccaggctggagtgcaatggcacgatctcagctcactgcaacctccgccttctgggttcaagcgattctcctgcctcagcctctggagtaactagaattacaggcctgcgccaccacgcccggctaatttttgtatttttagtagacacggggtttctcccatgttggccaggctggtctcgaactcctgacctcaagttatcctcccgcctcggcctcccaaagtgctgggattacaggcgtgagtcactgcgcccaacctgctttggagtactttttatcttttaaagttaagtggcatctttgaaaatctctggttttaaatttgaatataatactgtactaaaaacgaaatgaggcctggcagggtggtgattcgcgcctgaatcccagcactttggaacgccgaggcgggcggatcacttgaaagtcagttgttcgggaccagcctgggcaacatggcaaaacctcgtctctactaaaaatacaaaaattagcggggcatcacggccgcgcgcctgtagtcccagctactggggaggctgaggcaggagaagcacttgaacctgggaggcagaggtttcagtaagccaagatcatgccactgcactccagcctgggtgacagagtgagactctgtctcaataaaaaaaaaatcaggtaagaatcttaatcccattttataatacaatagtgatgaaacattaaaatagttttaaataggagacttttgtcttagtttctggacaacagttttataagggcttaaaactgggttcatagcattccttgcttctctatacttgggtattatcatgtgacctacatagggtcataccagtgctgtctgtccaggggtttaagaggatatcttcttctttcacatatttgaaagctgtattgtgccagtcattattttggaattgagaggaataagaatgagggaaaactgactacaaagacattgttgagcattttctctacagttacttcttaaattctagaaaactgctgccttgacaattacatttagccatgtgatttcatagtttcaagaaaagattatttgcataatcatgatgctgtaactggaaacaaacaggctgagtaacagaacaagttatgcctgcttctcctggcaacattttcaaagggacgttacactttaaggtattgactgaaaaagcctgcaggggctggaaagactgatctcctaagcttggcttttagccttactctcttagtcaagtacattttatttttctattttctctccttttttttttgagacagagacactgttgcccaggactgagtgcagtggtgtgacatctgttcactgtagtctccacctcccaggttcaagggattctcatgcctcagcctccctagctgggaccacaggtgtgcgccagtatgctcagctaatttttgtatttttgctagagatggggtttcaccatgttggccaggctggtcttgaactcctggcctcaagtgatctgctcacctcggcttaccaaattgctggattacaggcgtaagccaccctgcctggactattttctctaacttttcaggatcagcttaaggttgctactagaatgtgtagtgttgaatctagtgctattattattaaataattatttgatatcggtttggacattttcagaactcttttaagtaattaatgtgttaatagtctccagtttaagaaagtataattgccatttgtttttcttatcaaaagacttgataggcctggctggtgtctcatgcctgtaatcccagcactttgggaggccaaggctggtggataacttgagcccaggagtttgccaccagcctgggcaacatggtgaaacaccttctctacaaaaaatacaaaaattaggccaggggcggtggctcaggcctgtaatctcagcactttgggaggctgaggtcagtggatcacctgaggccaggagtctgagaccagcctagctaacatggcaaaaccccatctctactaaaaatacaaaaattagccaggcatggtggcgcatgcctgtaatcccagctactcaggaggctgagacaggagaatcgcttgaacttgggaagcggaggttacagtgagcccagattgtaccattgcactccagcctgtgtgacagagcgagattctgtctcaaaaaaaaaaaaaattagcgagcatgattgcaccaattcactccagcctgtgcgacagagcaagactctgtctcaaaaacaaaaacaaaaaaacaaaaaaaaaacacaaaaattagcgggcatggtgacacgcacctgtagtcccagctactcaggaggcagagaggtggtaggattgcttgagcccaggagtcaacactggagtaagccatgacacttttatccagcttgggtgacagagcaagaccctgtcaaataaaaaaaaaaaaagagttgattgatattgcaaaccaaaagcctctgttaagacagtataggaaactagtggtcaaattggggcctagcaatacattcagaagtcaaatgctacttttcattctttggcttgaaacaccatttcttccaggattgcagctaaagttttcatgcatttcttggggtgtcgggaatgcctccaagtgcatctttttgtagaaagtgatcatggaaaagccaggctctgacacactttgagtcctgtggattggagagaaacttcaaaattactcctcaacctgacgaccctagtgtataacttgctcagccacaggacaggcagtctttcttgattttatgtacatctttacaggggaattggattattcgttgtaaaaattcattgcagttttagcatttcactcaccatggagttcctggttttatcctactccactttttccagttgattgctttcttgagtccctagtaagtagttcgaatgcaaaagaagttggaaattttaagctaaaaacaagtaattttgaagaagaaaaaatcctgagaatttcattagaagtagttcttcaccagtagacaaccaatcaactgtaagttcaggcaggcggtcctgctgcatcagaaatgtttaaaggcctgtattcccagctactggggaagatggtttgaatccaggaattcaaggctgcagtgagctatgatcatgccactgcactccagtctgggcaacagagcaagacctctctaaaaacaaaaacaaaacacaaaacacacacaaaaaaagaaaatgctgaaaggattgctttattttctacaataagtaaaaatcctccagaaaacaggaggaaaggaaagggaactgatacttgtgtgtatattatgtgctaaacattttatacatattctttcttttaatttttatttttatttttatttttttttgagacagagtcttactttgtttcccgggctggagtgcggtggtgcaatcacggctcactgcagcttccaactcccaggctcaagcgatcctactgcctcaagcccccaagtagctaagcacaaccgtgccgggctaatttttgtatttttttgtggagacggtttcgccatgttgcccaggctggtctaaatctcctgggctcaagcagtcctccaaccttcacctcccaaagtgctgggattataggcataagccacctttctttcaacctttacaataacctttgaagtagcattatttctattttattttttgatttttgagacagggtctcgctctcaggagtgcagtggcatgatcaaggctcactgcagcctcaatttaccaggctcaagcaatcgtcccacctcagcctcccgggtagctgggattacagttgtgcaccactgtgcttggcaaatttttttattttttgtggacaccaggtttttccatgttgctcaaactggtcttgaatgcctggtctcaagcgatctgcctggcttggcctcccaaagtgttgggattacaggcatgagccactgtgcatggccatatttacattttaaagaagaggaaactggccgggagtggtggctcatgcctgtaatcccagcactttgggaggccgaggcgggcggatcacgaggtcaggagatgagaccatcctggctaacacggtgaaaccccgtctctactaaaaatacaaaatactagccaggcatggtggcgggcgcctgtagtcccagctactcgggaggctgaggcaggagaatggcttgaacccaggaggcggagcttgcagtgagcggagatggcgccactgcactccagcctgggcgacagagccagactcttatctcaaaaaaaaaagaggaaactgggccgggcgcggtggctcacgcctgtaatcccagcactttgggaggacgaggcgggtggatcacgaggtcaggagatcgagaccatcctggctaacatggtgaaaccccgtctctactaaatgtacaaaaaattagccgggcgtgatggcgggcgcctgtagtcccagctacttgggaggctgaggcaggagaatgatgtgaaccctggagacggagcttgcagtgagctgagatcgcgccactgcactgcgacagagcgagactccgtctcaaaaaaaaaaaaaaggaaactgaggcttagagaaggaaagtaattcagccaaagctctctatagctgtctggacagaactatacaaatctggctaacaccaaagactgtactcaaccccagttccttcatttcagactaatgacaacctatgagatccctgtcttttttttttttttttttttttttttttgagatggagtcttgctctgtcgccaggctggagtgaagtggcgcgatcgcggctcactacaacctctgcctcctgggttcaagcgattctcctgcctcagccttctgagtagctgggattacaggcacaccaccacacctaatttttttgtatttttagtagacatgggtttttgccatgttgcccaggctggtcttgaactcatgggctcaagcgatccgcctgcctcggcctcctaaagtgctgggattacaggcgtgagccactgcgtctggccaagatccctgtcttctcaatgagtaaactgaagctcagataatgtaagtaacttgcagaaggccacacaactaataagtagtggaacactgggatcccaatttaacaatttcaaaaccctatctgctttaaaatctcatatctatctacagctatataaatatctgtccacctaagatcccgaattagatgtttattagttgcaagcagggttagaattgccaaaaagccctaatacaattgtttgcctctaaccacacagccatctatacaggctctctgttctgtttgaccggataccttatttcgttgctaatactgtccatgtgatcagattattcagtggaacatgtttgagtcccccactgagagtaggaaaaaaaaaaacataaacttacagggttttttgtttttctttttgttttcgagatggagtctcgctctgttgcccaggctagagtgcagtggtgcgatcttggatcaccacaacctccacctcccaggttcacgcgattctcctgccatagcctcccgagtagctgggactacaggcgtgcgccaccatgcccagctaatttttgtatttttagtagagacagagtttcactatgtcggccaggctggtcttgaactcctgacctcatgatccatcctcctcggcctcccaaagtgctgggattacaggtgtgaaccactgcgcccagctgttttgttttttacttaataattcacataggggacttttgtgaccaaacgtgttgggatttcttcccaccaccaaccaagtaattaattttgtagtggacatcagctgagtgtcctttaatttagtgttcttttaatttttatttttttttagagactgggtcttgctgtcaccctggccatagtctaatggtgcaatcacggcccactgcagcctcgcacttcacctgcctcagccaccatatacctggagatagtgtcagatatcacaaattgagggcttggtcctcaagactgccccccaccccaagtaggtgtcaatcttaagttttaggttatgtgatctgtcttttttgacgaactgtttataaatcagaaatctcaagtcctcctttttgggtttaatttgttacagtgcctcacagaacctagggaaacatgtttattataaaggatatagatgaagagatatatggagtacgggggaaggagagtggaacttctgtgccctctctgggcatgccaccctctaggaactttttttttttttttttttttgagataaagtctcactctgttgccggagtacagtggctggagtgtagtggcgcgatcttagctcaccgcaccctccgcctcctgggttcaagcgattctcttgcctcagtctcccaagcagctgggattacaggcacccatgaccacactgggctaattttttttttggtgttttttttttttttttttttttttgtatttttagtagagacagggctttcactatgttggctaggctggtctcaaactcctgacctcggatgatctgcctgcctctgcctcccaaagtgctgggattacaggcgtgagccaccacgtccggccaactctctagggacttttatgtgtttagctatctggaagttctcagaactttgttttttggagttttaatagaggctttattttatgtagtcatgattgattaagctattgaccattactgaacaacttaactttcagcgcctctccccagtccccggaggttggagtgacagtgtgggtgcagataaaagtcccacacctctaatcttgtcttggtctttatggtgaccagtcccatcttgaggtactaatacttagggactgtcagccatcagtcatctcattagtatataaaaagacatcattttggggtttttaaggattttaggagctatacttcaggaaacaaggttgacgacaaaatatatattttgtaatatcacaccaagatcataattttgtaaatcagtgttccctagattttactgagaggtgaaaccagtatctgcaacccagattaaccccctagataatatcagcgtttacatagagtttagagtacccctggtgaaaactgattcctaagtaggtcaggtcacagtagtttgttaatggggatacttccttgtcttagaatcacttcctcctgctctgaagggaaactgaaatggatttagttcttcctaaaaaatgctgtgctatattttagccttttttctgctggcttatttcattttatctcatggcttcatgatcattggtgtctctctcctttattttttgaagattctgacactttcaagcattttccagttactgccaaagcttaatgaagttaaagatatttgcagtgttgtataattaactcacatccatagagttctgcggcagcttttaatgggttccttcctataactaacaatctcctgcttactcgtcttaaaaagtttcatcttcatgtggtctctttttttcttctgctgtcccttcctcttcctctttctcctctttaaagcagcaggttgttttacttcttgattagagtattttcacaagtggtcactgtttttgagaagtctccaataacttggtcaagattagatcattgtatttgactaaaaagtcaagccctggcaggaaggtgattactgaggcaatgtcttgttagataaacctgcattgcatgtaccgtttccaaattttagcagactaaactgtgcagcattgtttgaatttccccctccaactcactctggctattaatctgccttaggagataggtagctggccgttctcattgttatatatctagcagtctctggaggaaagagaattcagacctggtaactgagagcaaaatatttatacagacacaagaatgggggtgggcaggaagggagggttgtaactgaaaaaaggcagaccaaaacagttttgacaacttaaatttattgtaactgcccaacaaaggaagtagagttggaggtttatctgcaagaggtttttttttgttttgttttttgtttagtagctccacctcttaatttattattattattcattttattttattttttgagacagtctcgctctgtcacccaggctggagtgcagtggcacaatcttggctcactccaacttctgcctcccgggttcaagcgattctcttgcctcagcctcctgagtagctgggattacaggcgccctgtcaccacgcccagctaacttttgtgtttttagtagagacggggtttctccatgttggccaggctgctctcaaactcctgacctcagatgatccactcacttctgcctcccaaagtgttgggattacaggcgtgagccaccacgcccggctttaattcattattgttaatatttttgagacagggtcttgctctgttgctcaagctggagggcaatggcaccatcatggctcactgcaacttcaaccttctaggctcaagcgatcctcctgtctcagtctcccaagtagctgggaccacaggtgcatgccaccatgcccagctaacttttttttttttctttttgtagagacagggtcttgcgatgttgcccaggctggtctcaaattcctggcctccagccatcctcccacctgggcctcctgatgtgctgggattacaggcgtgagccaccagacccgggttagctccaccttttaatggaggagaatgataagcaggttgaaaatggtggggtgggattggagaaatgcatcatcgtaaaatattttttaactgggggcccatgttgggagtcgcacggtttctcagaaaaggatccagtagtagcattaaccgagggagaaagataagctgtggggaaagggctagtgattcaggagttggaattccaaacattttccatagcttgtcaggaacatttgtgcagacctttggatatatagagagggagtccgtctgctgataaaatgagcgctgggtttaccaaccttcggccttggcccacccctgatcctcaccgccgggcagtgagatggacacgttatttgcctccatttggtggactgcgctctgcgcttccagaggtggagcaattgtccgcctccgcccggccagcacgtgcgggaggctggatttgaaccaaacaagttatctgtgtaccccacgcctttgcttttacccactaggcggtaacgtgatttcacgcctgagagtttcttggctgaacaagttggaaatcactggtttcagagattggaaatcactgggtgcacgcccctggattctttccctagccactcgaggccgtcgcgcttgcctcgacgtctctattcgcacagcgcgcagttaccaccgccccactcccaccgcgccagcctgcgggactctcgggcttccctcgggcggtgggaaaagagcctcccgggctgactctgctcggcgcgcatggctgccaggggaaagtattgtccttaaatccagagcggcgatacgcgcaggggagcgatctcagaccgcggcggagcatcggtgatcccagggcctgccgcgttccaaggcaagcgctagtactgcgagcagacagtggtcactaagaagtcattaccagattggcagggggagtcctagggatccgggtcccgccgtccctcacacctccctccgcgtccttccggaccccagggcgacgcggacccggccgggggagcccgggggagggggccgggccggggtggggcgggcgcgcgtgcgcgagctgtcagaccggccccgcccctcccctcccgcccctcccccgctctccgggtgtagggcgggcgggcgctgcggcggccgcggctgctgcttcctcgggccattttgctgtggagcggcggggaggaggagccgccgaggagaccccgggcgaggagctgcgagccggaggaggccgcgcggactccgggctttccgccgtcgcggggatctcggggggcaaagggatcgccggggagggggaccagagagccgcgcccgccgcgcggagcgccccttcgcgtcccctgcaccatgagctggggcaccgagctctgggtgagtgaggggctgggcccgcgggcagatgcggggcgcgcgctgcgtttccccgcggcctggggagggggcgcgggccgcgctgctgggcggaggcgagggcgcgctggtcggggtcctcgcggcctggggaggaggcggggttccaatgcccctcgtccgccttggcccgagcaggaggtgcgggccggcttgtccttcggaggcgaggggagttggtgcgggtccccggcggcctgaggaacggcgcgggcgggcctccctgtccccggcgccccggagcgggccgtgtgtgtcgggccgagccctaatcccccggggcgagccgcggatgcccggggagggccgggaccgggcgtgggggcgtggaggccccggctgcgcggcgctgcgttgggtctcggggcgccccggccgcgagttctgtcctggctccgcggaggcgctggcggatcgggcacttccccgggagcggggcggccggggcgagcgccgggggtcgggttttggggtgctggggcgagagtgcggtcttcgctctggaggcgaggacttctggcccgtggcggctccgggcgcacttgttctttcggggtagctcaatcctgagtgggatgtgggcactgcgacgtctggtctggaggggaaagtgggagttagggagagatcttacgtgatctacctcaggaagaggcgttcgcggggtcaatgatctttaacggttgctcggagaagagtttccagtggggaaagttggcggtgaggggcgccttgcggggatgcttggccgggggatgcgcacggtaaacgggcagccctcagggctgagggccgtccccggaaaggcgaggggctggctgtggatggagctcttttcctgccgtccccggattcctggggaaatcactgggcaggggatgggcagtgcggcggcccgggaaggagcagacgaaatctcagttactgcactgaaatgccctcaagatgagccatttcccaggatgaactctaaagtgcctgaactaccttttggaattctatttgcaaagggtgtggaggagaaagtgtagggtggtgttgctatctgagatgaggccaagaaatctcatatcaaaataaaacaaggttagagcaattacagaaacagagcacatcctcccttgttttttgttttgttttcttttgctttaattgtttttacataaccatttgttaggtacagaagcagctacggttgttattaccaaaatcctgagggcaatagctcccttaaattaagataattcattttataaacatcttctgcctaaaagggattcatgacaaaatttccgctgatgtttacaagtatccattttgaaaataaaatagtttaaaatatttgcacacaccagtttaggcaaaatctatcactttgagtaccgtattgaagtttctttcctcttctaatccttccactccctttagctctctttagcttatctggggtggggaagcaaatcagaagtaatctttgtcaagacagtagaaattgtggcacaatttttttttcacttgttcagacaggtggatggaattatggagggaaaatgtacaatatatttctgagtgaaatagggaccgaacacaataccttggtggacagttcagtgatgttggtgaatgggatagaatataattccaaagagaggcagtggctatgagcaaaactgctaaaacagcggcaattgcttgcattattctgtacatttctttttgagggtgcagaagtgggaaggaaggcagggttaggagtgattgaaaataaatgagagaggccgggcgcagtggctcaggcctatattgccagcaccttgggaggctgagtcgggaggatcttttgggcccaggagttcaagaacagcttggggaatatctggagaggcctcctcttaaaaaaaaaaaaaagaaaagaaaaaagaaaaaagaaaaaaataataaatgggaactggaatatatacaaatattaatgatatgaaatcttatatttgcttcacaataatttgggttgttagtagatgggagatagtgagacagagttggccattattgaagccaaatgctgagtacagaagtattcattacactattctttctagtatatatatttgacattttctacaataaaaataattggaaaatagttttaaaggagaaggatgtgaactatttgtaattttttcacttgacaattttatgaggaagaatgaatcagttaacagttctatatatgcaagtgtatggcaatgaggagtttttaaaaagacattctttttttttttttttctgagacggagtcttgctctgttgcctgcccaggctggcgtgcagtggcgtgatctcggctcactgcagcctctgcctcccaggttcaaacgattctcctgcctcagcctcccaagtagctgggactacacgcgcctgccaccatgcccagctaatttttttgtgtatttagtagagacggggtttcgccgtgttggccaggctggtctcaaactcctgatgtcaggtaatccgcctgcctcagcctcccaaagtgctgggatcgcaggcgtgagccaccacgcttgacgttaaaaaagacattcttatgagtaccagcatttgcctttgagtagcttacagtttaatataggaaaaggaatgaacacatgattgtgctactaagagaaatgcaaaatctaagttttcaggtgaaatgcaaagatgtataaggcttagtagcttttgagatttaaaaaaactagaataatgaaggattatgaaaagtaaaccccagtttctccggtggtcagagacttggtgatgtgcggtacattgggtagcccagcggagggcagtgattaagggttttccttgaatggtggctttggaatcatgcacatgtataatgagataatgatggggcgctcaagccaaacttggcagaattattcttctagatggagaaagagctatggtttgggtggccatgaattatttgtaacaggtggttgcagctttcagggaccttcacaaatactatcagattttacatacattttaggacttcaggttaaaatcaatataggcttttagaaactacaggtttctaatgtgcattttacactgaagacctgctcctaagccacatcctgctttgtagagggagtaaaacctttctcttcctctttcttttttactttttctttaacccctccatagaaataaactttcttttttttttttttttgagacaaagcttcgctcttgttgcccaggctggagtgcactgtcacgatcttggctcactgcaactttcacttcccaggttctagtgattctcttgccttagcctcctgagtagctgggactacaggtgtgcattatcacacctggctaattttttctatttttagtagagatggggtttcaccatgttggccaggctggtctcgaactcctgacctcaagtgatctgcccgcctcggcctcccaaagtgctgggattacaggcgcgagctacctcgcccaggcttacatggccattttgaagtgattgggttctaataaaatagtttacaactcttcataacatagctcttcataacattgccttttaatcaattttcaaaatttttattgaacaactatggtgtgcacaagacaccagtctgaatctgttgtaagttacattatatacattgaaagatatctacgtggaagcatagaaagtaggttttacctctagcttgtaacatcagagtcaaaagaaaaatgtttgtatgtaaaattaaccaaaatacatttactcaagacttgttaaaaaggcagtgttagtaaggtaaatatgttcactgacttgttgaagttgtggctggttgttggagaaatggcaaagcaagagttgcttacatttgaatgttttttttttcttgcctacttactgagggaagtgacaggttactgaagtgttagttcagctttttattagcttgcttattagtgtgaagtatgaataaatccattggaaaattaagccttcctcgtaattattctctttgcagctaacaaattattcagtgacagaacctggttttgctgcctcctagtatcctctctgtctttatttatttgctctggtgctaatgagaaatgaagtatgtacaagaaagagaacagagaaacctgaataatgcatattggttagcatagtaagaagccacatgtgggctgggcgcggtgggtggctgacgcctgtaatcccagaactttgggaggccaaggcgggcagatcacgacatcaggagtttgagaccagccggaccaagatggtgaaaccccatctctactaaaaatacaaaaattagccgggcgtggtggtccacgcaggtaatcccagctactcgggaggctgaggcggagaatcgcttgaacccgggaggcggaggttgcagtgagccgagatggcgccattgcactccgccctgggcgacagagcgactctgtctcacaaaaaaaaaaaaaaaagagccacctgtgttgattgtatgtcttttttttttttttttgagacggagtctcactctgtcgcccaggctggagtgcagtgggtcgcacgatctctgctcactgcaagctccgcctcccgggttgacgccattctccagcctcagcctccggagtagctgggactacaggcgcccgccaccacgcccggctaatttttttgtatttttagtagagacagggtttcactgtgttagccaggatggtctcgatctcctgacctcgtcatctgcccacgtcggcctcccaaagtgctgggattacaggcgtgagccaccgcgcccggccgactgtatgtaattttttttacctgtgatttttagaaccatgccaggcatataatatacattcaactgttgaatatgttgaccctgatcgtggtgtgcactttcaagaggcagccgtttgaggattgtctaccaactgtactgggaacaatgcctgactctgtgtaggagttcaataaatatttattggataaatgaataaatccctttttttccttttgttttaacatttgctttttaaaaataatgggaagataattataacacctttctgcacttcggcagttgtaaaatatatatatgattttaggtatctttttggaaaatagactattttttagagcagtttcggttcatagcaaaattgagaaggtacagagattttccatatcctttctgcccccaaatacacacagtctaagtaccttttttgcctttaaagtagggtttgaaaaattatcccttctctgttgttcattctacttaggcatgatatgtgtacatatgtttatataagaacactttatagtgtgttgaatttttttccctagtgtgtcgaaattttaaactagttttttaatcttaaagtaacaaattattaacagttccaggtattggataattattacctcttcttactgcccttgaatgctaaattggagaaccctattaacaatcgtccctagctcttctactgctcttttttcttttttctttttcgagatggagttttgctcagtcacccaggctggcgtgcagtggcgcgatctcagctcactgcaacttctgcctcccaggttcaagtgattctcatgcctcagcctcctgagtagctgcaggcccccaccaccatgccctgccaatttttgtatttttcatactagagatggggtttcaccacgttgaccaggctggtctcaaactcctgacctcaagtgatctgcccgcctctgccttccaaagtgctgggattacaggtgtgagccaccatgcctggcctctactgctcctttttctttttttttttttgagatggagtctcgctgggttgcccaggctggagtgcagtggcgtgatttcggctcactgcaagctcggcctcccaggttcacaccattctcccgcctcagcctcccgagtagctgggactacaggcgcctgccaccgcgcccggctaattttttgtatttttagtagagatggggtttcaccttgttagccaggatggtctcgatctcctgaccttgtgatccgcctgcctcggcctcccaaagtgttgggattacaggcgtgagccactgcgcccggcctactgctcctttttcttaacccttcagagatttctgtttgggatgaacatggcaagaccaacaggggagataatactccctgaaccatggtgggtagggcagaactgcttcagaagagaaacaaaatcaacttagttttgccatccttacttctccatgagaacaaattttgcacatgtcttttctgtttagtggatattaaaagaaaacaaaccgtgggaggcctggagattttgcagttgatatttagatatcagttttgttgccctcactttgtacattagacagaatcctgaaaatttgtgtaaattgccattttggtaggcaaaactgtactttaagcacataaaagagttttataagtgtctatacttactatgtgaacacattacaactcatgctttacattggtgagacatggaaagtgcttctttgaaggactattcaagtatcacccactaagcagctaaagctaatattatgtttcctgcaagtattactcatacttgtttcatcaacaccacccacatttaaaaataaggctttattttgacacttaaaaattgaaagctactaagaatacatgaatgccctgggaaattaatctaattagattttagaatgtgggtgtgaagtcttctggaattagtgtttataaaggaatatttgtttcctgttttacttgtacactcatactagcttgagcctagtaatgtgtttagttaaaaaaacttttttttttaatgatgaggccaaatatgtgtattatattagagagtaatttgggggtatgtaagtttttgtttgtttgttttttgagatggagtttcgctcttgtcgcccaggctggagtgcaatggcacgatctcagctcactgcaacctccacctcccgggttcaagcgattctcctgcctcagcctcccgagtagctgggattacaggcgtgtgccaccacgcctggctaattttgtgtttttagtagaaatgggatttcaccatgttggccaggctggtctcaaactcctgacctcaggtgatccacccgccttggcctcccaaagtgctgggattacaggcatgagccaccgtgcctgacctctctattatcttaaagtctcgaatgattgttatcattactgccatttattgagtgcctactatgccccaggtgctggacaaagtgtttacatccatcatcttgtttatttgttacaagaatccagcaaggtaactaccatttgtgccaatatcctggaagaagaggcttagatggagtcattagtacagttttactggggagtaacacctgtgaaggggaaagagtggaagccatcagatcacgatgcagacctgacagagtccccaccaggccaatggggagctccagagcagacacaagaatcctctggcagaaatggctcggcctctgtatctctgccttcctttatcattggccagaggtcgtcccaagaagaggatggccttggctgccagcttgcttagtcattggctgggggtgctacaagaagagatgccctcgactcaaaagatgaggtggaccctaaaggaggctgcatgctagccacagtccttgcagctgggcagcgagtcattttttgccacttctccatgttgcccaggctggggtgcagtggcacgatctcgactcactgcaacctctgcctcttaggttcaagtgattctcctgcctcagcctcccaagtagctgggattacaggcacatgtcaccacactctgctaatttttgtattttttttgtagagacggggtctttctatgctgcccaggctggccttgaactcctgggctcaagtgatccttccaccttggcctcccaaagagctgggattacaggcattagccacttggccaaaaactggatcttctgtgttagtagtgcacagttccctttatccccaccactcactcatatttccccatcactgcagtagattttgctttataaaacagttgatgttattcatattgagaatcactgagaatcaatgactcacaccactaaatgctgcagagccagcagaaacagtcatgaatgaagctcgtactcaagcagatgcttcatagatgtctagtaatctcctaatcctttcaaagccagttattgtttctcttttctaatttaaataaatttgtgtggatattaattagtaggagtagtatcaagtttctgaatttgcccaacagaagtatgtcttggcgaaaactatttttaaggaaattgagaaagaacaaggaggaatacagagtctcactctgttgaccaggctggagtgcagtggcacaaacatggctcgctgcagcctcaatctcctgggcccaaatgagcctttcgcctcagcctcctgattagctgggaccacaggtgtacactaccacgcctgaccaacttgttttttttttttttttgagatggagtcttgctctgtcgcccaggctggagtgcagtggtatgatctcagctcactgcaatctccgcctcccgagttcaagcgatcctcctgcttcaacctcccgagtagctgggagtacaggcgtttgcccggctaattttttgtatttttagtagagacggggtttcacagtgttagccaggatggtctcgatctcctgacctcgtgatctacctgccttggcctcccaaagtgctgggattacaggtgtgagccaccgcagctggcctgtctaacttttttttttttttttgagacagagtcttgttctgtcacccaggctggagtgcggtggcgcaatctctgctcactgcaagctctgcctcccaggttcatgccattctcctgcctcagcctcccgagtagctgggactacaggcacccgccaccatgactggctaatttttttttttttttttttttgtatttttagtagaggcggggttaccatgttagtcactgtgttagccaggctggtctcactctcctgacctcgtgatccgcccgcctcggcctcccaaaattctgtgattacaggcgtgagccaccgtgcccagccctgcctggctaacttttttaaaaaagttttttttgtagaggtgggggggtcttcctgtgttgcccaggctggacttgaacttttgacctcaagtgatcaccggcctcggcctcccaaagtgctgggattacaggcgtgagccaccatgcctggccgacattcagggttttaaagttttgagtcttcaggaacaagaaacgaaacactttctctattatctatagcagaagaaaacttgggacctgtaaaggaatctcctccccttgtacttctatttgcacagccaaaattgagaacgggttcctgaaatccatttaaagaccagacaggctctggggacaaacggtgtgggtgctcccagttgagtgaggcagtgctggagggctcagcctgggttgccttgcttacctaatctaatatttattagtatcgggcaagtccttgcatctctgttcctcgctttcccaatctataaagtatggtatgatgcttgcctttctcttgacaagaaggcataaaggtgagagattgttcgtaaagtactttgaggttgttggatgaaaggtgataggtaaacacaaattattataatcatggggaaggttaatgaaaaaaactctggtccctgggaacaaactgtagaactctcctgcggtaagcaggattcatgaaaaatgagctattttctgtcctagccttctgatttaaaatttggtgtacatgttaacaatacaataaacctaatatttggaaaatgcctggaaatcgttgctttggacaggaaatctggatttcaggaggtcatattaatagcatgtttatcttttcctccttgaagaaaaataaaatccactccaaaacactaatcatactaatttttagcagtatacttgggccttcttaagatttaagttttttctagggggaaataattttctttggctattattaccactttaaaaaaaaaaaagttccactgaagtcacattatttcctcacctaaaaagctggatatttgctgcttgaaacatctaatgaattattctgcctatcagcttagtttgggattgatttcttcttggcagagataatgaagaggtttagaagtatttgcattggaacagatatggaaatttctggaaatgtttgggcaaggacatttagatttcataagtgtatatgtgtatgtaaaatatattcttcaccatgactgacttttaaaatttacattttacttattggccaggcacggtggctcatacctgtaatcccagcatttggggaggccaaggcgagaggatagcttgaactcaggcgttcaagaccagcctgggtaacatactgagatcccatctctactaaaaattaaaaaattacctgggcatagtggtgcatgcctgtagtcccagctacttgggaagctgagatgggaggatcacttcagaccaggagttggaggctggctgcagtgagctgtatttgtgccattgcactccagcctgggtgacagagcaagaccttgtctgggaaaaaaaaaaaaaaagtttattttaacttatccttaaaaataggctatttacattgttcagtttcaaaagtaaggtgtacgtgtgaagtctccctgtcattctaggagaggtttagttcttgttacggccatttttggcaagaggagtagtggtggtagtgctcagtgtttataactttgtacataaaaggaaaccaaacaaaattgtaaaaatttcatcaggtcaggcgcagtggctcactcctgtaataccagcactttggaaggccgagtcgggcagatcatgaggtcaggagtttgagaccagcctgaccaacatggtgaaatcccatctctattaaaaatacaaaaaacttagccaggcatgatggcgctcgcctgtaatcccagctactcgggaggctgaggcaggagaatcgcttgaatctaggaggtggatgttgcagtgaactgagattgtgccactgcactccagcctgggcaacagagcgagactccctgtcaaaaaaaagaaagaaagaaagaaagaaattattgtgtaataaggactaaggtagggtaactccatggaaatgtgtacaggagtgtaactcaggtggggaaatggcatccaagtggagtcctgaaggactagtaagttttacaggtgaagtggggtgttcagaagggtggaggggatctggacagagccttccgggaaaagaaggaggaaatggtatgtccaaagggtcatggagggcacagagctctcaaatgatgagcaggtgatggagttgtaataggagcctgaagaggcagactatagctaaaaaccatgtgaggactatgacctcaccttgagagcatgggaaatacccttgaactgctgaaagcaggtacctatggtgccagttttcagtgtggagaaggatggagaggagctcggtagcttcaggccacgctgggccgattggctgactggattactggagtgggtttcagtagagagcctttctatctattgcatttctcaacctgtttatatgtgggtggaataaggctaaaatggattgctggggagccttggacattcaagggaaggcctagtagtgaacaaagaaggcctaggagccaccctctgcctcctcccacttcaagatgttcaagggggaggcatgttccctgctctggcttgtggggtaaatcaaatataggccacaggtccttttttccaccagctgggtgcaaaacctaaacctaccagcactttattcttgtcctctctgtctctgctcagatgatacaaccttgttagggttatcagggtttgttccccagctcttttaagctagcaaatttcttattttcaatatgcctggaggtgactcacactaacctaattcccaagcctgttgaataaaccagaatgaattttaaacttatagtgagaagtatattcataagcagactgaatattcatgttggctgatccgtacgttctcgccctgtaggctaatctgggtggaaagctaaattctttatagcatttcttggagagcataaaatgaaaataggattggatgagtgtaatggctgatgacaatgggagccctaggcttctgcctcctctggaggacagtctacgttacagttagaatagagtctgttttatagatgctgtgtaggtgattcctttcctgttaacccattctttctttaggcagactatagcacagttagttatgtttagattttttttttttttttggagacggagtcttgctctgtcacccaggctggagtgcaatggtgcaatctcggctcactgcaacctccggctcccagtttcaagagattctcctgcctcagcctcctgagtagctgggattacaggtgtgccccaccacgcccagctaatttttgtatttttagtagaggtggggtttcaccatgttagccaggctggtcttgaacccctgacctcaagtgatccacccaccttggcctcccaaagtgctgggattacaggcatgagccagtgtgcctggccctgtttaggtctttttaattccaatctctattcaatctttcatgcctgcgattatattcaggtacccagattgaatgctggatatttattatctcatcactttctagcattccccaaattggcaagtctgagaaatctgtagtttttttatgtgtaagaatctgtaatttttgtttgtttgtactccatcacccaggctggagtacagtggctcaatcaaggctcactgcaaccttgacctcccgggctcaagcaatcctcctacctcaacttcccaagtagctgggactacaggccggcaacaccacaccaggctgatttttgcattttttgtagagatggtgtctcgctatgtcacccaggctggtcttgaactcctgagtccaagcgatccccctgccttggcctccgaaagtgctgggattacaggtgtgagccgctgcacttggccgtttataagaatctgtcattttaaaagctcttctaggtagttttgatgtggcttaggtagcactgtttaacattttgattccttctcatgcattctcagtttttgctcatttttattctttatagcaaatctaaaatctagcaatattctacttccttacccagtcagctactgacaaacattatcatcattttaaggtactctttgttctctatggttttctagtaatgacttattcaggtacccagataagtcatcattcattaattcatttgaaaaagattatagggctgagcatgctggctcatgcctctaattttagcactttgggaggccaagatgggcggatcggttgagcccaggagtttgacaccagcctgagcaacatggtgaaactccatctctacaaaaaattagccagaggtggctgagttgggaggatcgcttgagctcaggaagttgaggctacagtgagtagtgactgcaccactgcactccaggctgggcgacagagcaagaccctgtttcagaaaaaaaaaagaaaagagaaagaacaatattttaaactacttatgtgccaagcattgttctaggcaaagggaaaatggcagttaaccaaatagtaaaaaatgttttgcttatatgtaatctgtatttacagtgtgtcagataatgataaatgctatggacaaaaacaagggaatgagacggagaacagtaggattgagcttgatggggagaagaagtgtagtgctggacattttacaagatgcctgttatataactaattatctaatattgcgtcgatagcctagtatatgcatctggagcccagggaagagatccagcctggagatataaatttggataaccagaaagctagaattaagttggtaaaatgctaagctcttggcagagttgcattcctccaagcactttatttaactttggaactctgttacctagcatagctgtcataacgtgttgcccttttggacagtaactctgcactctgtttgccaaagtgtttacctcactgagaaccattgtgtgaaccgtgttttagactgggaggggtatagactgttaagagtttattggtttgcaaattgttataacaacataataagtggagctggaggttctgataggcttagaagtagaactaatgtaccaagtcataagtggaaaaaaaaaaatgtccactgatgggcattcaatttttggtagtaatcagaagttaatatcacacatcattctaataggcttttgaagacagactaatagtgtaggcttttcctttgaaagctgcccatgtgcttattttgacatggagataaaaagagaaagtttagaattactcagttcacaccttgttgactgagatttctgttgtacctgatatcgtttaactttcctctttatctttcttagagatacttcacatgtgggacagattatattttggaaagatgtccacaacaatattgcccatcccacattgctcatcttacaatgtgatctcaagactcctcccactgagtgggtgagaagggacttataccactttcatttgaatctaggcagatctgtgtgacagccttgaccaatagagtatggttaaagtgatgcccccaggcatggtggcccatacctggaatcctggtttttccgggaggcccaggtgggggtagaggtgagggggatgattgtttgaacacacgagtttgagactaccctgagcaacacaatgagaccctatttttttttttaatgatttctgaagcagaatcacaaatagccgtgcgtttttttcttgcgcttttaggatacttacttttaaaacccagtcaccatattgttaggaagcccaaacagcacacatagagagacatacggagaagccaaccatagaggttcctgttgacagctcagtcgaggtctcaaccaacagtcatacttagctgccagccatatgagtgaagggcttccagatgattctaacgcccagcagttgggtccccccagcctgtaagccttcccagctgaggcctcagcaatgatggagcagagaaaagttgtccctgtccaaattcctgacccatgataaaatggttgtttcccatcaagttttgggagtgatttattatacaacaatagtaactggaacaatatccttagaagttgtaatagatagtattaacactaccccttcttcatttattcaaggacaaagctaccatgtatccttttattctagtttaaagataaaatgaaatcattgtctctttgaaaaaatgcttagaatatgaaatttaaaagttgaggaacattcaaagagttttatacttttttatctgaaaatgagaaaatagcaaaccaaaaagctctgatgtgaagacattaagacttcatgatggcttaatgtcttcataatgcaaactccataaacagttttttctaaggttcttgtcacatgatcatacactttgaatatggtgattctgtcatttttcataaaatctcagggtttttacattattgtcataaccacataaccactgagtcacaaaaggggacatttcattgcaatttcctttagtaagatatggttttgccatttcccccccaaatttcatttcctcttccttgaaatatgagccatgccaatctacttcagaagtgttgttttgaggaatataaaacaaaagacaaaacttttttttttttttttttgagacagggtctggctctgttgcccaggctggagtgcagtggtgcagtcttggctcactctaacctccacctcctgggctcaagctatctttccacctcagcctcacaagtagctgggactaacaggtgtgagcaccatgcccatctaatttttgtgttttgttttttgttttttggtagagacagggttttgccatgttacccaggttggtctcaaactcctgggctcaagtgatccacccgccttggcctcccaaagtgctaagattagaagcgtgagccactgcacctgacccacaactttctatagctttagttgtgaaatagaattactgttctggaggcagtaaatcagccagactaaagttaggcatctcagatctagttctgtctctgctgcttattcattgtgttcactcctcaaatcttgaaagaatatttattttaagatcttttttttgtttgtttttttgagatagagtctcgctgtgttgcccacgctggagtgcagtagtatgatctctgctcactgcaacctccgcctcccaggttcaagcgattctcctgcctcagcctcccaggtagctgggactataggcgcatgccaccctgcctggctaattttggtatttttagtagaaacggggttttgccacattggccaggctggtctcgtactcctgacctcagatgatcacccacctcagcctcccaaagttctgggattacaggtatgagccaccgtgcctggccaattttctcattcttaaaagatttctacaatttagtcagtgtgtcatattgttcaagagtgtggatctggagctagactgcttggttcatatcctgacattaactaactgattgattttggacaagtcatttagcctcagttccttcatctgtaaaatggagataatgatagtgcctactccataagattatatgcgaaataaactctactagtgttggctatcattatccacctccacatgttgctggttgtcatgatatttcattgatatcttttttttctttttttgagatagagtctgtctctgtcacccaggctggagtgcagtggcacggtcttggctcactgcaacctccacctcctgggttcaagcagttcttctgcctcagcctcccaagtagctgggattacaggcatgtgccaccacgcccggctaatttttgtatttttagtagagacagggtttcaccgtgttggccaggctggtctggaactcctgacctcaggtgatccacccgcctaggcctcccaaagtgctgggattataggcgtgagccactgcgcccggccttccattgatatcttgaattccatgtcgagactgaatgatcacttttttattaggggtattgtggacgtgatcaatgaatttggtataaactagactgtgtgacctcgagtcccttcaactcaagtgtttcaaggtaatctgagttccaggatcaactgacactgaaatagtgatcctaggagtactgattcataatgagcagataacatggcaatgccaattacaatagacgatttctaaagttagaaactttacttagaaattttatgttgagtcccacactgtagctcaaataaatgctaatgttaacaggaggtttgtaaagggttcaacaattcaaaaagtgacacacacctagaatcatcaggcacattccttaagttgtgaggcattcggtacatagattgaatgtcttgggtgtgactccataggcaaaaatgtcagggactatttttttttttgagatagagtctcgttctgtcacccaggctggagtgcagtggcgcgatctccactcactgcaacctccaccttctgggttcaagcaattctcctgcctcagtctcctgagtagctgggattacaggtgtgcaccaccacgcccggctaatttttgtatttttagtagagacagggtttcactatgttggccaggctggtctcaaactcctgacctcaggtgattcacccacctcggcctcccaaagtgctgggattacaagcgtgagccgcctggcatcagggagtagtttgctgaacagaaaccttttggctaaggtttattgtttattttgtcagtttggcagatcagcaagtgagtaaggtagataaacaatgtcattgcagaaaaattttaggcagtcaagtgctttatttgccaaaaagattcaaccacctgatggaaatgaaaaacaggatgatacgatggcttcttccttcactttctcactttccttggattatgaaatgccagtaattgagaaagcggaatgaacagtcattagagatggaagaaaaccctagagagaagttggaagtagttgggtgggataaagactttctgataacttcaagcagatctagaaattggcattggattgttagagaaaaattgaaaatgtaaaatgttagttgcatgagtgggcaacagatactctccattagcagtgttcaattacgtgtcaccaatgtgcaatagtctgagacaggcagggtcttgctctgtcacccaggcactgtcagagctcactgcagcctcaacctcctggcctcaagccatcctcccacttcagcctccccagtagctaagactcaggtgcacactaccacgcccagctaattttttaattttgtaaatttcttatttattattatttcctgtttttttggggggggtagagataggatctcactatgttgcccaggctagccttgaactcctggcctcaagtgatcctcctgcctcagcctcccaaagtgttgggattacttacaggcatgagccactgagcctggccaagttctgtttatttagataatatttgcttgtagtatggaccccacccagctcacaagcttggggtgagggacctgggggttaaatgacggcaaatgtaagccaacctaaaggttatatgtatgttgattcttcagatgtggccgagatcaggcaaggcagctcacagggagagtaaagggtactattttatacactaggtacttggtaaccagtctgaattgtgggccagtcctagggacatggggcaaaagtaaagaaaggaaaggaaaaaagactagagggaaatgtaggatacactcacgtggatggaagattgagtccagggaaactgagtaagatgccaaatgctcacgataaaaggatgacgtttccatgggatcctgtaggcatcaccgagagggtactgttgggagaacacttaggaacccagatcacctaacatggagtgagtggggctcagatctgagcagaaacccaacaaggacttcccaactccaagtaaagctaaatttagacaatccttttatgttgctggtccctcttgcaacacagtctcctccggccaggctgccttctccttctttatatgcaccagccttcttccacctcagggctttgaactcctttatcccagctctgccttgcccttggccggggaagtctctagccctaggtgcttcaccttcagctaaccctattgtgtgcaatcccgacctcctggctctctctaaagtcagttacacacgccagtgagctctgagggttcagccaagattgaatacactctgttaaagaaggggaattgggggaaaagccagattttaaaagcatgatttatttcttacttgtttatgtatttttgaataggccacacctggtgtgtgactgccccagtcattaggggatttttttttttcttccctggaggcaaccaccataactggtttcttgtgaattcttccagagagctatcaagcatttatgagtaaactcccccctcccttacaaatgttagcatactagtcacactttttggtaccttttaccacttataatatcttggtgggggtttcttttccttagccgcctcattcttcttaatgtaactattaatccttcttctgttttttgtttttgttttttgacagggtcttgctttgttgcccaggctagtctcaaactcctggcctcaagcagtcctcctgcctcagcctcctgaagtgctgggattacactgggcaacatggccaacccctgtctctatcaaaacaaaaacaaaaattagttgggcgtgctaacgcacacctgtagtcctaggtacttgggagggtgaggtgggatgatcacccgagcctgaggagatcaaggcggcagtgagcggtgattgagccactgcacaccagcgtactgcacaccaggccacagagtgaaaccctgtctcaaaaaaaaaaagagcgagtgttggtatttgtgtgaaatttttattgaggatattaagacaaagtgttgatgttctatactttgaacccaaagctttgtaactcattttctacttgtaactatgtaaaatatgcctgcttagtataccaaacagtattcttaactgtattcttaaggtcgggcacggtggcttacccctgtaatcccagcacttcggaaggccgaggtgggtggatcacctgaggtcaggagttcaagaccagcctggccaacatggtgaaaccctatctctactaaaaatacaaaaaaattaaccgggcatcttggcgcgtgcctgtaatcccagctactcaggaggctgaggcaggagaattgcttgaacccaggaggcagacattgcagtgagctgagatcgcgccactacactccagcctggtgatagagtgagactccgtctcaaaaaaaaaaaaaagttaattttatgttagatgaatttcacctcaaattaaaaagaagagaaagaggctgggtgcaatggctcacgcctgtaatcctagcactttgggaggctgaggcgggtggatcacttgagcccaggagtttgagaccagcctggccaacatggtgagaccttgtctctacaaaaatacaagttagccaggcatggtagcctgcacctgtggtcccagctacttgggaggcttaggtgggaggatcacctgagcccaggaggtcaaggctgtagtgagccaagatagcaccactacactccagcctgggcaacagagcaagaccttgtttcaggaaaaaacaacaggttagtactgggcatcttagctatctcttagacgacaaagggctaatttgggatggacactccttggtgtttggaaatttaaaagccaatgcaaatgctgtataaaacaattgatctttaacggttcagcgggatctataaattttctcctgagtaatgaaagattgctgtgtttttttttgaagtctccttaatgattgtctgtgtacttactccctgttgcaaaacaggtaatgagagtatattaggtgctattttaaaatacacccacaacattaaactaaattcaaagaattaattggaaattgttatttctgcaaagtaatttccaccaaatcagtcattaagctatctactaaaaccagtatttagtggcttttagtcaagttggctaatggtagacttctcatggcacgtgggagaagtaagctgaagtagcagaaaatggtatttgcagtgagtgttcaaggcgaacttttaaaaatactttacagtaattacagcatgtggctgaaaataactatttggttctttttttaaaccactatagttagatggactataaacatcattcagtttccctgtgttgtgattcatttccacaaacatgtattgtgccaggcactgatttaggtgccacaaaaaatagataagaaatggcttgacaactgtccttaagtttaataggcatgagatttctagatactgctctactaatgtgtcattgcctacaactcacctgttctgaatgaccactttttttgttatcctatatcagaagtacttggaaaaaaataaccagcaatttgacattttggagaaatgttttattctcttctgtttttcaccaaccaagcaagcagcagtgatgttttgtttttttaaaaatcagaggcagggatctgagtatttcatagggatttcagttcgtttcagtgatagaggatgttggcactaagtctaagtaccacaacctaacggggccatctcattttacattccccgttgttcctgcaatgggaacgaaggcctgaaagctgcctgccacatgagaaaaatggcagcttttcaaagttctcgaatgttaacctcccttgaatctgttaaggcattcagagcacagtacaagaaacttaaggtttgaattggactgtgtctctgctgagttggcgtagcatattaattttctatttctattggtaacttttgttgttgctaaattcttagtaccttttggttttatgttgatgcgaagtagtttaagtgttacagaaacagtggctttaaagttatggtattgcttttctcaaataggcagcacttagtaaaacaaaaagaaaaaaaattgcctaataagctgggcacgctggctcactcctgtaatcccagcactttaggaggccaaggcgggtggatcacttgagaccaggagttcgagaccagcctgaccaacatggtgaaaccctgtctctactaaaaatacaaaaattagccgggcgtggtggcgggcgcctgtaatcccagctacttgggaggctgaggcaacaagaatcacttgaaacctggaggcagaggtaagcagtgagccaaggtcgcgctacagcactccagcctgggctacaaagctagactccatctcaaaagaaacgaaaaagaaaagtcaaaagaccattctggagtcctctgatgaaatgagatctatgtcgttggtatgaaaatgaacatcattcacattgtttcctaggcagagtcactgcttttgatgctatttgtatcatggtagcgttttgacagccaacaggaatttccttcttagtattcacattgagaaatgtgattaaacatcattctgttgcctaaaaggcaaatcagcagctagaacagctttaaaagggaccatggcagccactctcaagttctgtagccttttttgttttgttttgtttttaatctaatgaggtcctgtgaaaatagcccagtgtttgcatagataaaataagcattgtgggccgggcgcggtggctcacgcctgtaatcccagcactttgggaggcactccaacctgggtgatgaagcgagactccgtttcaaaaaaatgaaaataaaaaataataaataagtaaataaaataagcattatgcatttgaccacttgaaaaaaatgaggtttctctctggctagccattactccaaagatcaaaacaaacaacaaaacaagcaagagtggttatcatttatttctttccagttaactattgccaaatttgaatttatatggcagattttggttccagatggagcagtcatgatgatctgcttttggaagttcactcattgatttttgtaaacttcagcaagttacaaaattgatattccaaaatattttcttaaatcactccaaagttgtatctttcatctgacatcactattgaacctataaagactttttatgaaacctatgcaatctaattgttagtttaatccaaaaaaaatcatttggctggcttatgatcatttttatctgggggagaaatataacaatttgatctttttttttttttttttgagacagagtcttgctgtgtcgctaggctggagtgcagtggcgcgatctcggctcactgcaacctccgtctcctggaagtctaactctcatccaggcgggagtggagtgccttgacgcagtcttggctgactgcaacctctgcctcccagactcaagcgatcctcccacctcggcctcctgagtagctgggaccacagatgcaggccaccatgcccggctaatttttttgtatttttggtagagacagggtttcaccatattgcccaagctggtcttgaacttatgagctcaggcgatccacttgcctcggcttcccaaagtgctgggattacaggcgtgagtctctgtgcccagccctaatcatcttttttgatatattattttactgtttctagctagcaaaagatgattcttgcttgcttaaaataaagtccccacttcaggttttcagggaacaagaatttacagtttgtagaaattctccttgtacaatttagctacactatattcttattttttatgtgataagcaactgtacttaaaagtagactatcttggctggacatggtggctcatgtctgcaatctcagcactttgggaggcagagatgggcgggtgacttgaggtcaggagttcgagaccagcctgggcagcatagtgagctgagatcacgcaccagtgcactccagcctgggtgacagagtgagactgtctctaaataaataaataaataaataaataaatacccaaatgagtaaactaaaaatttacagcactattggtcacaccaagtcttttattgcaaggaagagggaggtttgtaggctctacagcctgagacgctagagctggctgcctgcatgcctgtcacagggtttctgtcttactagtaggggtgaagtcacttcactgctatgttagtttcctcatcggtaaatggaaataataatagtattgtacttaatgcaacagaactattcacttaaaaatgattaacatggcaaattgtatgatatatatatacacatacacacacacacacactttaaacacacttttttttttaaacaaaagggaagagtattagccgggcccagtggctcaggcctgtaatcccagcactttgggaggccgaggtgggtggatcacaaggtcaggagatcgagaccatcctggctaacacagtgaaactctgtctctactaaaaatattaaaaaattagccaggcgtggtggcaggtgcctgtagtcccagctacttgggaggctgaggcaggagaatggcatgaacccaggaggcagagcttgcagtgagccgagatcgcaccgctgcactccagcctgggcgacagagtgaaactctgtctcaaaaaaaaaaaaaaaagaagagtgttgtattggggaggtaaaaaaaaaaaaaaaaaaaaaccacgttagaccagaccatgatgtccattgttttttatttttttgatggagtctcactctgtcacccgggctggagtgcagtagtgcgatcttagctcactgcaacctctgccttccgggttcaagtgattctcctgccttagcctccagagtagctgggactacaggcacccaccaccatacctgggtaatttttgtatttttagtagagactgggtttcgcgatgttggccaggctggtcttgaactcccaacctcaagtgatcctcctgccttggcctcccaaagtgctgagattacaggcgtgagctaccgcacccagcctggatttgtttttaaaacatgatattagtgtgttaattacattcacatttgcctagaagaaatttgtaacagaaataggagctcaaaacattgaaatgagatgaagcaacaaataatttaaagccacttaaaaatagagccaaacatggtgggatttctttgaaatatctgttaatgtttattttttaaagctgaatactgttcagttattaagtagaaccaactacccgtgtataattaatgaaaagaaaacacttgtgctaggtttataggtatataaacacttagatatctcacattctttggcaacagcttagggaaggcagccatgtactagagacttttagcttttttttgcagctgatctcagggacttgaagaactccttatggtatgattgaattattttttaataggtaaaattctcacgttattgcatgctcttcataaattaccttttttttaaaagagatggggtcttgctatgttgccgaggctggtctcaatctcctgtgctcaagtgattctcccacctcagcctaccaaagtgttgtcattatagacatgagccaccctgctctgccaaatgacatttttaacagctccatgagatcaggggactcttctgttcacagttacatccccagcaccttgcagagtcactggcacattcctgaaacccaacataataaactacgtatgtgaacaaaaccaactctgaccacaggctagaaagaattcagtagaagtttccattgactcattcatgcattaagcaaatattttcttttcttttctttttttgagacagagttttgctcttgttgtccaggctagagtgcaatggcgagatcttggctcaccgcaacctcctcctcccaggttcaagcgattctcctgcctcagcctcctgagtagctctaattacaggcgtgcaccaccacgcccagctaattttgtatttttagtagagacagggtttctccatgttggtcaggctggtgttgaactcccagcctcaggtgatccgccagcctcggcctcccaaagtgctgggattacaggtgtgagcccccatgcccggcctcagcaaatattttcaaaggacatctagattggtagtgcagtatgtcttgactgatagtgggggatgtgatgaatcaggtattgtgaagaagaaactcatgttagaactacctgaacaatgccaagagcacctcctggtaagtggagtttcacaaaaggagtattaaaagggcactaatcccattcacaaggggcccaccctcatgacctaatcacctcccaaagggcccacctccaggtaccactgcactggggattaggtttcaacatatgaattgggaaagggaggcataaacattcagtctgtaacaataatatataaaattttaaatcaaactagataaacatttattcaaaataagacagttaccttaatatataagaagtttatgcaaaacaataaatacaaaatttctaatagatgaatgaacaaagattaagaagagaacagttacaaaaggaattccaaattccaaatgaaaatgtctaaaacattaatttcatgaataattaaataaatgcactttgggagaccgaggcaggtgcattgcttgagcccaggagttcaagaccagcctgggcaatatggcaaaaccccatctctacaaaagatacaaaaattagccaggcatggtggcttgcgcctgtagtcccagctactcaggaggctgaggtgggaggatcacctgagcccaggaggttgaggttacagcgagccgaaattgtgccaatgcattccagtccaggcaacagagtgagaccctatctccaaaacaaaacaaaacaaaagaaataaatgcaaaaaaagcaatttgcctaccaaataaggtagtttttttgttttgcaaatggtagtattcagtcctagtcagggttcagcaagttagggatccttgtatactgttggtgagtgtgtaattggttcaccttttctagtaaagacctgggcagtagtcgaggctggatttttagccaggatgcttggtactgctggcctcttctaattggacagggagtctattgataatggattgttaaatagttttattatcattcctgctagcaggtatcaagacactttaaaatgttcatatacagagacctattggttttcctcatgggaatgtaaataaattttgaattaatctttctgatatttctttatagctctgtactgtaaagacctactagtatgtgagctccatgagaatagagaagttgtgtcttcttttacctgctaggccctcagtttctagaatagtatttggcatagtaagtgctcaataaaatatttgttggaagaatggatgggtgtatgtgttttgggcatacagtagaaacagcatatgttgcttactgtaatgttttgtgttctcttttaagaacattttatttgacagtatttattatattaatattactgtggtggtatatgaaaaatatttttggcctttagacagtaatcgtccgggattttttttttttttaagaagtttttcccccaagggtgaagtcttttttgcaatcaatcatcaatccatagttgggtactaaatgatgcccattttctgaaaaatgtttttttttttaagggaagaaaacagaggaacatcaatcaaggaaaaagtaatagttcaatactttatgtaatagctttttctattcacttaagtttttccttcataaatgttttaccttcatttttgatctctaattagcagaggctcaagtgaccttaagtatctcttatcctgaagattttcctatcaaccaaattgtaaactaataaataattatggcatattacaaaagaatgtatgaaaatatgtatgtatagaataatatgtacaaaaatagcagtaaaatgcacatccatgtacatgccacccagcctaagaaatagaacattaggctgggcacggtggctcatgcctgtaatcccagcactttggggggccgaggcaggtggatcgcttgaggtcaggagtttgagaccagcctggccaatatggcaaaaccccatctctactaaaaatacaaaaattagccaggcgtggtggcgtgcacctgtattcccagctacttgggaggctgaggcaggagggttgcttgaacctcggaggcagaggttgccgtgaaccgagattgcaccattgcactccagcctgggcggcacagcaagactccgtctcaaaaagaaaaaaaaaaaaaaaagaaagaaagaaataagaaatagaacattattccagaatctcctgctggcccctccctgatcacatccctttctaagcctctgccaccctatttgagtgttcagaattttgcattgaacatattctgttatttttacagtttcatcctgtatgaatataccagtaaaatacattgtttagttttgcctatttttggacttcaagtagaatcagatggacaggtgggtttgtcttagtctattttgtgttgctatagcagaataccacaacctgggtaatttataaacagtagaaaattatttggctcatgaatctagaggttggaaagtccaagaatatggtgctggcaccagttgaaggccttttgccacttagggcaagagagcaagagggcatcaaactcccttttgtaacaagcccactcttgaaataactaatccactcctttgataatgatattaaaccattcaggagggctctgccatcttttatttggccccatttcccattaagtttctgacacatgaactttggggaacacattgacaacaaagcaggttgttgccaatattttttttagcatgaattatgctgctataaacattcatatgcatgtctcttggtgcacatgagcaagagttattgtctagctcctaaaccttaagatatatacctagagatgtcatacagaggcacaggttcacctttactaggtaaaaccaacctgttttccgaggtccccagcagtgtgtgaatgttgccattacaccacgtccttgtttacacttggtgctctctgactttaaatttttaccagactgatggatatgaaatggtatttcattgtggttttaatatgcatttccctgattactaattaagctaaatatatttattgcttaaaattcttatttatttatttttgccccttttcctgttaagttatttgactctttttagaacagttggagccaggcacagtagctcatgcctgtaatcccagcactttgggaggccgaggcagggggattgcttgagcccaggtattcaagaccagcctgggcaacatagtgatatcctgtctcttaaaaacataaaaaatagaacaattgaaggagtgctatctatattctagataccaattctctgttgatcatatgtgttacaaatatcttctcccagtttgtattttttatgttcactttcctcaatgctatcttttcgtgaacggaattttttagttttttagttttattgacttttttcattatggtgtacactttttgatgtcttgtttaaaaatcatttctggctgggcgtggtggctcatgcctctactcccagcactttgggaggctgaggtgggcagatcacgaggtcagaagatcaagaccatcctggctaacatggtgaaaccctgtctccactaaaaatacaaaaaattagcctggtgtggtggcacgcgcctgtattctcagctacttgggaggctgaggtaggagaatcgcttgaacccaggagatggaggttgcagtgagccgagatcgcaccactgcactccagcctgggcgacagagcgagactccatctcaattaaaaaacaaaacaaaacaaaacaaaacaaatttcctacctcaggatccaaaagatattatcctatattgtctcctaaaagttttatagcctagccttttacatttaggttcttaattcttaatccacctggaataagtttttgtatatttttaaaagtagaggttttatctcatttttcccgatagatatgcaattatccccgtacctcttattgaacagcttgttctttccccactggttgatgacaatgatgatgatgatgatgaaaatgatagcattaacacttactgagggcttaccatgtgccaggcatatgctaagcatgaggtaatttactaatccttttagtaactcagtgagtaggtcctgcttctatcctcttttgagttgagaaacagcaacacagaagttaaatacttgcttcatgtggcatacctagtagtcaaagagccagcattcaaaccaatttattctagttccagaatccagattcttagccattaggctctgcatcttttctacatggctacatctatcctaaatcaaaagtcatttttgcatggacctgttcctggcctttcaattctttgtatttgtctatgtctttgtccctggccaatagcacaaagcctcttaattaactttagaataagtcagtatctggtgtggctaatattcctaccttgttgttcttcaagagtgttttggctattaattgacctttgcatcttgatttaaatcttagaattttgttctccagaaaacttgttggggttttaattgaactgcattgaatctgtagataatctaggggaggattgatatatctataatatatggccttccaatccatgaacatggtatatttctatatttattctgtttttctttaatgttgtcttagtccatttgtgctgctataacaaaatacctgagagtggataatttataaacaacagaaatttatttctcacagttttggaggctgggaagttcaagatcaaggtgccagcaggttcagtgactggtgaaggcccattcctcagatggtgctatctaggtgttggtgttgccacatggggaagggatggaagagcaacagcagctctctgaagcatctttcatatgggcattaatcccatccatgagggtggagccttcatagcctaatcagttcccataggcaccagctcttagtactgtcaccttggaggttaagttccagcatgacttttggaggatacattcattaaaaccttagcaaatgcattttaataaagttttatactttgctctattatgttcttgcacaccttttattatgtttgtttctgtctacttgtaattcttcatgctgttataagtaataatgttatatatattttatatatatatatatatatatatatttttttttttttttttttttttttttttgagatggagtctcactctgtcacccaggctggagtgcaatggcaccatctcagctcactgcaagctccgcctcctgggttcacgctgttctcccgcctcagcctcccgagtagctgggactacaggtgcctgccaccacgcccacctaactgtctcttgcttttccaccttccttccatctctgctgtctgtttggcttggctgatttttacttattcttctcatttcctcttagaaatccctccctctgaaaggccttccctaatcccatgtctatcttgagccctgcaagtctatgtttctactgctcttttagcctagagtgctcattagcactctactgttccctactctcattccagtgccagtacagagcttggctgagagtgagctctcaataagaatggttgaattatagcaacattttggaaggagacaaaaaaaaaaaaaaagacccaaagaaaagtggcttagacaacaagggcacattttctatctcacatgacaaagagtccagaggcagggaaattccaggttggtgtctcagttcagtaatagctgagaaattgtcatcaaaaagccaggtgctttccatctctggctctgccatttcaagcatcacaggtagctatgaccacgtcaagtaaagaagaggagggagccgggtgcagtggctcatgcctgcaattccagcactttgggaggccgaggcaggcagatcactttaggttaagagttggagaccagcctttccaacatggtgaaaccccatctctactaaaaatacaaaaagtatccgggtttttttgggaggaaacctttctcagtacgtgtttagtagatatctgctacatctggttagccagggtaatgtcacatgcccatgtctgtgttgcaagagagatggagaaagtgatcctgtaataagacaggtgctctgccaaagggaagatgggatggatgggggatagctgctagattgtcagccaagatgctcagacaaaagtgtctgttgcaagggatatctcacagaaccagtggctggatgaacaggccagtctcacaagggacttaaattggccagtggaaagtccacaggtacattttgaacatatgggggtaataatgtcttgtgtttgctttcctcttcatctctgcagattagcgttttttccactaatttggcatgcacatggacaaaaattgcctcttagcgatttttttttttttttttttttgagactgggtcttgctctgtcacccaggctggagtacagtggcacaatctcggctcattgcaacctcctcctcttaaattcaatggattctcttgcctcagcctcctgagtagctgggattacaggtgcaggtgcgtgccgccatgccaggctaatttttgttttttgtttttgttatgagacggagtcttgctctgttaccaggctggagtgcagtggcacgatctcggctgactgcaacctccacctcccgggttcaagcaattatcctgcctcagcctcccgagtagatgagactacaggcccatgccaccacacccagctaatttttgtatttttagtagagttgggggtttcaccatgttggccaggatagtctcaatctcttgaccttgtgatccgcccgccttggtctcctgaagtgctggaattacaggcgtgagtcattgtgcccagccatttttttttttagtagaaatgaggtttagtagagatgcccatgttggccaggctggtctcaaactcctgacctcaagtgatccgcttgcctcggcctcccaaagtgccaggattataggcgtgagccactgcgtccagcccctcttagcaatttttaccttttagctctagcacctattcccatagagtttttcatgcaagtccttgagtcagatgctcaactatggcagtggggttgagaagtgggatcccttctcttagaaagggacatcacctatgtgtttgcagagccatcttaaagtgggaagtgaatgaattggcaagcgttttagtggaaaatctttttccttggtgttaactaagtttcagatgccagggccttaaacatttttttcctgtaatatttttgtaatattttgcacccactctaccactgccccctccaacctggaaatatttagagtttagaaataagtcaggactttaaaaatctggctttttcttctcattaataatttagcttgtatacttctttcttctttagtctttggattgcattcaaagttctccctggtatttagagtgagatttctttctctctctatcaccctcttttcttcctttcctgggtcggtcttgaacttgttttctgggggagagaatcacctatggagactagtgtgggatgtttgagaggcacagttggttttccagggctgagaagaatgcaggacagctagaggcggggaagctggttgaacctttgcacctgctgattgatcaagcttgggaaagagaccaattcatatttagacagctttcgtggtccaatctctgcatagaaatcaggaaatgaaccagaagattccgttttcaggttgaagccagacactgaggggcttgactaagctcctcttgcttacaataaaatggagcattttttaaattataaagagcaagattttgctttctgagattagcgtcgatctttcatcagtgttgatgcagccaaacacagttacaagttatatccatccttctaagactaattttataacttcattatccctaatacttttcctcttcaagttatttgacaataccatacctatctggaggagtaatttttaaactatttaaaaaattaggtggttttttcggtttgttttttgagacagagtctcactctgttgcccaggctggagtgcaatggcacaatctggctcactgcagcctcgacctccccaggcccaggtcatcctcccacctcagcctcccaagtagtgggacccacaggcgcatgacaccacacccagctaatttttatttttattttttgtgcagagtgggtctcgccatgttgctcaggctggtctcgaactcctgggctcaagtgatcctcccattcagcctccccaagtgctgggattatagtcattgagccatgatgcccagcagaaattaggtgttttttttttttaatgaaaaaaagtaagcagtttaatttttttttttttttttgagacagagtctcactctgtcacccaagctggagtgcagtggtgcgatcttggctcactgcaacctccacctcccaggttcaagttcctgaatagctgggattacaggcgctcgccaccatacccagctaatttttgtatttttagtagagacggggttttgccattttggccaggctggtcttgaactcctgacctcaggtgatccagccacctgggcctcccaaagtgttgggattacaggcgtgagccaccacgccggccttaaaatcttatttttttacagtgtctttcactccgcatctttggggcagttagagatgtttgtttttgtttgttgcttttaccgcatccgtagaaacaagagaggaactgaaagtgactaaggtgttctaagaacgtcaaaataggctagaagtttattgctgctttttaaagggatacattccatagcagtttcccctcctaatctcatctgctcagactctagcacagtcaaaattctggcactttttctacaggttgtgattttcccctttctcttcatttcagaacacatttggctcagagcaccgctgcattcattagtcctgaggcttctactttctgagcccttccatttgttgcacatccaacaacagcctccttaatgcccttttacacaatataattattgttataaaaatatgaaaatgcaactttttgtactctatgtgtctttctgcattctttttttttttctttttttttttttttttttgacaggatctcactctgttgcccaggctggaatgcagtggtgtgatcacagctgtctgtagccttgacctcccaggctcaagtgatccttccacctcagcctcctgggtagctgagactataggcgtgcgccaccacacccagctaactttgtgtattttttttttttgtagagatgagggtcttgctatgttgccgaggctggtctcaaactcctgggcccaaatgatcctccttcctcagcctcccaaagtgctgggattataggcatgagccgccgcacccggcctccacattctttatatcactaacttcatccatatgcagctgcctcctaaacttcagctaagttttatttttttaacccacacatatatttttatcatatatttgcttacattcttatctcgtgttcagaatgcaactacaaagagccatgaacgtagtgttttcatttctacaacagaaacagactccttagtgttttcatttctgcaacagaaacagacttatgactaattataacaattaagcctaagtttgtacctgtttttattttatttacttatttgagacgaagtcttcctctgtcgcccaggctggagtgcagtggcaccatcatgtctcactgcaacctccgcctcctggggtcaagcgattctcctgcctcagcctcccaagtagctgggattacaggcgcctgccaccatgcttggctagtttttttgttttgttttgtttctttttgagacagagtatcactctgtcaccaggctggagtgcagtggcataatctcagctcactgcaacctccgcctcccaggttcaagcgattctcctgcctctgcctccagagtagctgagactacaggcctttgccaccatgcccagctaatttttgtatttttagtagagatggggtttcaccatgttggtcaagatggatttttttgtatttttagtagagacggggtttcaccatattggccaggctggtctcagactgctgacctcaagtgatccacccgccttggcctcccaaagtgctaggattacaggtgtgagccaccatacccagcctgtacctgtttttaatggcaagttctagaattgcattttaatgagatttgaattcagtaagacctttcattttgtgtgcttttcctttctaattaaaatctgttgtattaacttgaatgtacaactagggcactgtggtgctggagcccctttttgtcagttacctcacaggctcctgctataggagacattttcaacccagggagcacagcaccctaattcaaaaaccagtttcagaaacagcagatgaatatatgattttgtggaatctgcatctactcctattgtcaaaacataaggtatctgtgatccttgaaataaaccttctattcctaagtcaccatagtgtttggaagaaaaacaacaaaaggaaaaaacaaataaaccttctaattctgcctttcacatgtaatttattctttttgtgggcaagcaatgaagtcactttgggtaatcctttttcatcacttttaggttgaaaaatatatttgagtatttctgcttttaatattctcaatttggcagggcacagtggctcacgcctgtaagcccagcactttgggaggctgaggtgggcagatcacaaggtcgggagatcaagaccatccttgctaacatggtgaaatcctatctctactaaaaatacaaaaaattagccgggtgtggtggcgggcgtctgtagtcccagctactcgggaggctgaggcaggagaatcgcttgaacccgagaggcggaggtcgcagtgagctgagatcgcaccactgcactccagcctgtgcaacagagcgagactccgtctcaaaaaaaaaaaaaaaaaatctcaatttgtctatggaaattaatttaaatctttgttaaaagctcgagaagttaatttcaggtggtatttgtgatggcacatttttgtttgtaaagttcttttttgagacagagtctggctgtgtcacccaggctagagtgtagtggtgcgatctcagctcactgcaacctccacctccctggttcaagtgattctcctgcctcagcctcctgagtagctgggattacaggtgcaagccatcatgcccagccttttttttttttttttttttttttttgagacagtcttgctctgtcaccaggctggagtgcaatggcgccatctcatctcactgcaacctccacctcctgggttcaagcgattctcctgcttcagcctcccaagtagctgggactacaggtagctgccaccatgcatggctaatttttgtgtttttagtagagacagggtttcaccatgttggccaggctggtcttgaactcctgatctcaggtgatccacccacctcagcctcccaaagtgctgggattacaggcgtgagccaccacgcccggcctgtaaagttttataaaactttctacgtttctgtaagtgcagcttctttaatattcagaaccaaattgattttttaaaacattttaaatggatattttcttacagttactctttgagtaaatctataccctctgacacattttcctccacagtttgaggaagctaatgctagtaacataatcctaagggattctgtttaaacagagccatttaagtcctgcttcttaaaatgcccaagtcctcaggaaggtgaatttatcaaaaactggagtatacagaaatagcagtctagatagcacagaccaaagtagtctcagtagtgtggaggagatcattcccttcactgggtgaataattcactgcaggagagatttgcttacagagggggactggcctcaggaccccctttcctggagtctgtgccacttacataggtaattttagcaacttagtctcttactagattggcttattccagggattttgaattaatgttggtttagtacactttttttttttttcgagatggagtcttgccctatcacccaggctggagtacagtggcgcgatcttggctcactgcaacatctacgtcccaggttcaagcgattctcctgcctcagcctccagagtagttgagattacaggtgtgagccaccgcgcccagccggtttagtacactttttaattacaggaaaacaccatattaaagttgacctagactttggaggaaaacttccttgtggatgacttgggtctcctcatctcaaagtaaatagcttttctgaatgtagttcctgtgacaactcttctgcataatttgagcaaaaaataggttacagaagactactttttttttttgaggcggagtctcgctctgtcgcccaggctggagtgcagaggtgcgatctcagctcactgcaagctctgcctcccgggttcacgccattctcctgcctcagcctcccgagtagctggggactacaggcacctgcctccatgcccagctaattttttgtatttttagtagagccggggtttcaccgtgttagccaggatggtcttgatctcctggccctgtgatctgcccttctcggcctcccaaagtgctggaattacaggcgtgagccaccgtgcctggccaagactacttttttgttagtttttgtttgttttttgagacagagtctcgctctgttgcccaggctggagtgcagtaatgaaatctcggctcactgcagcctccacctcccaggttgaagttattctcctgcctcagcctcccgagtagctgggattacaggtatgtacctccactcctggctcattttttttgtagttttaatagagacagggtttcgtcatattggccaggcaggtctcaaacttctgacctaaagtgatccgctggcctcagcctccctaactgctgagattactgctgagactacaggtgcgtgccaccatacccagctaatttttgtagttttagtagagacagggtttcactatgttggccaggctggtcttgaactcctgacctcatgatccgcctgcctcgacctcccaaagtactgggattacaggtgtgagccacgtgtgcccagccaatttttgggtttttattacagatttgtgagggcaagattttttttttttaacttaatgaagatataatgacccaaaccaatgccatagcccatgcttattgtaacttaatcagaatatagtacctaaaaccagacctgaaaataattgtaaaaagtagcaattgcatattgattaacacaataacactttcttcattcaactcttcagtttattcagcgtctcataactaacagcacctggcacacacctttggttggtttgaattcaaggagcagtgtgaggtcaaggtcaagggggagtgtaaggtcaaggtgaagtgtgatgttgggtgagtggttcagcgaggttcctgaaaggtaccatcaggttgtaaccaacagcttggaaacatccatttgtagtcctcttggcaatcttagagtgaatagttgaaagtatgggttatagtctgttcagtggtgcttacacaggagtgtccgaggctaggtaattaataaagaaaaaaatctttgtttggcttataattctgatgtctggaaaagttcaagataaggcacctgcatccagaaagggccacaggttgctccattcatagtagaaagtaaagaggagcctgcatggcagaggtcacgtggccagagagggcacaatagagaggggggaggtgctgggctctttctaacaaccagctctggccaggactcatagagcaagaactcacccattacgtcaaggacggcaccaaggtattcatgaaggatctgccgccatgacccaaggcctcccattaggccccacctctgacattgggaatcaaatttcaacatgaagtttgagggggacagacatccaaactatagcagtatgtatacacagtatgcacctataaaataaacattattttctattaggttgtttattacctaagtttcttaatgtttagaatgtgcaactttgaaatataaattttattttatttatttttttagatggagtcttgctttgttgcctaggctggagtgcaatggcgcgatctcggctcactgcaacctccgcaggttcaagcgattctcctgcctcagcctcccgagtagctaggattacaggcatgggtctccatgcccggctttttttttttttttttgaggcagaagtcttactctgttgcccaggctggagtgcagtggcgcgatctcagttcattgcaacctctgcctccaaggttcagatgattctcctgcctcagcctcctgagtagctgggattacaggcgcccaccatcatgcctggctaattttttttttgtatttttgtagagatggggtttcaccatgttggccaggctggccttgaactcctgacctcaggtgatctgcctgccttggcctcccaaagtgctgggattatagccgtgagccaccatgcccggctaggaagaaatttttgtatttttagtagagatggggtttcaccatgttggccagcctggtctcgaactcctgacctcaggtgagccacctgcctcagcctcccaaagtgctgggattacaggcctgagccaccacacccaacctgaaatagaaattttagcatatatgttatatgatagtggttctcaaagtgcagtccctggacctctggagtttcctgaaaccttctcatggagtttacaaggtcaaaactattttattaaggattgtctttttaaccgtgttgacatttgcaccaacgttacaaaggaaatggtgggtaaagctgatgctttagtatcagttaaatcaaggctgtggctccaaattgcactggtaactactatattcttcaccattagctgtttttttttttttgttttttttttttgagatggagtcttgcactgtcacctgggctggactcattgcaacctctgcctcccgggttcaagcaattctcccatctcagtctcccgagtaactgttattacaggcgaccgccaccacacccggctaattttttgtatttttagtagagatggggtttcaccacgttggccaggctggtctcgagctcctgaccttgtcatccgcctgcctcggcctcccaaagtgctggattacaggcgtgagccaccatgcccagcccaccattagctgttttaaaaaatttcagttttacttgaaaatgttcttaatgaaacagtgaagattattcattttactaaatctcaaacccttgaagatacatctttttaatagtgtgtatagtaagatgagaagctctttagtgcagactaaaatacatgatcctgagttgtaagttgaactagctgcttttttcatgaacaccatttttacttcaaagaatgagcgacagacaaacttttgagtatctggcaaacattttctcaaaaataaatgaagtgagcctgtcacttcagggaaacagctggcaatgtttgttgccaatgataaaattctagctttaaagtgaaaattagaacttggggaaattgtttttccactgtgagtttgacagcttccaaatattaaagactcatcagaaaagatgagattggtactgatataaacaaatgtgattcaaaaaaaatattttacaagaaatgtttcaacagttggaagatctgcatatatctatgatataatattttctttttttcttttttcttttgtttttgacatggagtctcgctccatcacccaggctagagtgctgtggcgtaatctcagctcagccgagatcagcaacctccccttcccaggttcaatcaattctcctgcctcagcctcccgagtagctgggattacaggtgaccaccaccacacccagctaatttttgtatttttagtaaagacggggtttcaccatgttagccaggctggtctccaactcctaacctcagacgacccgcctgcttctgcctcccgaagtgctgggattacaggtgtgggccaccatgcccggctgagataatattttctaaatgatcaatgaataatttacatgatcatatacaggtaaaagatccattcaaaatgtaaggtggaccagtggatcttactgtagctgagttggaaactgcatctctatggtttcagatttcatattgcaactagcctttgagaagctatgatttgtcaagttttggtgtggtatcaaaggagaatgtctgcactgatctaaaaagggccttgaagtgtcctttgttttctagctacgtatctgtgtgaagttgtgtttttttcacatatttcagccaaagtaaagaatcgtaatagattgaatgcagaagtctctatgataatccagctgtcttctattaagctagacattaaagagatttgcaaaaatgtaacacggtgccattcttcttactgttttgttttggaaagtacagttttaaaaaataaaaacatgctctttccattaacatgtaatggtaatgggtttgttttctttttaaatgaataaatacctttaaaaatctctccattttaaatttctgattgagtaaatattgatagatgtaactcacacaaaagctcttcggaattctcaatgattttttttttttttgagacagagtctcactctgtcgccccaggctggagtgcagtggtgcgatttccactcactgcaacctctccctcccaggttcaagtgattctcatgcctcagcctcccgagtagctgggactacaggtgtgtgccaccatgcctggctactttttgtttttcttttgtagagatgaggtttcaccatgttggccaggctggtcttgaactcctgttctcaagtgatccacctacctcggcctcgcaaaatgctgggattataggcatgagccactgtggctggctggttctcaaggatttttaggagggcaaaggggcccccagaaccaccgtgatgtgacatcaggcaggaagggatgcatttttgatgacaccatccccaaagtagcaaaggctgtttttaaagagccgtttataatatttgttcacaaaggagtccttttaagatttggatttttttttccattaacttttccacattttagtcaagaatgtaagtgggttgattcgtttttcatctgtcttgaattttcttctagctgctgtcaagtcagtgctgcagcagttcatgtgatagtgagagcgtgggggcatcctcaggtttcacagagcatcaaaagaactctgctatagacacaaacaagcaccagctcatttgttactgagtaaggtttttattattaagatcttctatcttatttgggctctgtcatcttggtaaacgctttattatagcttgtagaatggtcctgaatagagataactttatggaaaacatattgttggattgaggccagtaatttttaaggtggactcaattcaaatgtagatgggctttttctgttgttttcaagggctttggtatcgaaagctgttgctttgtatagtatacatcagtttgaatgcaaagtgatatggtggggggaaatctgtagtcaggttgttaataggccaagaatgaaacctaagagcatatcctctgggcaagttttcaaggtggcacctatgactgctgaaaacaatcaaggctttggagattatgggaaatcatacagggagagggcttttttgtgtttttttttttgaggtggagttttgctcgttttgaccaggctggagtgcaatggccccgtcttggctcactgcaacctccacctcctgggcttgagcgattctcctgcctcagcctcccaagtagctgtgattataggcgtgcgccaccaggcccagctaattttgtatttttagtagagacagggttttaccatgttggccaggctagtctcagactcctgacctcaggtctcaaactcctgatcctcccgcctcagcctcccaaagtgctgggattacaggtgtgagccaccgcgcccggccattttttttttttttttttttttttcgagacagagtctctgtctttcgcccaggctggagtgcagtggtacaatctcggctcactgcaacctctgtctcctgagttcagtggattctcctgcctcagcctcctgagtagcttggattacaggtgcatgccaccatgcctggcaaatttttgtatttttagtagagatgaggtttagtaaagatgactgtgttggccaggctagtctcaaactcctgacctcaagtgatccgcccaccatggcctcccaaagtgctggaattttggatgtgagccaccgcgcccagctgggagagggcttttaaataaaggaaagggtgtttatgtttttggtttttgttttttgagacagggtcttgctttgatgctcaggctggagtgcagtagcctgatcatgactcactgcagccttgaagtcctgggctcaagtgatcctcctgcttcagcctccctagtagctggggctacaggcatgtgtgccatgatgccctgataattgttaatcattttaaaaataaatatgattactgtgaaactagatccacaaagggttactgataagcagagggctttgacgaagtcgtgctctcaatttgtaagaatgatttgtagtcatagcttgagttgtgtgtatatttgttctctcaagtagtttaaggtgatcgtcagtctcgtttacactattagcttacttgatgacccttgactttatagataacataatctagtgtttcttaaactgaaatctaggggtttgtggaatatatattattgaggaccaagaatcaactttaaatattaaaaattattagtcataaagacaaacattttgcacttttgttttataattttgtatttaattttttgagacatagtctcattctgtcacccatgctggagtgcaatggtgtgatcttgactcactgcaacctctgcctcctgggttcaaacaattctcctgcctccctcagactcccgagtagctgggattacaggtgcctgccatgacgcccggctacttttgtatttttagtagagatgggatttcaccatgttgtccaggctggtctcgaactcctggcttcaagtgatccacccgccttggcttcccaaaatgctgggattacaggcgtgagccacctcacctggccaaaatctcagtcataccttaataaagtggttttaaaaaaaaacaggccggccggaggcagtggctcacacttgtaatcccagcactttgggatgccaaggcgggaggatcacttgagcccaggaattcaagaccagcctgggcatcatagtgagacctcctctctgcaaaaaatacaaaaattagtgaaggcatggtggcgggtgccaatagtcccagttactcaggaggctgaagtgggaggatcacttgagtctgggaggcagcagcaagctgagattgcactactgcactccagcctgggggaaagagcacgactctgtctcaaaacaaaccaaccaacaaacaaaaaacagtctgaagtaagacactgaatgtatactgttagattgcacaagcgtaggattaaacactagctttatatttttatatttgagttggcacttccccatttcgcatgatcctcatgactgatttgtgaaattaggaaattagattatagctgcgtcttacaggcaaatgactaaaacttgaaacatttgggggcctgtctctgtgaaatccctttgctggggctagaaccctcatttatgactgttacctctcaggaggcagcaaattttccatggagaattccatttccactggaattctctcttccctgtgatgtgctcatgccccctctggctcgcccccttagtcctttctgggctctgcttcctgggccaggccctctttgctaattctgtgtatccttgctgtcgtctttggtgttctgatcctcggctgttgcttgagatccacctactcacttgatgcccttcttgagttctaaatccttctgtgtttccagctttcttctggacaggccagtccctcattcaacatgtcaaaacaacatttaattttcaccccaaactgtagctctttcttatctggatcttctgtttaattccgggaagcagaacctgaaagtcactctggaatcctccctccccctcatacccttgccagcctccacgtccaaccggccactcacacactagttgattgtgtttgttaaatgtccctagaattcttcccttctgtgcctattttgtctcatctagactgttggagccatttcctggctttctcttccaagtcctcttgtgcctgctggagagtctaaactcctaagctcgtccttcaaggccttgggtgatctagctctgagctgtctctagtttcatcactcgccaactccacttcccttctgccccacccacctccaccttgcactcaaagacaaattcacttgattcctggatatctccatgtctttgcattagctgttgctagcatacctgtcccctctcattctttatttggggggacagagtcatgctcttatacccaggctggagtgcagtggtacaacaccatgcccagctaatttaaaaaaattgtttttgtagagatgggttctgtgttacccaggctccctcttgttcttccagaccagaaaccccaaggcacaatgcaaactcaggctgtatttttgttcattttggttccccagctccaggcactgttcctggctcacagtgtgggtttggtgtatgtttggaagaataaaatccatgtgttttattttaatcatttgaagaaagcaaaattttgtaacacttccccccgttcctcggctcagattcaatcagctgttttgaatgattacccagagataacagttaaggtgcaaaccgtgtgtggctgtgtttgtgtgtatgtttcacctgtcggtttttggcgtctgggaatgacatttttccttgcactgagacatcagttatatctgaaaactatgtttctaaaaggaataggaaatatgaatgaataggtcagagttcagtactccaggcggttttcaaaccaaatttggtaatgttgatttaaaatggctcaacaaaaaagcaccccaagtataatcatggaaaatattagtactactttgtatgtagtaatatgttgttaagagaattattcattgaaattatgttaatcacagggaaagaccataacttctctcttggtttgtttcaacaggatcagtttgacaacttagaaaaacacacacagtggggaattgatattcttgagaaatatatcaagtttgtgaaagaaaggacagagattgaactcagctatgcaaagcaactcaggtaagttgatattgaaaaaggttatttgttaactgcaaaatgatgtaaggataacgtatattctcattttacagtataaatgtatattttaaatatttttccttttatgtaaggtaatatttcaatagaagtgattgtttttcatacagaaaattaattttcatagaacattaaaaataaaaactaaattactgctttaaggcccagttttttttttcaacaagatatttgctgagttttggagcagcttgtttctcagtaaactttttattgaaatatattaataacatatgtacagagaagtacacaaatcataagtgtgcagctccatgaattttgacagtgtgaacacactcatgtaaccgggcacccaggtcaagaaacagaaagaccagcctggcaggccccctggccccctccagctccccactctccccccagcggtaaccactctcctgacttctaaccgcgtggattagtagtgcccacttttgaactttacatgagtgtaatcatttggtatgcattcttgtgtatctggcttcttttgttctatattacgtttgtgagattgaccatgtggtagcatgtggtgggatctgcttattttcattgctgttgagtattttggtctgtgaatgcaccagaactcatccgttctgactaggtgattggttgtttctaatttaagctataatgagtagcgctccaacgagcattattgtacaaggctttttgtgtgtatctgaacacatttcctaggatctacgtaggcatctaattgcaaggtcacaggctactcatatgcttagctttggtggatagggttcagccatttccaatgtgcttgtactaattcacactcccttccgtaatgtgttgaggggtcatgtggaatagtattttaaaagtacttcgggccgggcgcagtggctcacgcctgtaatcccagcactttgggaggcaaaggtgggcggattgcctgaggtcaggagttcgagacccgcctggccaacatggtgaaaccccgcctctactaaaaatacaaaaattagtggggcatggtggcaggcgcctgtaatcccagctacttgggagggtgagacatgagaactgcttgaacccgggaggtggaggttgcagtgagctgagattgtgccactgcactctagcctgggtgacagagtgagactccttctcaaaaaaaaaaaaaaaaagtgctttggggccaggtgtggtggctcatgcctgcaatcccagcactttgggaggctgatgagggaggatagtgtgagcccagagacttcaagaccagcctgggcaacatagtgagccccctgtctctgttttttttttttttttaagtactttggatctccttacatcttttaatgatgagattatccaagaaatttgtgtttttatagaatatatttaaaagttcttggtagaactaagcttgaacttgaagtggcatgcaaagtccttaatgatttcatgttgtatagttgtagttgaattggtttgtggatattgttttaaggcctgttaaagagctagatgattttgatttagaaacatttactttcctttttctttaattttttttttttttttgagacagtctcactctgtcgcccaggctggagtgcagtggtacaatctcagctcactgcaatctccgcctcccaggttcaagtgattctcctgcctcagccttccaagtagctgggattacaggcatgcgccaccatgcctggctactttttgtatttttagtagagacggggtttcaccatgttgcccaggctggtctagaactcctgacctttggtggttcgcccaccttggcctcccaaagtgatgggattacaggcatgagccaccacgctcggctagtctctctacttgggagtctcatagaaatatcagccttaacacatgtgaaactacgtgtatgatcttcctcctcagacccacttctctcagtcttccttctcctaaagctcagactgacaacctcggagtcaccnnnnnnnnnnnnnnnnnnnncccttttttctttttttttttttttaattttcttcaagctccctcaccattgagttttaatccaaagagcatctgcataagagatatgtgttcttggctgggcgcagtggctcatacctgtaatcccagcactttgggaggccaaggcaggtggatcacgaggtcaggagtttgagaccagcctggtcaagatggtgaaaccccgtctccactaaaaatacaaaaatgagccaggcatggtggcgggtgcctgtaatcccagctattcaggaggctgaggcaggagaatcgcttgagcccaggaggcagaggttgcaatgagccaagatcgcgccactgcactccagcctgggcaacagagcaagactccatctcaaaaaaaaaaaaaaaaaaaaaaagagctatgtgttcttataagggtttctgttgttgtttcagcaagctgggattacaggtgtgagccactgtgcctggccccagattttgtttttattgagtgaataacatgtaaaacatcacacaatgaaataatttttataagtggagaatccagatcagtttctagtgccctgtgtgcatatcagtctcgtcaacacgtcaggggcttttcgaactgaaagtaggaatagaacatggtctgtttcacgttgattatttgaatgctgcactattagtcatgcaatgttgtctttcatgtgaaaatgggctacgtgcgagctctcaagcgggctactggtattcttcccacgacagtctcccttgctggcccctgctcttcccctgcctcttcacattgctgtgcccagcatctgcttctcagtccttctcccttcccagtctgtactctcctggtgacctcaactgtctcatggctttaggtataatccatatggcaatgactcacagatatggatctctaagccagacctctctcctgaattccagaaacagcttgctcaaagtctccacttagaaatgtctaaaaacttggctgggcgcggtggcttatgcctgtaatcccagcactttgggaggctgaggcgggcggatcacgaagtcaggagatcgagaccatcctggctaacacggtgaaaccccatctgtactaaaaatacaaaaaattagctggaaatggtggcgggcgcctgtagtcccagctacttgggaggctgaggcaggagaatggcatgaacccagaaggcagagcttgccgtgagccaagatcacaccactgcactccagcctgggcgacagagtgagacgccatctcaaagaaaaaaaaaaaaaaggaaatgtctaaaaaccatctgaaatgatctgaaatgtaacatgtctgaaactgaactccggatctccccaacttaaaaatccacatgtctaggccaagtgaagtggctcacacctaaaatcttagcacttcaggaggccgaggtgggtacttgagcccaggagttggaggccagcctgagcaacatagcgagaccctgcctctaaaaagaattttaaaaaattagccaggcatggtggcgcacacctgtagtcccagctacttgagaggctgaggagggcggatgcttgagcccaagacgctggggctgcagtgagccatgattgcactactgcactccagcctgggcaacagagcaagaccctatctcaaaaaaaaaaaaaatctgcatttccacgacctaggttttcctccactcacctgagggtagctgcatccttcctggtttaggtcaaaaaccctagcatcacccaggtgcagggggatcactggaggtcaagagttcaagaccagctgactaacatggtgaaaccctgtctctactaaaaatacaaaaacattagccaggcgtggtggtgggcgcctgtaatcctacctactcaggaggctaaggcaggagaatcccttgaacccaggaggcagaagttgcagtaagctgagattgtgccactgcactccagcctgggtgacagagcaagactccatctcaaaaaaaaaaaaaaaaaaaccctggtgtcatcatcatctctgtctgccttcttttctcacacactcacactccccagctcaagccatcaggaaatcttgacttctctacagatttatccaggatctgacacttgttatcacctccactgctgccactgtggtccatgtcacatggcctacgtggtccatgatcttttgcctggttatgatgagtctactaactagtttcccttattctacctctatcccctattccctgatttctacagagcagccagattacagtattcctctgttcaaaattccagtgcgtccccatttcattcagagtaaatccaaaaaccttacggtgaaagtcctccaaaaccttgtataatctggttcccacacctttctgacatcatctgttttaactctcttcctcctcctctctgctgtaaccatacagaggcctccttcctgttttttgtacatgccaggcatcccctcacccgagagctattgcgctagcccttccatgtagatatcacctatgtgttcttccccaggctccaagtggctgactccctctcctgcttccagtttctgctcagtgaggcccacctcgtcccttagcccacttagcctgctttgctttttcagttttcctatattactggtaactttctaccattttatatagttttcttgtttagttttgaaaattgacaaaatatgtatttctatattatttgtatataaaattgtatatatttatggtatacatgatgtcttgaaatatgtatacgctgcagaatgcccaaatcaggctaattaacatatgcattactactcaaacttaatattttttttgtgggaagaacattaaaatctactcttctagcaatttagcaacccctcccctcccctccccttccctctttcttgagacagggtctcactctgtcaccctgggtggagtgcagtggcacgatcttggctcacctcccgggctcaagtgaacctcccaccacagcctcccaagtagctgggaccacaggaatgcgctgccacacccggctaatttttgtatcttttgcagagacagaatttcaccatgttgcccatgctggtcttgaacttctaggttcaagcgatcctctgaccgaggcctcccaaagtgctgggattacaggtgtgagcacccggcctggcaattttcaagtatacaatacattgttattaactggagacacaatgttgtacaatagatctcttgaacttatttctcctacaattttgcctcatttgaataacatctccccaaaccttcccagagaaatctgggtattatatttactgcgcattgtctcctgcagcctctcagctagaatgcaagccccttaagggtggagatctttgggttgtgctcactaatgtgtcatagtgcagaacagtgcctggcacatagtaggtgcccagtaaatatttgtagattgtgagtgaatcggtagggtacaggcctaagatatttagccagctttgctttatggggaattatgtgtttgcaccggcctgtgagagctgatgagattttaacaacaaaaagtagaacaacaaggtgccagccgagtttcaatcactagggatgcttgaatgaacgagacacaggaagtgcctgaacctggagtgctcacctttcacagcagaaaacagaactgcatgcaaattagcaaagaattcgagcatttaaagatagcatgtatgactccaaatatgtaaacgcagtgatgtgatagagattgaagtgggggtggttactgagctaggctggtcagggaaaacccatcacttgagaagtgaattacaaaaagaagccagacatgtaaggatgtggggggagagagtgcaaaggtcctgagacgggaacatgtagaaggaatagaaaggccagtgtggctacagaatattcaacagatacttggttgaaatagtaatatgatgttgaaaaatcattgtggcctttgggagagataactatcattaaatattttttttctgcattgcaggggagaatgctaacttattttagacataaacgtgagactttgattcctgtaggtcaggtcttagcatgggccaaatccatccactacttggttttgtaaataaagatttgttggaatgttgccgtgcccatgtgtattgtctatggccacttttgcaaacaattggcaattgagtagttgcaaaagagatgcatttacctgcaagtctgaattttttttttctcttcgagatggagtctcgctctgtcacccaggctgaagtgcagtggtacaatctcagctcactgcaacctccacctccagggttcaagcgattctcctgcctcagcctcctgaacagctgggactacaggcgcacaccaccatgcctggctaatttttgtatttttagtagagacaggatttcaccatattggccaggctggtcctagactcctgaccttgtgatccacctgcctcggcctcccaaagtgctgggattacaggcatgagccaccgcacctggccctgaaatatttactttctggtcctttacagaaaaagtttgccaacccctgaggtcactatctattcaaggtagtataggttgaaattcctaatataatttttttttctgagtctgaacaacctaattttatttatttttgagacagtttctgtcacccaggctggagtgcagtggcatgatctccagtccctttccagaaactatggcccatgacactccattagcagagtaacagggcctgctcaacctcaccctcactgctgctttctgtttccaaaccgatctttgtcaatttgctacttaacaactggtacatctaggtcttaaattgcatttctcttagtatgcatgggggttgaacatcttttgatacatttgagccatttatggttttaaaaaatgaaccattcaagtcttggtctgtttttaattggagctcattgtatatagagggtaactaggtagaaatcatattatacaacaaattgcatatcgtatatatcatatatataaagaaatgaatttaaatttaacagtacaaacgacagtaaagtgaaactgagggatgcgctaagctttaaatattaaactcttaggccaggcacggtggctcatacctgtaatcccagcattttgggaggccgaggtgggcagatgacctgatgttgggagtttgagaccagcctggccaacatggtgaaaccccgtctctctactaaaatcacaaaaattagccgggcgctcctgtcatcccagctactcaggaggcagaggttgcagtgagccaagatgacgccactgcactccagcctgggtgacagactctgtctcaaaaaaataaatattaaactttggtaaaatttatcaaaaagattatgaaaaacttacaggatgtcattattgtgtgtgtgtacttccatgttgaaattctaaacaggctcaattgactcactgctataaaagattaggaaaataatatatacatgttttgctccttcttctagttgagttgtatgactgggttctgaaacccgaggccctcagttgatttgtcgtggttctatatttgaacgtagagtcatctcagcacttctctctacaacagcctctctccttgactcttggcattaaggaagaatattctccccctcgttagagcttgggacgtgttccctgcgttctttcttgcttgaaaatgccaccatactttacagcactttgacttggttgtctctggtcacactttctctctccatgtggctgcatcgtcttttggaggaaaagtctggggccagccagatgtttctctctgtaggcaacatggctgtttctgagtaaaaatatgaataattttagttcatcttagcagtctgataacttcactaagcaatgccttggagttgatcatcctttatcagatagtttttcttagtgctctttcctgtgtaaattctatgcttcatttatttcaggagaaagttctttgattatgtctgaatgttttttctattctacttactgggtcatatacttcagagatatgagttatccttatgtttcatcttattcttatttttatttttttatttttaaaattttttttcttgagatggcatctcgctctgtcacccaggctggagtgcaatggcgtgatctcagctcactgcaagctccacctcccaggttcaagcggttctcctgcctcagcctcccgagtagctgggactacaggcgcccgccaccacgcccagctgatttttacacttttaatagagacggggtttcaccatgttggccaggatggtctcgatctcttgaccttgtgatctgcccacctcggcctcccaaagtgctgggattacaggcgtgagccaccacgcccggcctatctttagatcctttttttttctgattgttttcacattatggttatttcagacctttcctctattaaatttgatatccaccctcatttattgatgggttctatagtggtatattttagtccttagttcatttcctcagctttgtgtcttccttctcattccattttattttatcccatagtattgggattcttgatttattgcctttgtgtttttactaagtttgtctatagtataaataatctgaaggagggtgatttttgcttattttccttatatgttttcttgcagactggattttggatttttcttttgcttctgtattacctgtcatatctttcactttgcttatatttattatttaatttttttttaagacaaagtctcactctgttgcccaggctggaatgcagtggcacgatctcagctcactgcaacctcagcctcccgggttcaagcaattctcctgcctcagcctcccaagtagctgggattacaggcacacaccaccacacctggcgaatttttttttttttttttttttttttgagatggagctttgttcttgttgcccaggctggagtgcaatggcatgatcttggctcactgcaacaccgcctcctgggttgaagcgattctcctgcctcagacttccgagcagctgggattacaggcatgtgccaccacacctggctaattttgtatttttagtagagacggggtttcaccatgttggtcaggctggtctcaaactccttaacctcagttgatccacctgcctcggcctcccagagtgctgggattataggcatgagccaccacacctggcccacggctggctagcttttgtatttttagtagagacagggtcttgccatgttggccaggcttgtctcaaactcctgaccccagttgacctgcccacctcggcctcccaaactgctgagattacaggccaccacccctggccatgttgcttatatttaataggggcagtttagtgaagtggttgagttcagactcaagagtcccaatgcctgggatgtaatcctggttcttccacttaacagccatatgaattgggttaaattactctccttgtttcatgattttcatctgtaaagtgtgaatcatcatcatcatcatcattctcaccttataaggttgctgagtgggcttaataaggtaataaagagcataaaggtcttaggccaacactggcgtgtgtttgtttctaacgtgagccgcaccagtgccctgtctgctctgatggagtgtaggtgagtgttccttgccacacttcgttccatttctggtaccattggtctttccctttgagttccacttgaggctggggtattatatgttctgcttggtttgctgaaggccgaggacaggtgtttatagagtcagggtcgcgaaagggcctggcttcgagactctgagctctgtcatttcttctgaaactttgttagaggttctgttatggggtttacgccattaggtcaaagattgccctaattgtattagtccattttcacgctgctgataaagacatacccgagactgggaagaaaaagaagtttaatttgacttacagttccacatggctggggaggcctcagaatcatggctgggggtgaaaggcacttcttacatggcagcggcaagggaaaatgaggaagaagcaaaatcggaaacccctgataaacctgtcagatcttgtgagacttattcactatcacgagaatagcacgggaaagaccggccccccccatgattcaattacttccccctgggtcccttccactgcatgtgggaattctgggagatacaattcaagttgagatttgggtggggacacagcgaacccacatccctaatcctgtggaatccctgggtttggggcgaacccccagggcactcagcctggaggtctggaaagtggacctccggggggtgagccccggctcctgcccaaggccttgggtggtcagcatagatgtcttcctctcagaatttttctgtcactattccctgagcgcttgcctcccagtttacttctgtctgggctgattttcagggtttgtggacgtatttcccttcctgtgatggggaggaaggagtcagcacccattctaagctgtcccagaattttctgttgctcttcttggtcatcattttctaaagtgtatggactgagattagactcctttcttcattttttttattttttttattttctgctgttaaaattttccctggcttttattttttcaccttttgttgttgggaaagcacaattctctggctggattttattctgccatcttgatccagaaatcttgtggtgagctttaaaaaaataagagtgaaaaaaacacaaaacattcttgggccccaccctagaccttctgttgcagaggctctggaatagggccgagtaagtcatttttaaagccttcctgtggttcttcgaatcagccaggtctaaatccaccatccttataaaagaatgtttattttttcttttaccttttagtcaggctacctgaaaaacaagtcgagattttctacctgaaaacacatcagatttctcagaaagaccccataaatcaaaagtttttttaagtggtttatttgcttgttcatttttgttgttgttgttgtgggtttttttatttgattgttttgttttgagacgaagtcttgctctgtcacccaggctggagtgcagtggcatgatctcggctcactgcaacctccgcctcccaggtttaagcgattctcctgcctcaccctcccaagtagctggggcttcaggtatgtgccaccactcccagctaatttttgcatttttagtagagatggggtttcaccatgttggccaggctggtctcgaactcccgatccacctgcctcggcctcccaaagtgctgggattacaggcatgagccaccgcgcctgaacgaaccgtgttcattttttaaataacggtaatacaaatagggcaaaaaccttgtcccaagagaacagcaatggaaagttgatcttttttttgtagcagttcttgagataaatatcctttgaaatgaagttcactttgagatctctttagcttcttggtttatgctggtatttatagagtgaattatttattagtgcttttaagaagcattttgaatgctatatatgccagtattgtcaaagtgattcccattcatcagaactcgatggtcttttcagtatatcacctacaagggatctaatttaatcctgtttaggatttgactggtaaaagagaactataaagaatactggtttacctggatcaatagattcagagtcacgtaaggcttccttcaactagatataaaacttacatgatttttatggctgctaaggactgaaaggaagctacaaagaaaatgtggatttaacattttggaataatttttatatgaggtgtgaatttagaagtggtattttcaatttgtaagttacaggtaacagaagaaatgattaatatttaaaatcatgcagtagtctgggcacagtggctcatgcctgtaattccagcactttgggaggctgaggtgagaggactgcttgaggctaggagtttgtgaccagcctcagcaacatggcaagactctgtctctacagaaaataataaaaatgagctgggcatggtggtgtgcacctgtagtcctagctacttgggaggctaaggtgggaagatccctggggcccaggagttcgaggcttgcagtgagccatgatcatgccactgcactctagtccgggtgacagaacaagaccctgtctctaaaaaaattaaaataaaaaataaaaatgaattgtaaaataaaccacgcactagaaatatctcacatgcagccactacgcttttccaatactctaatcacccatatgtgctgctctcaatatatttggaaaataacccattgattatgtagtcatctgttttgcgcacatttccctttctttttttctttctttcttttttctttttttgagatggagtctcgctctgttgcccaggctggagtgcagtggcacagtctcagctcactgcaacctctgcctcccaggttcaagccattcccctgccccagcctcccaagtagtttggattacaggcatgcgccaccatgcccagctaatttttgtatttttagtagagacaggatttcaccatgttggtcaggctggtctcgaactcctgaccttgtgatctgcccaccttggcctcccaaagtgctgggattacaggcgtgagccaccgcgcccggccccctttcattcttgatccttgtgatggtgtttttaagaagtgattgtgatcataatccaactcaaagacctgtactgtgcttttaacataaaatatttctcttttttgcattgttttttctacaagggacattctttaaggaaataattgctttttcacattattttgcatctagaattattaaactctgctatgtatcctcagtatcagcagagaaagcatgtcatagttgatatgttgacgtgtatgccaacatgatctcagttttgaattaactacattctttcatcagtcggtctaattataacttttaaactattatatatacatgcctccattttttgaataattgcagcagttaatattctactggatgttatctagtcccacagaatttcaaaacaagaaggacaatggaggtcatgtcgtccaacccctgctgacgtacacattaggaatgggaagcacagactggctcatttgctgaggtcatgctgtccgggcacatggtctcttgattcccagagcaatgccctttgtactgaagccggtggcctctcccgtcatctagtagcatttgttacagatgaaaccacatgtcacttggtatgcaaaacataccatgatcaaaattgtaaattgattatcacatatttttctaggcacatctgtagatttgggggaagtagaagaaataaaagtaacatgtgaaataataaagaggaatagcaacagggaattaacaaggaagtgaggactgagatgctgacacatggagttcctactgtggattactgctcagcatgctctcgctatttcttggccgggtgcagtggcactttggggggccgaggcgggcagatcacctgagctcaggagtttgaggccagcctggccaacgtggtgaaaccccgtctctactaaaaagcacaaaaattatctgggcgtggtggtgtatgcctgcaatcccaggtactcgggaggcgaggcaggagaatcacttgaacccaggaggtggaggttgtagtgagccaagatcatgccactgcactccagcctgggaaacaagagtgaaactctgtctcaaacaaacaaacaagaaaacatgctatggctatttctctttttttttttttttttgagacggagtctcgctctgttgcccaggctggagtgcagtggcgcgatctcagctcactgcaagctccgcctcctggattcatgccattctcctacctcagcctcccgagtagctgggactacaggcgcctgccaccatgcccagctaattttttgtatttttagtagagacggggtttcaccatgttagccaggatggtctcgatctcctgacctcgtgatccacccgcctcagcctcccaaagtgctgggattacaggcatgagccaccgtgcctggctgctatggctatttctctaactatagtcacctaaagtcaggacccaggagaaatcagtcagtagaaccagtgttagtgagggttttttttttttttttctgtgattacctcttagtttttgtgtctatttgtgaatataaagaaaaatatttagattcttaacgtggagatgagattaggaagggaaactaggatgattttggctaatctgaatgtgttcaatgcaaacctgctaggcaggttaaaagtttttctagttaaatgtcttagcatcaacacccccaaaatattgtcttgacttccttcaagaagatttattcacaggtggttttcatgcgctcgctggtagagcagccacacagccttagaaacatgcccttggcactctgattttttttttttttttggagatggagtttcgctcttgttgcccaggctggagtgcaatggtgcgatctcggctcaccgaaacctcctcctcccgggttcaagcgattcttctgcctcagcctcctgagtagctgggattacaggcatgcgccaccatgcccagctaattttgtattttttagtagggacggggtttctccatgttggtcaggccagtctcgaacttccaacctcaggtgatctgtctgccacggcctccaaagtactgggattacaggcgtgagccactgtgcccggccggcactctgatttttaaacatttggacacagttttccttggatttgaagaaataatgccccaactcaggatgaccacgagagaatggtggcctgagaagaaaaacagctcagtgctacaaatgaaagccactgcacagccgggcaccgtggctcacacctgtgatcccagcactttgggaggccaaggcaggcagatcatttgaggtctggagttcgagactagcctgaccaacatgatgacaccccatctctactaaaaatacaaaaaaaattagccagatgtggtggcgtgcacctgtagtcccagctacttgggaggctgaggcaggagaatcgcttgaacccgggaggcagaagttgcaatgagctgagatcacgctaccgcattccagcctgggcaacagaatgagactccgtctcaaaaaaaaagaaagccactgcatatttacacatggtctgtcctctccaattaaataattctgttcttatttgctctgctttgagacaaaagatgaaaagctgtgcacgttcttaataacagtagcttcatcacacatgttgaaagattgaaggaaatggatttcagctgtggactttttttgtttgttttaaacttgtaacaaaagcactaatgttatctttcattcctgatttcttaattctctttctatataaagctgacatgtctgcatttttatttcaggaatctttcaaagaagtaccaacctaaaaagaactcgaaggaggaagaagaatacaagtatgtttaccattgaaaattgtcttgtaatagacacatgccattgatgactacacacggaaaggagaaatacatgtctataaaaataagttgcatttcccattcattttgtgtcagtttttaaattggaggagagaacaataaaaacataattaacttttcttatatggagtcactggacctatgccagattgtttcaattaaagtaattaggaaaactttagaatgtaattaagcaaaaacaggaagtatggaatctgcattctagagttgatttggtttggcactgtcaggagtccctgtcatgctagtcattcatccaagaaatatgtcaatttcagtcagcaattaaggcatcttaacacagaccactcaaatattacatctctaatgtatatctaaatatcctttacattagtacatatagcatgtatatgaattttggattatatcttgactaagtatcaatgaagccaaatattacattatgcggagcggttcagttttgcaaaatgaaaagtgtttcaattgtaattaattctgagccattttgttgagaacacttgatgtgtaatgaatactcaggatcctatgggaggtggatgccaattaacctgattttaattaatattttcttggtgtaaagcagaatatgaatgaatgtggccttgtgtgaaacagagtggcgtgtgttctgttccataggtatacgtcatgtaaagctttcatttccaacctgaacgaaatgaatgattacgcagggcagcatgaagttatctccgagaacatggcatcacagatcattgtggacttggcacgctatgttcaggaactgaaacaggagaggaaatcagtaagcaaaactttattctttttcttcctaaaagatggaccaaacacagtgggaatatccctagaagattaaaattaaataaaaccatataagactatgggtcttaaactcatacctttgagaatcatataaaagttatggaccccagctgggcacggtggctcatgcctgtaatcccaggactttgggaggccgaggcaggcggatcacaaggtgaggagtttgagaccagcctgaccaacatggcgaaaccccatctctactaaaaatacaaaaattagccaggcatggtggcatgtggctgtaatcccagctactcaggaggctgaggcaggagaaacgcttgaacctgggaggcggaggttgcagtgagccgagattttgcacctgtgctccaacctgggcgacagagcaagactccgtctcaaaaagaaaaaaaaaaagaaaaaaagttacagaccctgttcctagaaagtgtttctaggtctctacgtaaaatgtcaagggtccttcagacactctgaaactcatctgtggacccatattcaaaggaatatgcatccctttgaggaatttaaatatatttcagggtatcagacatttaaaaaacaagtaagtaatataatatggtgtatgctctgtggaataaatggtattaaaattagtacttatcagtcgggcatggtggctcacgcctgtaatcccagcactttgggaagcctaggcagatggatcacctgagctaaggagttcgcgatcaggctggtcaacatggtgaaaccccttctctactaaaaatataaaaactagctgggcgtggtgacgggtacccataaccccagctacttgggggtctgaagcacgagaattgcttgaacccaggaggtggaggttgcagtgagccgagatctcgccattgcactccagcctgggtgacaagagcaaaactccacctcaaaaagaaaaaaaaaaaaaaaaaattagtgcttgtaagtaggtcaaaaaaatggaaagatgtccccagttacatccattcttttcctcagctcattcattgctatctaatgaagcaaaccttattgttcctcttgccaccattatcgtcttttcataaataggttttgttggtaaccaaagagaaaaatggatgctcaaagtctattcttagtcatgattttgtcttaagggatttatctttaagccatggtctgtatcattgtacttcgattgcatgtgaagtgcggaaaaatttgttactagtaataaagtaatcacgttggccagtgataacattttttttttttttgagatggagtttcaccctttggtccaggcccgagtgaagtggtgcgatctggactccctgaaacctccgccccccgggttcaagcgattctcctccctcagtagctgagattacaggtgcccgccaccatgcccagctaattttttgtatttttcgtagagatggggtttcaccatattggtcgggctggtctcaaactcctcagaccaccgtgatctacccgccttggcctcccaaagtgctgggattacaggcgtgagccaccgagcccagccacaacagttcttttaatgccctggggatacatgagccaacaagattactatggcttctgctgaaatggaggagacattaagtaataatgacaaaagtgattatttaattgcaattatggtagttgccacaaagtaagagtagaacgtgctatgagagcatataataggatttctgatatgctcatgctctggggtcaggaagaagcttcccaagggacttcgcagttaaggccttaacaagacttgagggatgattaggacctgcctgggacaagcattcaatagagagcagccagggcgcttgggcaggaaggtgtttgaaaatgtctcaatttagttctttctaaactataaatgtgtagcatatggccttggataggtttaaaagttaggaagagataaatgccttaagatcaacccattggtttaaaacaacaatatgccaataaactgagatgaatcttcatctgttgacattagcacagtggttctcaactagggacagttttactccctactccagccacatttatcagtgtctggagacacttttggttgtctcagggattgtggctaaggggttgctactggtatctagagagaagaggccagggaggcagctaagcctcctacaatatacaggacagctccccaacgaagaatgacctggcccaaaatgtctatagtgctgagagtgagaaaccctgcactggagccctaaattagatgacagtttctgctggaccattcattaaagatttctttagtgacagaaaggatgcagtgaaacagaatactaaggttcagaatgaagtacaaatatctaatataataaaataaataccagaaatcttaacatgatcctggactgcttccctggaccctgaacttcccttgaccttgcaaaggtttatatttttttcctggttgtttcttttgtcaatgctttgtctctctccttttttttttttttttttttttaagatggagtctcactgtgttgcccagactggagtgcagtggcacgatctcgcctaaccacaacctccacctcccaggttcaagcgattctcctgcctcagcctcccaagtagctgggattacaggcacatgccactatatccggctaattttttatatttttggtagagatagggtttcaccatgttggccaggctggtctcgcactcctgacctcaaatgatccacccgtcttggcctcccaaactgctgggattacaagcgtgagccaccgtgccccctcgtattcctttgctgtgttatggtcaagttgttttatattttatttactcactgttaatgatgacttttttatagtctgtcatatctgtatttcggatttagttccttttgttaatcaaaaattacagtaatttatggaataaattataggtggtacagatacacattaaatatcttgcaatacatagtgttccttttattttaagaagaactgcaagtacaggtttctgagtcagatgttctgttgggaggagctgtaaacatcatgctcttttgaaacattctgttattaaattaaaatgacattttagaaaatcatgaaaccttttgaaatattagaacaaatatcagtaagcaaatgtgtgtatttgtgctatttaatttatttatttaattttgtttgagacggagtctcgctctgttgcccgggctggagtgcagttgcacaaactcggcttactgcagcctccgccttctgggttccagtgattctcctgcctcagcctcctgagtatctgggattacaggtaccccctaccatgcccggctgatttttgtatttttagtagagatggagtttcatcatgttggccaggctggtctcgaaatcctgagctcaggtgatccgcctgccttgacctcccaaagtgctgggattacaggcgtgagccactgcacctgacctgtttgtactattttaatataatgcttcatgagcattttttttctttttccttttttctttctttcttttttttttttcttcagggtctcattctgttgcctaggctggagtgcagtggtgcgatcatggctcactgtagcttcaacctcctgaagtcaaatgatcctcctatcttagcttcccaagtagctgggaccacaggcatatgccaccatgctcagccagtttttaaaaattttgtagagacaaggtcttgctgtgttgcccagtctggtctcaaactcctgggttcaggcgattttctcacctcagcctcccaaagtgctgggattataggcataaacccccatgcctggcctgttttttcttttctctacataatcgttgccattattttgaatgagtaaatgatgaattagcattatggtatactaaccactgtaatttaaaaaatgattccaataatattggaggcctggcgtggtggctcacgcctgtagtcccagcacttcgggaggccgagtgtttagcctcatgcttgctatagattataatagctaacctcaatggggactgctggttctccagattttacccaagatatggaccctggagcacaggaaggtgcagtgagctgggtgtgttgctctgttgcagagctggggggtccccaggctgcttccctctcggggcagtgcgtgtttgtaggcatggttttttttccagtgagtttttttcgacataccttcaaggatgctggagtaaacagtatgaacatcctcatctgcagctagtcttagaaaaagagctgtttggctgggcgcggtgactcacgcctgtaatcccagcaattgggaggctgaggcgggcagatcacttgaggtcagaagttcgagaccagcctggcaacgtgatgaaaccccttctctactaaaaatataaaatacattttaaaaaattagctgggcatgatggtgcatgcctgtaatcccagctactcaggaggctgaggtacaagaattgctcgaacctgggaggcggaggttgcagtgagctgagatggcaccactgcactctagcctgggtgacagagtgagaccctgtctcaaaaaaaaaaagaaaaaaaaagaagaggccaggcgcggtggctcatgcctgtaatcccagcactttgggaggccaaggcaggcggatcatgaggtcaggagatcgagaccatcctggccaacacggtgaaacccgtctctactaaaaaaaaaaaaaaaaaattagccgggcatggtggcgggcgcctgtagtcccagctacttgggaggctgaggcaggagaatggcgtgaacccaggaggcggagcttgcagtgagccgagatcgcgccactgcactccagcctgggcgacagagtgagactccgtctcaaaaaaacaaacaaacaaacaaaaaacagaaaagaaaagaagaaaaggagctatttaagaccttctcgtaataaccaacatttctcctttagagcttttacttttggctaccctgacttgacttagtaaacactattttattgtaaggatgattcttaaaacaacagtggaatgctatcatttctgtcttctggtgaggttaattattggcgcacacagcataacagagttagagctcaaatccaggttttctgaggccagactcagtcgccttcccactatgctgtgatgaggggctgacagcatgcttcaggtctgtcttaaaagacagggagaggccacataagttctgtgttcacagagctggagccccctgcttggtggtgggcagcgagaggaaaggatgcaagctttccagccaacaaccctgctcaggattcctggcagccctgccctaggcaggttatgaaaactctatgagcatacacttaggaatctgtaagctgaggctgattatagccaccttaggaagttgtggggacaattatgagaagacaaatatgaacctcccagcacaacgttccagtatactgataaatagatgctgcatatccagtttctcttgctgtaatcattctgttacttaatgcagaatctcatttccatcccagagcttctcgatcagggcttgttacagaaaacggagcacctataatcccagcacattgggaggccaaggtgggcagatcacctgaggccaggagttgaagaccagccttgccaacatggcgaaaccctgtctctactaaaaatacaaaaactatccaggcacagtggcgcgtgcctgtaatcctagctactcgggaagctgaggcaggagaatcacttgaacctgggaggcagaggttgctgtgagcggagatcatgccattgcactttagcctgggtgacagagtgagactccatctcaaaaaaaaaaaaaagaaaaagaaaacggagcatgtttaggccttctgtgagcaggtgtcatacggtagttgttcagtgattttaaaatgacctttctaaaaatgtgtaattgggccaggcacagtggctcacttgaagtggtaatcccagcactctgggaggccgaggcgagtggatcacttgagaccaggagttcgaaaccagcctggccaacatggggaaaccccatctttactaaaaatacaaaaattagctgggcgtggtggcaggcacctggaatcccagctacttgggaggctgaggcaggagaatcgcttgaacccgggaggcagaggttgcagtgagctgagattgtgccactgcactctagcctgggcgaccgagcaagactccatctcgaaaaataaataaataaataaaatgtggaattggttgatggcataggaaacaagaagctgcttttaacattttagacccagctactatttttcgtggctgactagaaataatgccttacttaagtaccatccttaaccatcagcacagtacagattgggccatttgatacagcggcagaatcctggctgcccaaagggatgattttgaatttacaggattactgctggatctcattactgcatatagaaagaatgtccaagttcagtggacaatactggttgaaaattactttttatctacattttgctgtgtttaaatggatgaatctctgacaagggtaagcgtgatgaaaaatggctctctgtgcaaagacgatgtttccttcctttttgttgtacggcattcttgcctttgtagccctaccagctgtttgatctttaagtcttcaaatctaactgtaggatgggcacagtggctcacgcctgtaatcccagcactttgggaggccaaggcaggtggatcacctgaggtcaggagtttgagaccagcctggccgacatggtgaaaccctgtctctgctaaaaatacaaaaattaaccaggcgtggtggcatgtgcctgtagtcccagctactctggaggctgaggcaggagaatcatttgattccaaaaggcagaagttgcagtgagctgagatcgcaccactgcactccagcctgagtgacagagtgagactctgtcttaaaaaaaaacaaaaaacaaaaatctaactgtaaaataggattactacttctacttaagtatctaggagaaaagatgctttttattctgcacatatactgtatttttgtatcacaacgcagttcattttaatgttatgaatatccattgtttttcctgatgaacaaaactgtaggctcattttggtgaaaatgttggtttttaaaaaatgcagattcacggccaggcgcggtggctcacacctgtaatcccagaactttgggaggcggaggtgggcgtatcaaaaggtcaggagttccagaccagcctgaccaacgtggtgaaacgctgtctctactaaaaatagaaaaaaaaaaaattagctgggtgtggtggtgtgcgcctgtaatcccagctactcaggaggctgaggcaggagaattgcttgaacctggaggcggaggttgcagtgagccaagattgcaccactgcactcaagcgtaggtgacagagtgagactccatctcaaaacaaaacaaaacaaaacaaaaagcagattcactaaaaagagaacctttcccccctgcaagaacttagcagtttaggttcttccttgcctgacatctgagcctgcatctgtctctttaggaaaacatgagcagtcctggaagccctggacaaggaggtcctatagcttcttcacctagtgggttccacttagggcaattgcattttcagtgagatgttcgccatctctttagacataatggaatcagtggccagtccttggggtgcatataaaaagaatattactaaaacggaattaaaggacaaaatctcacaatcccttataaatcaaaaatcctcatttttcaaagttttcttcctgatatcatttgcagatatgtataacatttaagaatattggctgggcgcagtgtcttatgcctgtaatcccagcactttgggaggccaaggcgggtggattgcttgaggtggcgagtttgagaccagcctggccaacatggtgaaaccccgtctccactaaaaatacaaaaattagctgggcttggttgtgcatgtctgcaatcccagctactcgggaggctgaggcaggagaattgcttgaatgcaggaggcagaggttgcagtgagccgagaacgcgccactgcactccagcctgggtgacagacaggactcagtctaaaaaaaataataaaataaaaggccaggcgcagtggctcacgcctgtaatcctagcactttgggaggccgaggtagggggatcatgaggtcgggagatcgagaccatcttagctaatatggtgaaaccctgtctctactaaaaatacaaaaaaaaaacaaacccaaaaacttagccaggcgtggtgggaggtgcctgtagtcccagctactcaggaggctgaggcaggagaatggcgtgaacctgggaagcggaacttgcaaggagccgagatcgcgccactgcactccagcctgggccacagagtgagactccacctcaaaaaaaaaaaaaaaaaagttaggaatattaatcctactatagctataatttatattcttcttgattctccatttaatattgtaagcattttccatgtttctacctcaaaaagtatacgtttttgtttttagatttaaaaaaaaatttttttttaattttttttagggacagggctggctatgttgcccaggctggtcttgaactcctgggctcaagcaatcttcccgcgtcggcctttcaaagtgctgggattataggagtgagccgttgtgcctggccaaaagtgtagtttaaataattggaattttttcaaagttattggaagagatattaaaaaagaaagaaaaatatttggaattttagtagctgtgcattgttctaacaaagttataatttgcctaattgtgtattgtttgatttatagggtattaccagtttttgactcatttacttagttagttgtgtaaacaatacagcagtaaactctttacttccaaagctgtttgcattgtgtgtgggctgagattacttccccaaactaaattcccagaagtgagactgtgaggtcaaagcatacatgattaaacatacatgatttatggttcttgataaaactctgataatttatgttcagataattatagtagaattacagatagaattatcaatagatttacagacttatagatagatttccaaatgtcactgaaatgatcaacatgggtgtggaattagcttatctgagatgtgggtaattcagagttgataacacatatattcctccataagaactactgtaaatgtactcttatcagcaacttttgaacattgagtcaagttattgaagaaaagagttttagaggttgtttggtgtagctgcagcctttgagtacgtctgggcttttccacagcgattaccactaatcatatatgagaaatttgtgaagatttatagctccagaaggagaaccaggaggttcttgccaacattttctggaattccaagaaaacttctccctgcaggtggaaaatatggttcattactcacaaagtgttggccagaagcagaatcactttttggcagcagttatctgaagagttctagaggaaacaattatacaatactttcagtgactcactaaaatgtttataaacctcagacctgtatgcttacagactccacattacttagaattgaccatttaaaactactcgcgaggtttctgaaatgtttgaaaatggatactgcactaaaacctataacattcttttcaaagttagatattcaataggtcctatttatggatcttatgaaggggcttaatttcctataagccagttctgcagcatggactgactccaatacatttaggaaaacaaaatgttgttataagagatgacagcaaataggtaaagcttagcatgaaggaaagcaaaaactaaaaggagtttatgtatataatctagctacttacaagtccatttctgattttttttttttttttttttttgagacggagttttgctcttgttgcccaggctggagtgcaatggtgcaatctcggctcactgcaacctctgcctcccagggtcaagcaattttcctgcctcagcctcccccatagctgggattacaggcgcctgccaccacacctagctaatttttgtatttttagtacagacgaggtttcaccatgttgactaggctggtctcaaactcctgacctcaggtgatctgcctgcctcggcctcccaaagtgctgggattacaggcatgagccaccatgcccagccatcttctttgttttgaaagaacatgtaaaagtggcattctgttcattaaaagtgggccctttcaccactgtggttgtttcacctgcaaaaccactggtctggtgacccccccgccaaaaaaaaaaaaaaagttttccagctacctgaaaggctgaggcaggaagattgctcagggccggggagttcaagaccagcctggacaacatagtgagatccaccccccaatctcaaaaaaaaatttctttttaaattttatcattcatgggataacatacttagtaaacaggacactcaaattcttttcttcatttcatgggcttgaaatgtgatcttggattttgtgtttctcctttgcaagctagaattaatgatttccttttcttctgggaattgtgagaattacttgactcacatttcgtatctcacatgattcttgttcggccacctgtttgacatctctccttagatgcctaatacagcatcaccattgcacctttgtcagcagaggactggagtccagcaagtgtgaatgatggctccagagtggtgtagtgcagtgaccctgttagcccaccccaaaacaaactttttttttttctgagacggagtctcactctgtcaccagtctggagtgcagtggcgctatctcggctctctgcaagttccgcctcccggttcaagccattctcctgcctcagcctcccaagtagctgggattacaggcacccgccaccacgcctggctaatttttgtatttttaatagagacgggattttgccatattggccaggctgatcccggagtcctgtcctcagctgatctgcctgcctttgcctcccatagtgctgggatcacaggcgtgagccaccgctcccggccccaaaaccaacttctgatcccccaaagtccttatccatgttccattccagtctgcactccctccagttctcaataaatgggacaccttttcttacactcaggtgctctggccaaacacatagtcacccagagcttttctcttttctcttacacaccatctcttatctgttaacaagtctagctggctctgccttcagtaaatgttctgagtccaagcacttctcacccctcttccacatctaccccagtcctgtgcctcattatctctcatctagaggactctgctgagcctcctaattcatttctctgcttccatgcttaccctgtggccagtggtccaactgtccatctccatgtcagagccaccaccagctctcccttagagagagtgcaagtgtaacagcctccccctgcagcagccagcttgacattgaaataatgtagatcaggccatgtcacttcctttcttttgttgttgttgttgttgttgttgttgttgtttagacggagtctcgctccatcacccagacttggaatgcagtggtgcgatctcagctcactgcaacctccgtcacccaggttcaagcaattctcctgcctcagcctcccaagtagctgggattacaggtgtgtgccactatgcccagctaattttttttgtatttttagtagagacggcatttcatcatgttggccaggctggtctcgaactcctgacctcaaatgatccgcccatctcgacctcccaaagtgctgggattacaggcgtgagccactgcatccggctgtcacttcctttcttaaatcttccaacatgcttaccgtggctggtgaggctgtccatggtcaagcccctgcctgccctccgtccctgtgccctttaccttggtctagtggcactggcatccagctgttcctcaaacagggcaagccccttcacactcagagcatctgcacttgctctgcctgcggcttggagggtattcctcagacccttgtaagttcactcccacgttttatgcaagtctctactcaaatgtcatcccagactgcccttgtctaaaatagctaccttcacctacacccatccctccttattcctttaccctgtttgtcttacttctggatccactcagtttcactgggacaggggactttgttttgtttacacagctttcctcgtgcctggagcagccctgttcacaagtgggcatgtcagtgagcatgggatgatcaccctggcactctatctaaaaatcttattgatgggagattttctgtatcagatgctgcaagtaacagctttatatcctcagaagggatcaggcaagaaaatgagccattccatgagaggaattaagatttcttgattgatttccttccttccttccttccttccttccttccttccttcctccctccctccctccttcccccctccctccctccttccctcccttccctcccttccttcacttccttccctttcttcttttctttttctttctatgtgtgtgtgtgtgtgcgcgcgcgcgcgtgtgtgtgtgtgttttaagagagatggggtttcaccatgttacccaggctggtctcaaactcctggcctcaagcgatccccctgcctcggcctctcaaagtactgggattgcggcctagggatgcgaatttcaaggaatgtgaagacaggattgctttgaaaaacagataaaagatcattgctgcatgtggagccttctgggtgagaataaccgaggaacagtgagcagaggagtagccagagaaggagggagggaaaatgctgctgcttaggcctgaccctggcccattgcctcatgctgctcagtgttacgggtaaagtcaagcaactgagcatgcctctgagaggcaggcatttagaaaacttcgaacacgttcattaagaaggtatttttactatggataaacttggaaaaataagccttgctaagtaaaaatagaatgtgtgtcccttagtgaacgtttctggtttctggtttgggttttaagtggggtacgacatacccacttgaacaggactaaggcgttttgccattacgccacatggtccatagaaatatccacgccgcttagagttctagctcaattaaaactgggagtcctgattcagacttggaagctgctcctgttcaaacccactactacgctgtgagtttagaggaaacaggatttgtcacaggcatgtttgctggaagctccctctttctttgcccttttcaagtctttttgtttctttgtttgcatctgtggaatctgagttttatttaaaattccagatggttgactgttctcagttgagtgtttattcttatgtttttttctactttttttttttttgaaagggctgttctcacatcagtgccatattttgctcttttaactgttaatggtttaatatctatataaatagcaaaaatgagcagctgttgtacctaattgcagtgtgaatactaaacattctcatagcatttgtgtgagtttgtctgttctgtctgtgatttcttgcagttcagtaaaattgtctcaaaagctttgccattgtcgtttttcttaaagttaatgcttgcttattttagattctctgtgatttttttttttttttaatctcagccacctctgttcactgggaaatttctttaaaaaatttgaagggtgatttgatctgtgtagacttttatttcaactaaaaagttgaaataagtaagtgtagctgtcaccccagaaactattagggtttgggtttttttgtttgtttgtttgttttagcttattattatgttttaaaagaaactaaaagcatcttatgacagcagaaagtaagaagcatttctctgggtctctagagatggcatttcctgtctcttttctgataggagagaaaggagctgtgatgacttcattctatggctccaaaagaagcactttttatctttgtccggagaacaattcctccttctttagtgcttgcaggcacactttttagacacacacttgctcactgtccagaaaagaaatgttcggccattgttggtaaacaacaaatacatctggcaaagctggtttatttgtttaactttgtaactgttaaaatagcttttccggtgaaagcagcgaagatagagctagaaacaaaccccagctattcaggtcatggtaggcacagagcacaaaggagggcttttgttccctcccttaatttcctgaaggatcccccagcacggatagtttttcgtatgttatggccaaataaatgatagagggacaggtactgtgaaaaaggctggggctgggcatggtggctcatgcctgtaatcccagcactttcggagtctgaggcaggcatatcacttgaggtcaggggttcgaggatagcctggtcaacatggtgaaaccctgtctctactaaaaacacaaaaattagccgggcgtggtggcgcgtgcctgtagtcccagctactcaggaggctgaggcaggagaattgcttgaacccaggaggcggaagttgcagtgagtcgagattgtgccactgcactccagcatgggtgacagagacttgttttttttaaaaaaaaaaaaaaaaaaaggctggaaggaaggaagatgggcatcacccacaatctcctaagccccatgaaatggtacgatgataattgcagttttcaggtagtggtttaataatgtggggagaggtgtggctgagcagtcttcatgagagataacttaccagtaaattcaaggtgcacaccgtgccttaaacacaaatgcatatttattatatatttacactaaggagtggcaagggaaccactctatggatttttcaatcaaaatcatccctcgtgtttttaaaataagacttttttttttaagactcttgtcttcagagatttattttatatgaaagtcaggtgacatgtcccaggcaatgcctgtcattgtctgctgggcttctgtgcatttcctgtctccacccacagcattgccccaagctggagggagctttcactttgttaaaacattcactttcagaggtgctggagagatagatcgtcaacctcgagtacagctctgaattggtgctggggttttctctttttgttcctgtctttgaatctcaaagtaaaacttttgggagcggctgcatctcttcagcaaactgcgtaactcggtgctccggcttaggaaatgggatctttctcttcgcagagaagtcacccgataaagactttcaggaccagaggtgccttccaaaaagggcacagttgagcccagatggtttgaaattgacgctctggtctctggggggtcctccctgaaagcgtggctttcagaaaacccgcttgtattttctatacgttctccactaaggtccagagtttccctaaccctgtccttggctctacttcttaattctcccacagcctggatcccttcttttctgttctatccttatgtccattacaagagctgaaaaacgaagccccaaggggctccccctgggtttgcagagaccaaaaaattgctggatagataaaactgactgcaaagaggcgcttaaaacagtgaaactcgacctcaaaagagagacaagaaaacattcccttataaaggagcactgttctaaatctgatgttgtctctgccttcccagcctttccagttgtcagctccattttctgactccgctaaatcctaggttctgacgaggtacgggaaaagctccgaggctctacctagtggacctctttgtttttatccttccttcacctgaccttctctgcagtgcacccctaacaccaatgcttaccttgtgagccagaaaacagacagcacattcaaactcagtaattgaaggaaggtcggttattaaaaggagcatttacaacgtggcggatagagtttaggaaaagcagtgaggatggttcagtaccctggagcaagtcacagtggggagctgatgttgcccccaggcctcacagggctggaggagccttccaggaatttcacagatgaggaacttctgaggttagctgcatgcggggcactgcctgactggagctgtgccctttggtccaaggacccagccaacctgtatcatctcagtgaggagaagctgcaggtacagtttcctgccctctgatcactcagaacatccttgtggcaaatctcatcagaaccagagggcaagggttcatgagatccctgcatgtcagtctctggggacccagacagggtggagaatgcacctgggaaatttgcaggacattgaccaagtcagcgatggtacagtgtggaaggatactaaaagatttaggggccgggcacggtggctcacgcctgtaatcccagcactttgggaggccgaggcaagcggatcacttgaggccgggagttcgagaccagcctggccaacatggtgaaaccctgtctctactaaaaatacaaaaaattagctgggcgtggtgggtcgcacctgtattcccagctaccagggaggctgaggcaggagaatcacttgaacccgggaggcagaggtcacagggaggcagaggtctcagtgaaccgagatcacgccactgtcctccagcctgggcaacggaacaagactccgtctcaaaaaataaaatatataaaggatttagggaactggtgattttaggtcactgaacaaaaaaaagacaccattctcttaacatttctgcatatttctagcacttccttccttgggatctttgtcttctttggtctcctggctttaactatccactttatactgaagactcccaaactggtctttagtacagaccgctccctaagctcagatccacaagtccaagtacatattagtctctctacttgtttgtttgtttgtttttcgggggtttttttgagatggagtctctatctgtcacccaggctggagtacaatggtactatctcggctcaccgcaacctccgcctcccagttcaagtgattctcctgcctcagcctcccgagtagctgggattacaggcatgcgccaccatgcctggctactttttgtatttttagtagagacggggtttcaccatgttgcccaggctggtctagaactcctgacctttggtggttcgcccaccttggcctcccaaagtgatgggattacaggcatgagccaccacgctcggctagtctctctacttgggagtctcatagaaatatcagccttaacacatgtgaaactacgtgtatgatcttcctcctcagacccacttctctcagtcttccctctcctaaagctcagactgacaacctcggagtcaccctgggcagctcattattgcacatctcatcttatctcccagaaaatcctggaagtttgggtgatcaaaaggtgcccaaaacctgacccctctcaccacctgcactgctcgctacctacaacctgtccaagttgcagtaatctccaggattgttacaaaagcctcccaccatctgaaatctttccttcacaacatcttagagttactcatcgactctggttcattcaggcaaaaaagcctacaagaccctatacaactccctctttcttctctgacctcatatgatattctccccgaggctcctccagatctggccgccaggttaacaccacaccagagcctgcctcagggcctttgcagatggccaggagggaaatttatctttatatttaaaataatctaataatgaaaacagccatgcacacaaaacactcaaaactcttactcaagtgtttatagcagcaattttctttttctttttctttttctttttctttttttttttttttttttgagatggagtcttgatctgtcacccaggctggagtacagcagcgcgatctcggctcagtgcagtgcaacctccagccccctaggttttaagcaattatcctgcctaagcctccggagtagctgagattacaggtgcacgccaccacgcccggccagtttttgtatttttagtagagacagggtttcaccatgttggccaggctagtctcaaactcctgacctcatgatccgcccacctctgcctcccaaagtgctggcctggccgcatttttcataatagcccaaacctagaaacaactctgatgtctatcaactgttgaatggataaacaaaatgtgggatagccacatgatggaataatcatttggcaataaaaaagaatggagtactgatacatgtgacaatgtcgaccttgaaatcatgcgaagtggatatgaggagataatgaacacatcccagttaccaaaggcctcagaccatgtctccattcataggaaacagccagaataaacaaatccacagacagaaacaggctccctagggctgaggaagatggagggtgacggctagtgggtacaggtttcttttaggggtgataaaaatattctaaaattggtcgtggtgatggttgtacagttttgtgaattgcttagtttaaatggtaaatcagatcatatctgaatcatatctcgaagcagttaaaaaagatgaagcgatcgctgtcttaaaacattcctgtcgtttttccaagtggcatatatgtcttcaaattttattttatttttttattttttgagaccgagtcttgctctgttgcccagagctggagtgcattagcacgatctcagctcactgcaacctctgcctcccaggttcaagcaattctcctgcctcagcctcccaagtagctgggattacaggcacgcaccaccacgcctggctgatttttgtctttttagtagagatggggtttcaccatattggccaggctggtcttgaactcctgacctcatgatccacccacttcagcctcccaaagtgctgggattacaggtgtgagccaccgtccagcctattttatttttttgagatggggtctcattctgtcactcaggctggagtgcagtggcacgatcacggctcactgcggcctcaacctcccaggcttaggtgagcttccaacctcagcctcccaagtaactgactacaggtgtgctcaccaccatgcctggcctgtcttcaaattttatacagttgtacctaaagctgtaaagggaactctgtgactgctttttttccccccaagtgaaacttgtttcatctgtgatgactattcttgttttcgtttccacattaagctttttattcccttttccttttttttttttttttttttttgaggcagagtttcactgtgtcatccaggctggagtgcagtggtgcaatcacagctcaatgtggcagtgtcaacctccctggacttaggtgatcctcccacctcagcctccagagtagctgggactatcagtgtgtgccaccacatccagctaatttttctatttttttgtagagtggggggtctcactgtgttgcccaggctgtcttgaactccttggctcaagcgattcttcttcctcagcctcccagggttctgggattacagatgtgagccaccgcacccggctacccctttcaactcttaaatttctttggagcatacatactagaggttcaatatttagatgttgtttaagtggatgaaaatgtttcctcctgggttcataagagaagcagagggtactaatcaccagtgtgttttcccctttgcagaactttcacgatggccgtaaagcacagcagcacatcgagacttgctggaagcagcttgaatctgtaagtgaacaatgcacagcaaaagaaacggctttatagattttttttttctttttttttgagacggaggctccctctgttgcccaggttggagtgcaatggtgcgatctcggctcactgtaacctctgcttcccaggttcaagtgattctcctgcctcagcctcccaagtagctaagattacaggcacacgtcaccatgcccggctaatttttgtatttttggtagagatggggttttgccatgttggccagggtggtcttgaactcctgccctgaagtgattcgcccacctcggcctcccaaagttctgggattacaggcgtgagccactgcacccagcctaggaaatgtctttatagattttccagtttcaatttaatttaagcttgagtcaatcagaaagtaaaaaacatgcacataaaaacactaatgaaacatctttatagatttttctcatttaatttgtttctagaaccattatctaaagttgagccaaaagagctcaagttgagtatttttctaaaagtcacgtggaaataataaagattagacagttttgatggaaataaatgcagattttaaaataacttctagaaattatgacatataagaaatcaattcagagaagagtattcttgggccagacacattggctcacgcctgtaatcccagcaatttgggaggcagaggcgggaggattgcttgagctcagaagctcaagaccagcatgggcaacatgacaaaacctagtctctacaaaaaaatgcaaaaattagctgggcatggtggtgcatgcctgtagtcacagcagctagtgaggctgaggtgggaggatcacctgagccgggaaggtcaaagctgcagtgagccaagatggcgccactgcactccagcctgggtgacaaagtgagaccctgactgaagaaaaaaaaaagaaaaagaacaatgctctttgggagctttagataaaattacatcttctcgtaggactcttatggtttcataattattttcctctgattttagagtaaaaggcgatttgaacgcgattgcaaagaggcggacagggcgcagcagtactttgagaaaatggacgctgacatcaatgtcacaaaagcggatgttgaaaaggtgaggtgaaagctcaagtgtgggccgggcacggtggctcacgcctgtaatcccagcactttgggaggctgaggtgagcggatcacctgaggccaggagttcgagaccagcctggccaagatggtgaaaccccatctctacgaaaaacacaaaaattagctgagtgcagtggcaggcacctataatcccaactactagggaggctgaggcaggagaatcgcttgagcacaggaggcgttggctgcagtgagccaagatcacgccactgcactccagcctgggtaacaagagcgaaactatcgccaaaaaaaaaaaaaagacaaaagaaagctcaagtgtgtctttcatttcccctgtgagtgttcatcaccgaccacccatccccaagttctcatttctaatgtagccacaaaaggcgctacatggggaatcattttcattttgtgtcaaccattgtggggaccagaagctcaagtgtggggaatcttcggtgttagaatttgagacgttttatctgttgagtcaccagggtgataaagtggagacttagactatgaacagtctgggaacaacgttccagaaggttgtggctcttaatggcttttcaaagagaaagtcaatttcttgagagccggaggagacaggacagggccatctggaagagcttggctgcttataatggttcctttagagcaatagtctcactgcttgcctgacttctaattgattcctcctggttgataacagtgaggttgtagttgaagccttgcatatttcagtcctctcaaaagcttttctctaaatggacttgtattgccaactagaaatattataaagtgtatactgtttctcattgtggctcaatatgcgttttttccctagaagctgaattttatttttattaaagtcatcaatacaatgtaaacaaaattaggcttttacataacaaggactcattcatgatgcccatggttgtttgggcattcatagcttcatgctgtatgtgggtgaaagcactgagtttttatagatttgttgagcttttgacagatcagttagagttgagtttagttgggaaatggtgtgaactattatttgccaaattctgccaaattccttgcttaaagactaggtatacgttaatattagtatgcctttctctaaaattattaaatatattaaaatacatattcttgccaggtgctgtggcacatacccctagactcagctacttaggagactgaagcaagaggattgcttgagcccaggagtccagactgggcaacataacgagaccccatctcaggagcaggggagtgttctcaatatctgtatttgatctcaaaatggagatacttactttaccaaaagacattaatttgctgctaaagttaaatatttaaaatgttattcaattaaaataagttagattagcccaaagtttcaaaagatattttatgttgaatgaggcaaatcagtgtatgtatcattcatatatgtgtgtgtgtgtgtgtgtgtgtgtgtgcgcgctaaaagaagtatatatgtatatattttagagataccgagatatggtctctttttattttattttttatgtttatttatttatttttattttttattttattttattttttgagacagagtctcgctgtatcgcctaggctggagtgcagtggtgtgatcttggctaacaacaacctctgtcttcagggctcaagtgatcctcctgcctcagcctcctgagtagctgggactacaggagcccaccacaccctgctaatgaccctgtctctaaataaataattttttttttttttttggtgtggtgtatgggctcatgcctataatcccagcactttgggaggccaaggtgagcagattgtttgagtccaggagttcagatccagcctgggcaacatggtgagaccctttctccataaaaaatacagaaaaattagtggagcatggtagcccatgcctgtggtcccagctactccggaggccaaggtgggaggattgctcggtcctgggaggcagagtttgcagtgagccacaatcctgctgctgcactccagcctggatgacagagccagaccccgtctcaaaaaaaaaagcactcagcctctaaactgtcatttcatttctgtttttttctgtagagatggtcatatcagcagcaagtaatgatagttgcatttcttttccaatcttcatgccttttgttaattttttcttatcttaactctgctggttatgccctctgttttgctgagtcatcattgtggacttcctcagcttgttcctgattgcaaagagagtgcttcaaaaggttccccattaagaatgatttttttttttttgagacgaagtttcactcttgttgcccaggctggagtgcactagcgcaatctcggttcattgcaatctccacctcctgggttcaagtgattctcctgcttcagcctcccaaattgctgggattacaggcgtcaccacgcccagctaattttttgtatttttggtagagatggggtttcaccacgttggccaggctggtctcaaactcctgacctcaggtgatccaccagcctcggcctcccaaagtgctgggattacaggcatgagccactgcgccagccaagaatgattttaatataccctttattggttaaacaattttccttttcctgtgttgccaagagcttttttttaagcttgacttattattgaatatcattaaatatttgttttgcttcctttaattcattaacgtggtcaattacattaatcagttttttttacattgagccaaattagtgttcctgggacaaattcaactagattatgatgtattatgtttttatgtgtagctgaatttattaatattttatttaagatttttcattgaaatggtctgtattcattgaaattgatctataattttcctttcttgtctgttctactttgcattacttatgagttttggagtgtttgctcttttttctgaaataatatatgtaaaattaaactcactatcccttaaatgttttatgatacttctttgcgtaaatcagttacaaactacggattccatattttattgtctacttctgggttgatcctagtgggttacctttttatagtaatatatccatttcatcataaattttcaaatttattggcaaaaagttgcccataatatgttctcaccttaatttttgctgcatatatctcccctatttactcctaataccttttttaatacttttttctttttttctggatacgttttttaagaaattatttatgcttattttattatattattattttttgtatatagagatgggatctcactatgttgcccaggttggcctcagcctcagcctcctaaagtattaggattatgggcatgaaccactgtgcccagccttaaaatcattgttactagtatcagattttatctttgtggagcctcccttttctatttttattttctatttatttaacttcttcccccaccacccccattcccctccttctccttctatcattacctttggatttattccattacccttttaaaaagttctttctttagatgcttacctcagtctttcttcttctccattataaacattaagattacagacttcccacttaagtactgttttctctgtatcccacatattttggtatgtggtattattaatgttgtccatttccagatatttgtcctttcttttactgtttaatctctcacctatgatcaatttagaagcatggttttaaatttccaaatgtatgacatatttcaacttttgttacagatatttatttatttatttatttatttattttttctgagacgtagtctcattctgtcacccaggctggagtgcggtggtgctatcttggctcattgcaacctctgcctcccgggttcaagcagttctcctgcctcagcctccctagtcctgggattacaggtgtgtaccaccacgcccggataattttttgtgtgtatttttaggagagacagggtcttaccatgttggccaggctggtctcaaactcctgacctgaagtgatctgcccgcctcagcctcccaaagtgctgcgattacaggcgtgagccaccatacctggcaagatttctaactaaattgcattatggtcctgggaaatctgtatgagtttgagtcttctctatttgttgagattcgttttatagcctagtacacagtcagtttttagaaatattctgtaagtaattgaaaataatatgtattctctagtatttttattaggccaaacttactgttttatccaaatattcctatcattaaggattttgtttttcaacttgttctaacactttctgagaaaaatgtgtaacatccttatgtcttaatttccttgtctataaaatagggacactgaggaacaggattgatgcgaatattaactgagttaatatgtaaaaggtgcacaaaaccatttatgggatgttgccagtgatctacaactattacagtgataatggtagaggattattgatgttctgtctattttactcttttattatggagttattctattaaacaaatgaagtttagaattgtaatatgttcaagtgatttcatttttcatcaataaaaagtggccccctttcccagtcaagcttaatcccctaaagtctattttacctgatgtaaaccagatatctttaagttaacattgcctggcagatctttcccatactttgactttatacttttctttgtcctcatatttacatgtgtcttttgcaaatggcatgtggctggtttctggttttttgtttgtttttttctgttttttgagtctcactctgtcgcccaggctagagtgcagtggcatgatctccactcacttcaacctccacctcccaggttcaagcgattcccctgcctcagcctcccaagtagctgagattaaggtgcctgccaccacacccggctaatcttcatgtttttagtagagacgaggtttcaccatattgccaggctggtctcgaacccctgacctcaggtaatctgcccacctcagcctccgaaagtgctaggattacaggcatgagccaccgcacctggcctgttttttgttttgtttttttgttttgaaatagagtctcgctctgttgcccaggctggagtgcagtggtgtaatctcagctcatcgcaacctgtgcctcccgggttcaaaccgttctcatgcctcagtctcctgagtagctgagattacaggtatgagccaccacacctggctaatttttgtgtttttagcagagatggggtttcaccatgttggccaggctggtctcgaactcctgccttcaggtgatcctcccgcctcggcctcccaaagggctgggattacaggtgtgagccaccacacccagccttagcttgtttgtcatgcttttcacggtattgttcaagttcactgttaaaagaaagcttactgtgattgcatccaaacctgaagatgctgtgtaaaactgcaagatagaccagcaagacttctgggttatactaaaataattcccccatataagaagtcatataaagctgggtatagtggctcatgcctgtaatcccagccctttggaaggccaaggcgggaggatcgcttaagcccaggagtttgagacaagcctgggcaacatggtgagaccttgtctctacaaaaagttttttaaaaattagcctagcatggtggtgtgcccttggagtcccacctactctggagggtgaaatgcgaggatcacttgaacttaagaagcagaggtttcagtgagccaagattgcaccactgcactccagcctaggtgacatagcaagatcctgtctcaaacaaacaaacaaacaaataaataaataaataaataaatagaaattatataagaaggtacaagtcacctgggcatgatggctcacacctgtcatcctagcactttgggaggctgaggcaggaagagtgctggaggctaggagttcaagaccagcctgggcaacatacagaaacccagtttctacaaaataatcaaaaaattggaccgggcatggtggctcacgcatgtgatgccagcactatgggaggccgaggcaggtggatcacctgagatcaggggtttgagaccagcctagccaacatggtgaaacttcatctctacaaaaaatacaaaagttagccaggcatgatagcatgtgcctgtaatcccagctactcgagaatcgcttgaacccaggaggtggaggttgcagtgagccgagatcgcacggctgcactccagcctgggtgacagagggagactcagtctcaaaaaaaaaaaaaaaaaaaaaattaaaaattagctgagcgtgatggtttgcacctgtaatcccagctacttaggaggctgaggtgggaggatcgcttgagctctggaggtggaggctgcagtgatcagtgatcgcaccactgcactccagcctgggtgacagagcaagaccctgtctcaaaaaaaagaaaaaggtacaagtcgtagtagagaaaactgtgaggttcagagcagactgtgtgtaattatgaatgtgtgtttcgtggatctttaatctatggtgatggaggcctagacttaaagtgggttctcccgaagcgggcattacctgggttcattaccaagctgcattaatgtcagttttcaacttagggtttggactccacacatgctctgagttctggctgtttgtggttcagaaatttccaggatgacttttttctttgtttttctccctgaggccagatccaaggcagttttaacttttaaaaagtgcacttgctgaatccaaaggtgattttaggacttttaacttgtgctgccaaattgaattgctatcctcaactatttgaatatttccaaagatctagtactttttcttacactgggagcatcgttttgctatttttatgaaagtgccacttacctcctttccaaggatatgatgaattacccaattttggcatcacaaacattgaagctgagggagcagcaatgtctaaacattgaaattcttaagttattttgctttggatttgacttgaaacactgtaatttcccaaaacacccagtactttgactgttctatcagttttttactttgttgcctgtgaaggcttatgtcagcgtcaagctaactggaggcagttttagttcttatcattatttaatgtcatctcccattatgatttctgacagtctctgaatctaacataaatgtttctcccccagttcccgcaaatgattaaattatctaattgtattcaaagcagcgcatcctcctttttttctagcagccagccacacagcactgggaacggtaagcctgtgcttacaaaagccttatttgtacatgtgaactttgtcttgtgcttgatacaattgatatgaactataagcatacgttcattttttaaactacctaggatcctgggtataagcctgattttcttttctttttgagagttaatgcccagatatggattgaaaccacattttgaaaccacatttttattagcactgtgttcactgtttttttttttgttttgtttgtttgtttgtttttactttttgtggtgatcgaggttttgctatgttgcccaggcaggtctcagactcttgggctcaagctatcctcacacctctgcttccctaagtctggcaatgcaggtgtgagccaatgtgcctggccagcactgtgttcaaatcacctccattcatccacatccatgctcagacttcggtacgctttggcattgtgttagatgccagcgtgtgaccagatgtttagtagttcccttataagacagtatatgtcatccttaaggcacccagtttaattaaaagtaagtttacagtataaagtagatataagaaaaagctagcagtttttatctctgggcaagagtgcagatttggatgccatgaggatgccatgttccttagaggaaaaatgaagagaggaaatcagcttaattgaacaatttttattggcagggaaaactcaaggaaccatgcagtctctttttcttctttgacattttgcagctgtcatagagttttgaacttgaaggctttgaatgagctcgagtgatttggaattagttaatctgggtttgtacaagaagcagtacatgttgggataggtcatcctgcagctcatgacccctgtgtttcagctgaaggtgaaacaggctcccctgctgccctttcaacgaggtggactagacatccttactctctgttttgggatattgagagggaaactgcaaaggaacatgggaaaattataccatgtccgcatcttactcttgtaaaaaaaaattaattaaaacaccgagataaagtattctttgccattcttctcagaggtagttactcttaaccccttgaggtatgtccttctgaacccttttaaaacagctgttttgggccaggcatagtgactcacgcctgtaatcccagcactttgagaggctgaggctggcggatcacttgaggtcaggagttcaagaccagctggccaaatggtgaaactctgtctctactaaaaatacaaaaattagccgggcatggtggcacgtgcctgtaatcccagctattcgggaggctaaggcaggagaatcgcttgaacccaggaagtggaggttgcagtgagctgagatcatgccattgcactccagcctgggggacaagagcaaaactccgtcttgaaaaaaaaataccaaaaatacaaaaaatgagctgaatgtggtggctcatgcctgtaatcccacttactcaggaggcggaggcagaagagtctcttgaacctgggacggggaggttgcagtgagccgagatcacgccactgcactccagcctgagggacagagcaaaagtccatctcaaaaaaaaaaaaaaaaaaaaaaaaaagacaccaaaataggtgttttgtatgagcaatagcacagacaaataaattaaattaaataggtattttgtttgtttgtttgttgagacagggtctctccctttgttgctcaggctggagtgcagtagtgtgatcaaaacttattgcagcctcaacctcgtggattcaagtgatcctcctgcctcagcctcccaagtagctgagaccacaggggcatgccaccatgcacagcgtagagacggggtctccctatgtgttcccaggctggtcttgaactcctagcctcaagtgatcctcctgcctcagcttcacaaagtgctgagattataggtgtgagccaccacacctgcccccctccttttttttttttttttaaatttaagggaattctagtagaattatgacttcatggacttatcttttaaaaaatgcaactcagccaagtgcagtggctccctcctgaaatcccagcactttgggaggctgaggcacgcagattacctgaggttgggagttcgagaccagcctgaccaacatggagaaaccctgtctctactaaaaatacaaaattagccaggtgtggtggcgcatgcctgtaatgtcagctactcgggagactgaggcaggagaatcgcttgaacccgggaggcagaggttgcagtgagccgagatcacgccattttactccagcctgggcagcaagagcaaaactccacctcaaaaaaaaaaaagtaactcactggtgggattcctaagtcgtgaagtattcacatgtatccattcattcccttgcccgttgttcactgactatctactggcaaggtatgcgggtatagatgccagcacataatcacacgatccttgactctgaggaacttgccttttgttttttctttttttcttttcttttttttttttgagacggagttttactcttgttgcccaggctggagtgcaatggcgcgatctctgctcactgcaacctctgcctcctgggttcaagcaattctcctttctcagcctcccaaatagctaagattacaggcgcctgccaccacacccggctaatgtttgtattttagtagagacgggatttcaccatgttggtcagactggtctcgatctcctgacctcaggtgatccacccaccttggcctcccaaagtgctgggattacaggcgtgagccaccgtgcccagcctgttttctttctaatgtttggtttactgtattgtgaattttcccacttgcccacccaaacaactcttgaatggcattctggtgacaaagactttaaaatcacggtttgtctgtcactctgctttgaaataacaccatgctatacaaacttggatgagaggctacacctaatctttgtgttctgatagtgtagcaatgggtttagtgtggtattgggatgagaaaggaaaaggttatcaaaatgagtggaatgtgaactaatatttctgaacagagagaacagtgttttctaaatgcatgcattaaactgagttcatccatgtcaggcaatgaataattccctttttctaattctcccttgccttatgactgttggctcttacataatttctaaatgcaaaataggatattgtctaacagaatctgcagttagtggttacaaacagctgcagaaattgttagttaagttcaagttatgttttttaaacgccagtaacaatttcttccttttcttatcggtctagtttcatttaacttgtatggttctttttctgctagagtctcaatttatgagccgatgttttccaccaaaagttaatggtgcctcttcattctaattcattgcaattaattctgagtactggatggccagaagagctctctatacagtgcgagaggtttccttatttctgactaattaggagtttttattatataacccgatttgaggaaatgctttaaaacttaagttaaaatctgaccatgagcactgaacagtgtatcagtttctttgggagtttgccttccattttttgtatacagacttctcgaagtatttggctttgaatatgattaactttttaattctacatatagatgtccctgttgtgaagcagaataggaaatcctgagttatttatgaattaaagtagaattctgtgatgtaaattataaaaaataaaatttcatttctggttttttgtttttttttgaaacagagtattggtctgtcgctcaggatggagtgcagtggcaccgtctcagctcactgcaacttccacctcctgggttcaagtgattctcgtgcctcagcctcctgagtagctgggactacaggcgtacgccactacacccggctaattttttgtatttttagtagagataggctttcaccacattgcccatggtggtcttgaacttctgggctcaagtgatccgtctgccttggcctcccacagtgctgggattacaggtgtgagccaccatgcccagccacatgtaatttttaatgtgttatatattctataatagaatattttaaagagaaaaagaaagttatagataggaatctgtcaattttaagcaagaatgaaggagtttactttaaatgatgatcagtttgataattatcttaagaaaacaaacgaaatttagtagtttaggttttcttcggttggaatcagtgttgccaactctgtgaagccaacaggatggagttggctctattctaagtgaagccagctgcgtagcagagtgttaaatttttttaccatttggggaaacagtctctagcacaatgaccactttagttattgtacatataaggaattgtactattgaatattttggttaccattgctgtagtactaggttgacatctttatggaacatgttaatatcttcagtgccttccccacgtttctgtttcttctaaaatgtctgactgtagtcatctgaaggaattgttcactataacaatttagagaacatttttttttaaaaaggaagtggttagtataaatgcaggaaataaattttgcaactgcagcttaatctttttaggcttaaaaaagtttcaaatgctttttattgcaaagaagagaaaagtataaagaattttattataagtattaccaaaaatggatattgttgctataactgttcttttataagtggatcaaggttcaaatgaaagattctagaaaagacacgtttattattctcttctttatgtctgtggagtttatatttactcctaaaagcataattattaacaagcctataagttaatgtacaaaatagcaatcaagcagcatcgttctcataccctagatctgaagatagaaatgaagaaatgaattccctgaatatatatgtatttatttatgtgtgtgtgtgtgtgtttagcttcaacacttggcacttagtatgtggcctgaactgttctaaaggcttttgtatggtaagtcatttaataaggtattttaattttcaatgatagtaaatggcctagcccatggctaagagcttgttcctgatctttgtattacgtggaagtgggttcaaatcttgtttctgtcgcttacaaatggcatgacatgtggcaacttacttcatctctggttcctgttctgtaagtaaggatgcatatgcacctcaagggctgggtgtgaggtttcagtgggtgtgatgtatgtgtagtggcctatttttgaactgcaattgattggctgacactgttattgccatctgtattttgcctgtatccttctccttgcattatttctgcctccttcctcctcatctcttaccctttagtctactttttttttttttttttgagacgcagtctcgctctgttgccaggctggagtgcgggggcatgatctcggctcactgcaacctctgcctcccgggttcaagcaattctcctgcctcagcgtcccaagtagctgggactacaggcgcccaccacgacgcccagctaatttttgtatttttagtagagacagggtttctccaggttggcctggatggtctcgatctcttgacctcgtgatcctcctgcctcagcctcccaaagtgctgggattacaggcatgagctaccgcacccggccatatttttaacattctaggcattctgggcatctagacattcaacaagaatatttatttgacaaagagtgtgaaacaccagtaggactgtaatagatacctttcatgaagtccccagttagcagactggagagagaaggatgagagaagcatgagacggagagagaaggaaaacttgagtcagttggggaataaggtagagtatgatatgtagcatgccaacttgtgtgaagatcatcagaacgatagcaggttttttttttttttttttttgagatggagtctcgctctgtcgcccaggctggagtgcagtggtgcagtcttggctcactgcaagctctgcttcccaggttcacgccactctcctgcctcagcctccctagtagctggggatacaggcccccgataccacgcccggctaatttttttgtatttttagtagagacagggtttcaccgtcttagccaggatgttctcgatctcctgacctcgtgatcctcccacctcagcctcccaaagtgctgggattacaggcgtcagctaccgtgcccgaccacaatagcagtttaaaagcaattaggccgggcgcagtggctcatgcctgtaatcccagcactttaggctgccaaggtgggcagatcatttgaggtcaggagttcgagaccagcctggctgacatggcgaacccgcatctctactaaaaatacaaaaattagctgggcatggtggtgcacacctgtaatctcagctacttgggaggctgaggcaggagaatcgcttgaagctgggaggcaaaggttgcagtgagccaagatcacgccactgcactccagcctgggcaacaagagcaaaagtccatctcaaaaaaaaaaaaaaaaaaagcaattaatgattgctctacatacttgccagtgagataaaggaaaaaaaattataaaaacgatcaatgaggtccatcatatatgaaatcacctggtcctttcatcagcaaaacactaggagctcagcagttgctcctgcattctgcatctgaaaaaggtctgtgcagactgtaggttgttgggacaggcctgaagtcggaatcaggacttgaacctgaaggatatgtagaaacagaaaagagaaagcgccactgaggtagagacaacttcatccagggcactgagggagcatgttgccgacgttgacctgcctgccaggacaggggactctgtgggacctagctggagaagtaagatgagaacagtttgtgaaagatatttaaagccaaatgggccggatgcagtggctcatgcctataattctagcattttgggaggccaaggcaggaggattgcttgagcccaggagttcaagaccagcctgggcaacatagtgagaccaccccacccccaccccaaccaatctcagaaaaaaaaaagaaagaaaaaagccaaatggcaggatgaatgtgaccccgataaaatgctattgaacctactcctcaaaaaacctacactggaaagtgttttatattttccaaagggcttttagtcctctccatgtttcctttatccctttatagataaatagggtaaacctataaaatgtgaaattaccattagcctaaagtggccctgctggataaggtacagccaagactgaagcatgtttctgtgcctcaagttcagtgttcttgccagtttaccattcagctttactactggattgtattaaataagctccttactcttagccaccgctttttcctacagaactaggcagataatagacatgtgagactggcaggttgaggtaagatgacaaatagctattagcacagggcctcagtatcaggacccaataaagagaggtgggggttgtactggcctaggaggcccaagtcagacgtaaagggggcggccattattcaccatccatttacacatctgtagctgtgtggtaatgcagaccaagtgttgtcacatcttccatgtcactccttttggagttaaatttccttcttcctggaagatgggttgttttaatttttttccatgagagtttgtgactggtaaattttctttatttgtttgaaatgtctttatttttgtcctccctctaatgtgatagtttagctagatatagaattctaggttgacaattgttttctctaaacatttcatttgtttgttttggttttggttttttttttttggagacagagtctcactgtctcccaggctggagtgcagtggtgcgatcttagctcactacaacctccgcctcccaggttcaagcgattctcctgcctcagcctcccaagtagctgggattataggtgcctgccaccacacctggctaatttttgtatttttagtagagatggggttttgccatgtcagccaggggggtcttgaactcctgacctcatgtgatccacctgcctcagcctcccaaagtgttgggattacaggcgtgagccactgcacccagcctaaacttttaaaaaatatcattcaggccaggtgtggtggcttatgcctgtaattccaacactttgggaggccaaggtggaaggatcacttgagcccaggagttcgagaccaggctgggcaacgtaggaagaccttgtctctacaaaaaatgaaaagtcacctgggcaggctggtgtgtgcctgtcgtcccatctactcaggaggctgaggcaggatcattgcttgagcctgggaagttgaggctgcagcgggctgtgatcataccactgcactccatcctggttaacagagcaagactctgtctcagttaaaaacaaaatgtaatttcattgtctatcattgtcagttgttcttgggaatttgacattctatttaatagcatttatttatttatttatttaagatggcgtctcgctctgttgcccaggctggagtgcaatgacgcagtcttggctcactgcagcctccacctcccatgttcaagtgattctcctgcctcagcctcccaagtagcctggattacaggcgtgggccaccatgcacggctaatttttgtatttttagtagaagcagggtttcaccatgtttgccagactggtcttgaactcctgacctcaggtgatctgcccgcctcagcctcccaaagtgcggggattacaggcgtgagccaccacacccggccttgacgttctatttaatagcatttctttgtagatattttgctttctcctgtagttgtgaagaccttgtatttccctttggtatccatggcatcaatatgatgtttcaaagcacagactttttatttttaatttattctgtttggggttcctagaggatttgttcctttcataaatatatgaaaactcagtgtggtggctcacgcctgtaatctcagcactttgggaggccgaggtgggcagatcacgaggtcaagagattgagaccatcctggccaacatggtgaaaccccgtctctactaaaaatacaaaaattagctgggtgtggtggtgtgcgcctgtagtcccagctactcaggaggctgaggcaggagaatcgcttgaacccgggaggcagaggttgcagtgagccgagattgtgccactgcagtctagcctgggtgacagagtgagactccatctaaaaatatgtatatatatgtatatatatatatgaaaactctccagcattaactcttcctatattatgttgttattaatattgttggttttgggattcatattagatgtgtgtgaaatttctcattctgttccccacgcctcataacttctttttcatagatttcatttcctatatattacatatgatgtaactttgtcagctacttcatgaagtctcttcaaattattctatttaactcatctattgaattttaaaatttcaatgactgtattttttatttctagaagttccattttattcttttgaagatatacctgatctatatttagagcatcttattattttcttatgattccttttgcatcttttactaacttaatccttcaaaatgttgttttgttgtcattgttgttgtcgttgttttgttgttgtttttgagagagggtcttattctgtcacctaagcccaggctgaagtacagtgggacaatcatagctcactatagcctcgaactcccgggctcaagtgatcctcccacctcaacctctggaatagctaggactacagctgtacaccaccatgccctgcttatttttaatttttttttagaaatggagtctcactatgttacctaggctggtctcgaactcctggcctcaagtgatcctcccacgtcagcctcctctagtgctgggattacaggtgtgagccgctgtgcctggcctgttgttcttatattttctttcacattgttcttttagctcaggttctcatttttcttactatcgcatcagctctcatggtggtttatttccttgtgcatttatattattactaccttttttgtatgagcgtaactttgacagagattgttttttctccgggaatcttataaaaacaggattgtagaagtatccccccagtgaggttttatagtgtttctgccagacaacctggaactaatttttatgttaatttcttggcttggggaatcttgcaccatctgtactagcacaggctgaagcttttgtattttagaagacactcttcccccactccacagcttgagacctacataagcttcctggtcttctgtggtcacaagaagtttctctaattatttcccatctaaaagaagacaaaactaacattgaggttagtgcaggaagggcttatagtcttacatatttacttcattgacagtatattactgaataacatgtgataacatatgcaagatttttttttttttcgggacggaggcttgctcttgttgcccaggctggagttcagtggtgcagtctcggctcactgcagcctctgcctcgtgagttcaagcgattctcctgcctcagcctcccaagtatctgggattacaggcacatgccaccatgcccggctgatttttgtatttttagtagagacggggtttcatcatattggtcaggctggtcttgaactcctgacctcaggtgatccacccgcctcagcctcccaaagtgctgggattataggcgtgagccactgcccccagctacttgggagactgagacaggagaatcgcttgaatctgggaggtagaggttgcagtgagccgagatcatgccactgcactccagcttgggtgacaagagggatactctgtctcaaaagtaataataatcaatttcaaacctaccataatgaaaaactcaagtctcttgccaatgaccatgcgtgagaaaccaggggggaaaggggggccaagtcttggaaaccatcatttacatcttagcaggatctccaagctcgtgctgaatttctaccagcctcccttggaggcttgccaacatcatgatgagaaatatcagcattggcctcttctcttttagcagaaattgtcactcaccttgagtaaatagatatttcaaataaggcaaccagagcatagggaaacagaagaccttttcttaaaactgtttagcaagtgaatgggccatgtgggattgagatgctggtctcactggctatctttctgcattctctccttctatttcagtggccctccacctacaatactggagctagaaagttgtaagactgttttcaaaaaaaaaaaaaagagtcaggaaattgctggaatagttcaagcatatttctttggttaacttattttgaagtttttctctgttttgtattctagctgcccttataatttatcaaagacagactcattgttttggcaagctcctggcctggaagtctccaacaaaaactcacagcactctatctgaaaaggaatttttaaatgcattcttagtcttgaaattgaaaatatattctagatacaacagtttgctgggaaatttaaacaatgccgtttatcatccaacaactttgctctggacaaagagctttttcatctcttccttagtgtcccttctactccattagcttttcagagctttttttaaaaaattaattaattaatttatttttttgagacagagtctcactctgttgcccaggctggagtgcagtggctcaatctcggctcagtgcaacctctgcctcccaggttcaagtgattctcctgcctcagcctcctaggagcagggactacaggcacgcaccaccacactcgactaatttttgtattttttagtagagatggggtttcaccatattggccaggctggtctcaatctcctggcctcaactgacatgcccacctcagcctcacaaaatgctgggattacaggcatgagccaccgcggccagccttttttaaaatttggttcacttctaggttatataaagcatatttctttggttaacttattttgaagtttttctctgttttgtgttttagctgcccttataaatttgtcaaaggcaaactctgataaactttaaaaattcttttttttttttgagacggagtctcactgtcaccaggctgaagtgcagtggcatgatatcttggctcactgtaacctctaactcctgggttcaagcgattctcgtgcctcagcctcccgagtagctgggattacaggcacgtgccaccacacccagctaatttttgtatttttagtagagacggggtttcactgtgttggccaggctggtcttgaactcctggcctcatgatccgcccgcctcagcctcccaaagtgctggaattacaggcgtgaaccactgcgcccggccaactttaaaaattcttaaaagttatatatacatttacttcatcttattaaatatggctttacattgttaaaacaggatatacatagctcatcaaaagtgtgacataatatttaaccaatgatttgtttgtttcaaattattttaaattattggctattataaacagcactgttggatatcttttgttattatatcattaggataaattttcagaagcagaatttttgggtcaaagactagagtaaaattcgtttgattccttttatttttttcccccccttgagacagagtctcactctgtcccccaggctggagtgcagtggcgtgaccttggctcactgcagcctctgtctcccgggttcaagcaattctcctgcctcagcctcccaagcagctgggactacaggcatgtgccaccatgcctagctaatttttgtatttttactagagacagggtttcatcatgttggccaggctggtctcgaactcttgacctcaggtgatccacctgcctcagcctcccaaagtgttgagattacaggcgtgagccaccgcacctggccattagttttattcctaaccattgacaaatcctagagaaatacgaataggattttcagggatttccaacaggttgctattttttctgttctcaaaaatacctagaaatagaaaataatatccagtggcctctacctcatttgtgtgctgtaaaaataccagtgcttattctcatttacctggccacgtctgaaagtcatgatcctctagtggttatcaggagctggaatgtgcagaaacttttatttcttaaaccatacaattctgtaagtttgaattacctacagcaaaatttttttttttttaagcaggagaaaaaagaacaaaaggtggctagataacacaggttgtgaaagtggcaagtttaattttgtccacaaaatgaggtccatggctcaggtagtttggggaggagggaatcgggatcggtgctgtgctggattcttgctgtgtccccagcctctgggtggccgccaggcccatctgccagtcaggaggagctgctgcaggttgctgctcactgaataatgattacaggcatcctgtctgtgggcaaaagagtgcattcttagaggaaagggaataaaatctagcttgagcccccatttccatccatcctaacatataattggtctcttcttgtgataacgacattaaatactaaagatgcagctgttccaaaaaacattgactgttgtttgggctaccagcgatactgtaaaatattccacatggctttccccaaacttttggtgacaaaaggtgggcatttataatttgttatatcctttcaacaaaggaaaagcagctttccaaaagctctggacactgctgctttaagtatcaggttgctgcaaaagtaattgtggtttttgcccttccattcaaatgacaaaaactgcgattacttttgcaccaacctatatagtttatcatttaaggaacagcaatgtataaaactgagagatctggggccatgttaaaaacttagtaagtctctttatttattcattcgatcaatgtataaatagaaccagtctatatttgctcatctagttaaaaggtcaaaagccataggcagccttgaaaaatgatgcaagagggctgggcgcggtggctcatgcctataatcccagcactttgggagaccgagacaggcggatcacgaggtcaggagatcgagaccatcctggctaacaaggtgaaaccccatctctactaaaaatacaaaaaattagctgggcatggtggtaggcacctgtagtcccagctactcaggaggttgaggcaggagaatcacttgaacctgggaggcggaggttgcagtgaaccgagattgcaccactgcactccagcctgggcaacagagtgagactccatctcaatagaaaaagaaaagaaaagaaaagaaaaatgatgatgcaagagtggtaagatgcaaggttataactcggttataccacatgcctcatgtgaaatgagcaagtttcttagtacacttgtattctctgcttatgacaattgagacactgccaagagtgttattctccttaatattttgaaatattaaggaaaaagtaatattgaattaaacaggcctggcatatggtgcctcatcatgcctgtaatcccagcatttggggaggctcaggtggcagggtcgcctgagcccaggagtttgaggctgcagtgagctatgatggtgccactgcactccagtctgggtaacagagggagaccctgtcttaaaaaaaaaaaaaaaaaaaatgagctaaacaggaaatagccacacatttaggccatgctaataatctaaatttagctaactgaatggatgacggtatttttgtctttaaacccattaggatttcaaaatattgggctacagttcagtttctaaaatattgttttctttatttagaaactgcaactctgaccttttaggcagtatggcttagttccataatgatattgagaatggactatgttaagaattaccaagaagtgggctgggcgtggtggctcacatctgtaatcccaacactttgggaggctaacgcaggccgaggcaggcagatcacttgaggtcaggagttcgagaccagcctggccaacatggtgaaacgctgtctctactaaaaatacaaaaattagccgggcgtggtggcgggtgcctgtaatcccatatactcaggaggctgaggcaggaaaattgcttgaatctgggaggcagaggttgcagtgagccaagattgtgccactgcactccagcctgggcgacagagtgagactctgtctcaaaaaaaaaaaattaccaagaagtgaaatcatgtataagccatacatccttaggtctgtttggatttatttgagggagattcccaagggtttgtcaaaaaattctcaagtttaaattctgtcttcctgttggacaacaaaagcagcgtagatctgattctaagacgtctgtgacccagcctaggcagcgggggttattctggactttttagaacattatcttgaaattctgtgacactgactcgttgcaagtaaaacaagccaactctctgtacatctttctgccctgtagtaatattgctgtaagatgcagtgtctttattctcagaatgggaaatttaatttaattgaaagaatagcttatggtctggtttagaatggaaacactatctctttgaggtaatagttgctatttttagactgacttttaaaaagagatgagaagtcatgatgcttattagctccacttagtcttagacattaggagatagtctccaaaataccattaactgttatcccaaataagttctccaaaatacaagatattttaaaggtatttttgtcataatgagtaattgattcaacactagttttagcgactcttaaattccattgtcaaataaacaatttgctaaacagaaatagattttccatagtgaaatttggttagaacaatggtgcattcctaggccagagtttcagaagtggatattaattcaaagcagctggatgcagggactgagaaaaagacagtcctgtctttttgctgcggctttggagaatctgatgtatcacagtattttgctgtttttgaaggtttccctatccttgtagtcagtgagagtgagtgagactgtagaaatagatcgtcctttgcaattgtatgtccaagcatggaagaaaaactcctggagagacagtgttcctttaacataaaaggcagaccgtctaaaatatactttgatttattatcttctacacagcttactttctaggctggactgtagacatgttggtccttattcagcgtcttccacagttcacgtctagggcccttgttatgttttcaggattactgcatagaaacagggcaaagggcattatgaatctattaggaggtaatatgcttacagaaggaattatgcagctaaagctaaaacatgattagggattctgtggagctacaggaagaggatcacagccacttccaaccaaatggtgctgggtggggtacctctggcaccagctttcatgggtaaaatattctacttgggtaaaatattctaaaatattggcgtgagtggatttattgtcagaaagcttttatctgctctcatgggttgtgtgtgtgtgtatgtgtgtgcgtgtaagtacatgcatacatattatatataatgatggcattctgatgtgatgcctgtttgagatcttaagttattttaaaaactcacttagatagaatcttcaaaataaacggggaaactacctcctgagctcttgctgttctttacagaagagatgaagaaatcccccactggatttttgtgagactttctgaggaagccttgtgaataaaatagagactgttttagaaatttgaggtctaatgggaatttttttttaaacattcatagcgaaatgatacatgatgaaactcagcagctgaagagttaatagggcatttgtgctggacgggctcggggaacagatggaatgcatgtaggtgggaaagctattatttaaacagaggagggctactgtgtattggaagggggtggatttttgagggtagctgggtacttaacattttggggctagactaatatatttactagtggacacaggaagaagcagacgccaaggcatatggtcaggaagggagttaacaggccaccaacaaagaggaagaatgcggcagctgaaatcaactgagggtagatgaaaagaggataaaatggcaccgacagatccaaaggccttaagaaactcaaaaaacctcagtaataaggaaatgtgtttggaaatactgatattgttaccttcatttgggaagtgttcacgtgtgaatagggaagaaaataagggaagcaactgtgaattaccttaggctttcaccagatgagtatgagtaaaatgtgtgaagtgaaattcaggttaacccttcaagtcacataggcaggaaaccaataaagaagattgacatgaaaaaaaaagccaatactaaatgttcccatcaagaagaaagtggaacaaatacttcagctttcctctcatgtgtttcttttcttttctttcttccttcctttttctttctctctttcactttctctttctttctctttcattcgtttgttctttttttttcttttcttttttttgagagagatagtctggctcagtcgcccaggctggagtgcagtggtgcgatctcggctcgctgcaacctccggctcctgggttcaagcgattctcctgtctcggcctcccaagtagctgggactaaaggcgcccaccaccacgcccatctaatttttgtatttttagtagagacggggtttcaccatgttggccaggatggtctcaatctcttgacctcgtcatccacccgcctcagcctcccaaagtgctgggattacaggcgtgaggcaccgcacctggcctctttcgttctttcttccctttctttctctcttttcttcttttctgtctttttcttgtgtttctgattttctttctttcatgattaggtcttaattttcttgtttttgtttgtttggtgttttgttttgttttttgaaacagtcttgctctgttacccaggctggagtgcagtggcgcagtcacagcttactgtatacttgacctcctgagctcaagcaatcctcccacctcagtctcccaagtagctgggaccacaggcacacatcaccacacccaactaatttatttatttatttatttattattttattattattattttttgagacggagtcttgctctgtcgcccaggctggagtacagtggcgcgatctcggctcattgcaagctccgcctcccgggttcacgccattctcgtgcctcagcctcccgagtagctgggactacaggcacccaccaccacacccggctaattttttgtattttttttagtagagacggggtttcaccatgttagccaggatggtcttgatctcctgatcttgtgatctgcccacctcagcctcccaaagtgttaggattacaggcgtgagccaccgcgcccagccaatttatttgttattattattttttgacacagggtctcgttctgttgcgcaggctggaatgcagtggtagtgatcacagctcactgcagcctcagcctcccaggctcaagcaatcctcctgcctcagcctcctgagtaactggaactataggcacataccaccatgcccagctaatttttgtagagagaggggtctcaccatgttgcccaggctggtctcagtttcctgggctcaagcaatctgcccacccgagccttccatagagctgggattgcaggcgtgatctaccacacccagccaggtcttagttttctgaaacattggttcagtaaaacaaaacaaaaacaagcaaacaaacaaatagttgccctggttatgttggaagacagcctatttcctgttgtgtttctggcttactgcagtgaatttgccaggtcacttaaagaccaaaaaccctatcttcatctggcaggaggtagttttttgccttgtgtggacctcaaattgtgttagagattcacaagattatatttatcaaaataacaccacaatgctatgtgaatctaaggtggtattaacggcacaacctcttgtacttctggatgactttagaatttatagacattcctgtttgaactttaaaatccattctgcaactagtcaacaattgttgccccttttttaggtatgtgatcaatcagaatatgaattagagaaaaacaaatgtgtaaattattgattttttaggagaaaagcaatgcagtaaaacataaaatagcactcctcaaaaaacataaaaagcataaagaagttgccatacttattccctctttagcatatatactaaatataaacatgctagagagctttagaaaagtctccttaggtcagtggttcatatgcctttttagtgcatgaaccccattgagaactgggtttaaaaattcatggatttcccagccaggcaccgtggttcatgcccataatcccagcactttgggaggctgaggcgggtggattgcttgagtcaaggagttcaagaatagcctgggcaatgtggtgagacctcctatctacaaaaaaaatacaaaaattagccaagcatggtggtgcacgcctgtagtcccagctacttgagaggctgaggtaagaggattgcttgaacccaggaggttgaggctgcagtgagccaggatcgtgccactgcactccagcctgggtgacagagcgagacctggtctcaaaaaaagaaaaaaaaaaaatgaatttctcatcccctcctcaaaaaaaaaaaaatgtgtatatgagatgagcagaggttcccacaagggtcatccaaataatgtaaattggcccaagtgcagacagtatagaatggtgtgtcaaactagaaggtacacgccacgttaaggcagtagggaatggtggaggtttatacaaactaggatgcacattgcttacctaaagtcaattcaattcagaacattaaaaagcacccgcggaatacatttgaggtaaatctggcccctaggcatcccagtgtgcagttctaggcttttattgattgcacccaggcttttatctatggtgtataaacgtaggagtattcttgtttttgccctaaggcccgacaacaagctcaaatacgtcaccaaatggcagaggacagcaaagcagattactcatccattctccagaaattcaaccatgagcagcatgaatattaccatactcacatccccaacatcttccaggtaagtcctgaacatctctcagatttcatgttttatgctttgctttccttagaaacatgacacttctgaatcgtgattgctgggtttgtattctgagtctgagtctttatataattccaaatttccactaattttttttttttttttttttttttttgagacagagtcttgctttgtcacccaggctggagtgcaatggcacagtctcggctcattgcaacccctgcctcctaggttcaagtgactctcctgcctcagcctcccgagtagctgggactacaggcacgtaccactgggcccggctaatttttgtatttttagtagagacggggttttgccatgttggccaggctggtctcaaagtcatgacctcaggtgatctgcctacctcggcctcccaaagtggtgggattacaggcctgagccaccatgcctggcccttttttttgttttgttttgtttttgttttttgagacagtctcactctgttgcccaggctggagtgcagtgcacaatcacgacccactgcagctttgaactcctgggctcaaaggatcaagggatcctccaagttcagcctcctaagtagatggaactacaggcatgcaccaccatgccctgctaatttttaaattttttatagagatagggtcttgctgtgttgcccaggatggtctcaaattcctggactcaaacaattctccagccttggcctcccaaagtgctaggattataggcatgataaatcattttttaaagcatctagatcaagcattgactagcaatatgaatgaaatataataatctcaagattaatcaataactttgcaaatttctatagtttgcacctgcagccaattatttgtcagtcttttttctttttttctttttttcttttttttttttgagatggagtcttgctctgtcacccaggctggaatgcagtggcatgatctcagctcactgcaaccttcacctcctgggttccggcgaatctcctgcctcagcctcctgagtagctgggattacaggcacctgccaccatacctggctaccttttttgtatttttagtagagacggggtttcaccatgttggccaggctggtcgtgaactcctgacctcaggtgatccgcccgccttggcctcccaaagtgctgggattacaggcgtgagccacagcacctatttgtcagtcttaaactatgattctgtgattaatgctgtctttgccaaagggatgattgtggttataaaaatgccaacttaactatagaagtcaaagcagcattcatagagttataggatttaaacaaatgacagttctttcttttggattgttttcttttgctcatgttaggttgtcaaaaatggtatgagaaaagatagacatatgttcttccattttacagattttttgcaactttgagtccaattgtagaaaaaataaataatatatttgcttcttggtgtctacacacacagcaaacaagtccttgtaaattatagttggaagatacactagcatgtattgggctgaggcagttaattaaatactgtgcttttggtaaaaggtaaagtagtagattaaagatggagaaaacgtttgaggtagattacaaatagtgttagtaataaaactattggccaggtgtggtggctcaagcctgtaatcccagcactttggaggcctaggcaggtggatcacctgaggtaaggagttggagaccagcctggccaacatggcgaaaccccatctgtactaaaaatacaaaaaattagccaagtgtggtggcggggggagggggggtggggcctgtaatcccagctacttgggaggctgacgcaggagaatcacttgaacctggaggcagaggttgcagtgagctgagatcacaccactgcactccagcctgggtgacaagagcaaaactccgtctcaaaaaaacaaaaagaaaaacaaaaaagaactattgagtttggcattcttactaaaattagaatggaattgtgcaaagcatatatttgggcagcctaacatgtctagcaatttataaaataaatgtacagctgggtaatatggaggctccgtgtacttagagccgctctaactctaacccattttttcctcaaagagaacttgttagaggtaacaatgctgccgaaaaacaactttgtttaataataatggaccaaacttactttatacaaaatctaatgttgcagaaaatacaagagatggaggaaaggaggattgtgagaatgggagagtccatgaagacatatgcagaggttgatcggcaggtgatcccaatcattgggaagtgcctggatggaatagtaaaagcagccgaatcaattgatcagaaaaatgtaagtattgccatttggacttcattgataactatttgcagatccattatttctccccatcccctttccatttgacctcatgtcatcatctcatggtggatggttgcttttggtggtcacacatgctctgtgtcttggatttagctgtataattccttttttggtaaacacatttaagtggtaaattgtccgagacatgacagaattgaattgaagtatttcctggaaaaaaggtaaaggctttgtttcctctaaggcagggtttctttctctttttctttttctttttctttttttttttttctttttgagatggaatctcgctctgttgcccaggctgcagtgcagtggcgtgatcttgggtcactgcaacctccacctcccgggttcaagcgattctcctgcctcagcctcctgagtagctgggactacaggcgcccgccaccacgcccagctaatttctgtatttttagcagagacggggtttcaccatattggccaggctggtctcgaactcctgacctcaggtaatccgcccgcctcagcctcccaaagtgttaggattacaggtgtgaaccactgcacccggccaaaacagggttccttcagcacttttgacattatctcaggccagatcatttttcttgttgggggcatttcagaatgtttagcagcatcctggcctctacccagcagaggccagtagcactccccgagttgtgacaatcaaaaatgtctccacacattgtcacatgtcctctgggagggcaaaagcttctctggttgagaatactgctttagggcagtgttctccatttgaattcctagagacctatttctcaaaaaaatataaactagaacaccagcataggcttttactgttaatttgaagacacaaatattcaacataaaagttatgctgctggctgggcacagtggctcacatttgtaatcccagcactttgggaggccggagcgggtggatcacttgatgccaggagttcaagaccagcctggccaacatggtgaaaccacatctctactaaaaatacaaaaattagctgggtgtggtggtatgcccctgtagtcccagctactcgggaggctgaggcacgagaattgctggaactcaggaggcagggattgcagtgagccaagatcatgccactgcactccagtctgagtgacagagcgagactctgtctcaaaaacaaacaaaaaaatcagaaaacaatagttctaaattctaaaagctcggatgaaaagctcaaatgatggcttttgagaagaatgaaaaaagctggccagctgtggtgactcaagcctgtaatgccagcactttgggaagccgaggcaggcggatcacctgaggtcaagaatttgagaccagcctggccaacatggcgaaaccccatctctactaaaaatacaaaaattagctaggcatgatggcacatgcctgtaatcccagctactcgggaggctgaggcaggagaatcgcttaaacctgggaggcggaggttgcggtgagctgagatcacgccactgcactccagcctgggtaacagattgagactgtctcaaaaaaaaaaaaaaaaaaaaaaaagctactaggaaaaaagttattatcaatcagtacaatttcgttagttatcatctgtatgagatcatcataattcattgtttttttgagatggagtctcactctgtcgcccaggctggagtgcagtggcgcgagctcagctcactgcaacctccgcctcctgggttcatgccattctcctgcctcagcctcctgagtagctgggactacaggcgcccgccaccacgcctggctaattttttgtatttttagtagagacggggtttcaccatgttagccaggatggtcttgatctcctgacctcgtgatccacccgcctctgcctcccagagtgctgggattacaggcatgagccaccgcacctggccaattcattgtttaaaaagtgtttgcatgcttctgaatgtatttatatgcttgtgggtataatttcaggattcacagctggtaatagaagcttataaatcagggtttgagcctcctggagacattgaatttgaggattacactcagccaatgaagcgcactgtgtcagataacagcctttcaaattccagaggagaaggcaaaccagacctcaaatttggtggcaaatccaaaggaaagttatggccgttcatcaaaaaaaataaggtactgatggttggcgtgaaatgagttttctaaggtgtggagattttgacttgatcttttagtcttagaaaaactaagatcctaaacctgtagtttcagaatgcaaaagaagaagctagtgtgctaccttatgttgagacagtatttctttttggtggtggtatctttgccatggccctgtgtcttatttcagatgcattatcctcgtaccgtgactcccacactaacagagtactgacctctccaccgtttcgcctcatgcctttccctccttcctctcctagactgctggttaccttggctgggagagaggatgtagtgggacattcctgtaacactttatccgcacatctactggaaatcgttaccatgttaataacttggttttgaattcatgttaacatgtgtacccatgaacatttttcattttcttttcatagtgcgatacataggtgcatgacagcattaacctggggacgtagaatatgatcaaggcagcattactgctttaactttagaatgacttactatttattaatttaaacagactgctgtttccacaaccttagcattgaaggtctttcattttctcccatcaagctatgttagtttaggtaatgtagaaatatttaccctctggcttaagctggtttagagtaactaactagagctatagtttgcatgggaaagtctgcacgagcttcttgtcagatatttcttgctcttctgtcgcattacttactaaacctcccaactctcatcatattcttcatttaaccacctcctacatgttttcttttggaccatggcctaaaatttaattgtttgtgttttacttgcgttggatttcaaatattatttgatgcttatttttgttttgtgtcttcttgtttctgatttttactctgtcacggctccatctcttacatgtagcttatgtcccttttaacatccccccatcagcctccccctccccctcctgcctctgcctcaccctctgctgttcccaacggcccccagtctcccaagcagcaaaaggaacccctctcccaccgcttcaacgagttcatgacctccaaacccaaaatccactgcttcaggagcctaaagcgtggggtaagttctgctccggaatcctgtctctctggcgtgctttggttgcatgtttggttctgcataactaattttgtttgtgaatgaatccattgtgttttcccataacatataaaaaagttaaaaaaaaaaaaacaaaaaccattatagctagaaagaaaagccagaaagaggaagaaagaaagaaggaagcatggtggttggaagaaaggagaaaaccaggcagcccagagttctttctatttgtttctttcttttttttttttttccagacagagtctcgctctgtcaccaggctggagtgcagtggcgtgatctcggctccctgcaacctccacctcccgggtttaagcgattctcctgcctcggcctcctgattagctgtgattacaggcatatgccaccacgcccagctactttttatatttttagtagagacagcatttcatcatgttggccaggatggtctcgatctcttgaccttgtgatccgcccgcctcggccttacaaagtgctgggattacaggtgtgagccactgcgcccggcctttttcttttcgtttctagtacattttggaaggactttacccctcttcctctttaaagcatccaagtcatgcattttctaccttaattttaccaaaaaaaaccacttagatttcatttctaaaactagcgacctgagactgggcgtgatagttcacatctgtaatcctagcactttaggaggccaaggcaggaggattgcttgagctcaggagttcaaaaccagcttggacaccatagtgagacccccatctcttaaaaaaatatataaaaattaataggacaagcgcagtgtctcatgcctgtaatcctggcactttggaaggccgaggcaggaagattacttgagctcaggagttcaagaccagccagtacaacatagtcaaaccccatctctaaaaaaaaataataaataataaaaacataaaactagcaacctatgagatgaggaattggaagtcactgtgtaagtcagaaaatattgccttaataactactgaagcaatgtgagtgtaatgaagatacttgcctgagctatgcctcagggtcgaaaggagaagagtcataagtcacagtggtttcattcgctattttagtgagattatataagatgttgataaaatatctgttgattggaaggggcctgatgcagaatttctctttaaaggatgaaacaataaaagcagctgacacttactgagcacttattgtgtgcaaagctctgttctgtgtgctcatttacttttttccagccaccctatgaagcccaggtagtactcatatttccttattttactgtaaggaaattgaggcataaaaaggtgaaggtgggaagatacagagccgggatttagatccggggagtctgattacagagtctgagattctgtgacatccacattcagggagaaactactatattgactcgtaagtggttgttattaagattgaagtccgctgtcctcattaagattgatgtgcgcttacatcatagagataatggaattgatgcagccatccaatgtagataccagtttcgtttacagagaaagattggcataaagcaatgtgtagattcccaaatcattctcaatggccagtctagtctaagccttcccaaaatatcttttataatgaatataatgagtaaacagatctttagactgggcccagtggcccacgcctgtaatcccagcagcgttaacatatccagtaaggtttgctccttttttttttttttaaatcctaccctgtgggagttgcaatacagttgtagtggaatgctttcttgtacaaacataagttttacttttcccttctcctggactctccagtcaactgacggttgggttacttctttccaaatagtacctggtagtgccccaaagccagaggtggatgccatcctttcttgagtgtcaactgacacattggcctgggaaaagattctaaactacaactaattaactagaggagagatgtccttcttagacttggaatcaacagctggttactagtaaaagaataacagtagtcattgttaacctgacaatcgtatttccacaaaaacaattctgtgtaaaaaagaggcctggcacagtggctcatgcccgtaatcccagcactttgggaggccgaggagggcggatcacctgaggtcaggagttcgagaccagcctgaccaacatggtgaaaccccgtctgtactaaaaatacaaaaattagccgggcatggttaatgtccggctaattacaggcgggtgcctgtaatcccagctactcgggaaactgaggcaggagaatcgcttggacctgggaagtggaggttgcagtgagccaagatcacgctattgcactccagcctggacgacagagcaagactctgtctcaaaaaagaaaaaaaaaaaacccatgaaaaaatagccaggcatggtggcatgtgcctgtagtcctagcggaggctgggatgagaggattgctggagcccagccagggcaacagagtgagaccctttctccaaaaaaaaaaaaagtaaagaatgtaaattcataattgataacaagtttattatcaatgctttttaaaaataggggacaaaacaatatttcctcacatgcagagttcctttaatatgagaatctcaaatttatagttggtagaattatcttgaattatcttgctttaatgctatctatcatatcaggttaagaattagaaatgtaatttcctaaagatgtgaaaaaagccgttggtggaaggcagaatacagcttcaaaagtggatgatggattgagctgagatgtataattaggacttgagtaatctgcagcttcttggctcaacgatgctggcgtttagaactccactcattgttaatccaagaatttccaagacaagggtgtttttgctagactgaaagtttcatatgaactgtcagttaacccatctctgccgctttaccaagcactcatgtgttatatttatatattatctctgtatttttttggactctcatgatgaatattcatgattgtttaccatttgtttatgtgtctattccagttttctcttaacattacacagtctgttggccaaaaatggtttgtgaatctgtggttcatgatattctctaactatttagaaaaagaccaaagaattcagtaatcaataaatgtaagaaaaggatggttagaaaaagataagctgggcgttgtggctcacacctgtaaccccagcactttgggaggctgaggtgggtggatcacgaggtcaggagtttgagaccagcctgaccaacatggtgaaaccctgtctctactaaaaatacaaaaattagctgggcatggtggtgcacacctgtaatcccagctacttaggaggctgaggcaggagaatcgcttgaacccaggaggcagaggttgcagtgagccgagatcatgccactgcattccagcctgggtgacagagtgagactccgtctaaaaaaaaaagattaacacttaaaacagtgaaatgggaatcggaaactggttcttttgatgatttaaaggaaaatctctgttttaccataatcagcagtatgaattttatttcttactcctcaaacgtgtgctcagcaaatctttgttaaaaaaaatttcccaaatgatgtgtttattttcctgaggttaaaccacatacatatacccactagaagcaatcgtaaagaaatagagaaatagttttgcttccctcacttttggtcattctgttcttagggtcagaattaatgttccttcctctaggacatagcagtgcaaaaaaagaggaagcacaagctcaaaaagcaaatctaaagtttggagaaatagatttcatttttaagcagtctcaacatggatcttgcatgggacatccatggcatggctgacagcttccgtgaccaacatggtacagcccttcctaccttctcatttattctactttgtaacttaacagcattatgccaacgataatttaactagaaaaagttcctgagagaataacaaatctgtgattttattatgtcttttatcatgttttgcagctttcagattcagatgtcaataatttgtttctatgatcagagtatataaatcccatgcaaacatatctcagcataactgattttgtttctaaataattaaacaggataaaatgttatttgttgtaagctgttgacatttgtaaggaaattttgtttcactgaatatgtttagagatgccgccagaacattaaccattgtttcatttttatgtaagttgaagaaaaatgaaactagatagcatgttctccatttgcagtctacaaaggggaattttattgcttaaattaaagtttcattttctggcctgtgcaagagacttttatatctaaaatatggatgtacgtttttcatattttagagttcattgtatggaaaaataccatcaaagttgaccaaaagattttgaaaatccttaccagttgtttgtcatatgttaaagtcttatggttaattttatttattttatcttgttctcttgctggttattggcagactcagtctttctgttttcacaaagaactcatgaagaggacgatagggaaacccacgtatgcctttgaggctagggactatgttgtaagttcacctgtgatggccaggtcatacagtcatggcacagccactaaccccattcacagcaccaagactggggacccagaggcacttgttatgcttccacactacgaaatgaaattcttaattgagagaactggacaccaggaaaaaaaaaaaaaaagaaaagcctaattgtataaattcaaccatacggaactttatccgaaaagcttgcatgaataaaggaagcaaactttctaataacagtggtgagctgagcttgtttttttgtttttttttttgtttttctcttttcattctagttctggtaaaatctttaaagggactgtgactgccgtctgagatgtcattgggtatgactttaccgcagaatttcacgcataaaacacagctgcagtgcgtggtcacgggagagtgacgctcttacagacggcagtgtagctcagtcacccatatccatgtttgtaacaaatggatccataagggagttatgccctaaagcttggagaacaaacaaacaaatcaaggaagcgtgagcgatctcctagcacagtaaaatgattttgcttctctctatatatatttattttcactgtcccctttctttgtacttgaggttagtactgtgactgtccaataacacatggactcgcctgggctgtgttccccatgtgttattgacgcttgtggctcccacggctctttaactgtcgcctgaaactgacagctttttaattcttcaggtgtctagcaatgcacttaatgaaatcttcaaaattattattttagccaatgatttcgctttctaattttaagagaaattctaattggctggcttacaacttcagactgaaaaccagtatataatgattaaaaagaaattccacgtactgtgatggcacttcttgtattaatagatcatccatcacaaataaagtcgaatttgtctgagaatttggtatttcctattcaatggggatttctgttcaatcctaatgactcgtttttactatgaagtgttaataatcttcctatacaatattttgaggtgagaactctgtctgtggaatgcttaagaaagaatatataactttgcgtaaagaaagtagccgagtagagagcaaatagtgtatctagttgaaatgttagttctttgaattagcaatgtttagacaataatgtgtgagaaaatatctgtatatgatagtgtgccttgtaggaaagatacttggagttttctgctgtgcaccataagtcttgtctgtgcgtacaatgaattccagttgtgataagtagatctatgctcaagttcacaggtgggctggaatcactgtagactgcccatgtcagacagtcaggaatgtgactgtatgtaccattttccccctgcaaaagtttgtctttctggttctttcctttaaaatctcatgtttctatatagggacaatttatttaaaaggttattttttatttacaaggaagtgtcaactttgaatcaatcttaaattaagaattagttttttaggctgtgtgtggtggctcacacctgtaatcccagcactttggaaggctggggtgggtggatcatttgagctcaggagttcgatatcaacctgggcaacatggtgaaacccccatctctaccaaaaaatacaaaacttagctggacgtggtggcacgtacctatagtcccagctactcaggaggctgaggtgcgaggatcatttgagctctagaggttgaggcttcagtgagctgggattgtgccaccatgcaacctgccctgtctccaaaaacaaaaccaaaaatcagcaaattgataagtaaataaatactttaaaaagagcagtcacagctgggcacagtagctcacacctataatcccagcactttgggaggcgggcggatcacgaggtcaggagttcaagaccagcctgaccaacaaggcgaaaccccgtctctactaaaaatacaaaacattagctgggcgtggtggcaggcacctgtaatcccagctactcaggaggctgaagcaggaaaatcgcttgaacctgggaggcggaggtggcagtgagccgagattacgccactgcactcctgcctgggcgatagtgtgagaccctgtctcaaaaaaaaaaagagcagtcacagtggataattctccaaataacccctgtggacagggctgagtttcatagaaagcatcagcagacaccctccacggagcaaggggtggcacacacttctcgggtgggagagaatgttggcctctagcctggctgcgagaggcattctgggtcctgcaggtagtttcttagagcaatgctagtcagccctttgttaccaattcaccaatttcagactttgccttcatgtcaatgtttatatttattagagctccttaagattaaaatattactttcctgtcatggaagtaattggtgttcagacttgttttcgtctgtataaaactttccatgggaaatttggagaacaaaaggttgtgtgattatattttttcttttttttttgttttttttttgagatggagtttcactcttgttgcccaggctggagtgcaatgcgcgacctcagctcactgcaacctccgtctcccaggttcaagcgattctcctgcctcagcctcctgaatagctgggattacaggtgtgcaccaccacacccggctaatactgtatttttagtagagacagggtttctccgtgttggtcaggctggtctcgagctcccgacctcaggtgatccacctgccttggcctcccaaagtgctgggattacaggtgtgagccactgcacccggccctgtattttttcttttatagtcattatgtgtcactgactataagcttactttaatttacatctaggctgaggtggccagtacaggcctgtaacagaaaccctccttttctatctgatctttggctctggcaatgtggagcctaagaaaaatgttattagggagcagcccttcttgtgaacttttgcacagatctgctacaagtcatttttataaatcagcgggtagacgtgtgtgttattttaatatggcggaactgaccaagttcctcttcttctgatgtgttgttgtttttttttctctttctctctctctttctctctatttttcccatacctctccaatttttacatgaagctttctctcaagctggtaagcacaattgttccatgcatgtcctgagtctaatcaggttttctggtgtgtcttttatgaatgctatgccatgcacaacgtatcttcaaagttaacttggtttgtgtttctcttacgtgtgcttttgttggtgtttccttattagacttcttggatacaaaggtccagaatctaatagaggtgatcttaatcttttcaagttgctaagaaaattaacatttaactcacgacttggtgttattcctggggccttgagaggaggacaaatgttaaagtgtctatataaatattaacgtaaaggccgggcgcagtggctcacgcctgtaatcctagcactttgggaggccaaggtgggtggattgcctgagctcaggagttcgagaccaacccgggcaacacggtgaaaccccatctctacaaaaaaccaaaaaattagccgggcgtggcagcgtgcgcctgtagtcccagctacttgggaggctgaggcagagaactgcttgaacccgggaggtgaagggtgcagtgagccgagattataccactggacttccagcctgggtgacagagcaagactctgtctccaaatatatatatatgaacgtaaatattaaatcttggggggtgtctgttggatcattttgaataaaagtaaattaatagttgaaaaatgttgctattagagaaccatagaagtagatgaaaaaatctgggagcctggaggagctgtgcaggaatgatcccagccagcagctgctacccaggtttgaggccacctgtgggaatggaagactgtggaatctttatggtgcgacgtagatatgttggtgccttgtgcatagctgattcaagaggccacaagatgatttcatggacagtgaaaagagcctcctaagcctttttagaattattcactcagtgttttgtgtcgtttctacttaattgtatatgcctagtcaacagtcaaactaatcattaaatttattaaaagtaactaacataacctataactatacttcaaatatgtataatagtttcatagtcttctcaaactccacagctaagaatatcctaaaataatggacagtgatcaactgtgacagttctactaggagtaagatcagcactataagcacactattgataacctaggatagtattttatggtgagatatatatatatatatatatatatatatatatatatagacatatgtatgtatatacataattttttcaacatgacttagtatttggtaatggacccaaccttaaagaaaaagagtattttattaaattaaataaacatttcttaggctgtgaaataaaatcctgagaagagtctttgattaaggtctctacatgaaggaaagagatctagatacttaaatgaactacaagttcatctgcagtatgaacttgggagaaactggatctattgactaggaggccttctcagctgccagggtttccttatttccctttattcattgtttgtctgggtgctaggagcaaaaggtaatatttttaggcagtctttctgtttgaaatacaaattattttaccaacttggtattgaattgttgctttatatcattaccttgaaggcaacaaagaagtgaagcgctggctgggcacggtggtttgtgcctggaatcccagtgctttggaaggctgaggcaggaagattgcctgagcccaggagctcaaggttgcagtgagctatcattgcgccactgcactccagcttgggtgacagagtgagaccatgtctgaaaaaaaaaaaaaagacaaaagaaaaaagatgtgggaccaggtgtggtggctcacgcctgtaatctctgcactttgggaggtgggggcaggcagatcatttgcgcccaggagttctagaccagcctgagcagcatggtgaaacctgactctacaaacaaatacaaaaattagccaggcatggtggtctgtgcctgtggtcccagctatactggaggctgaggcagaaggattgattgagcccaggaggttgaggctgctccagccttgggtgatagaatgaaaccctgtctcaaaaaaaaaactataaaacaaaacaaaaaacccaaaatctgaaaaagtagtattacacggagcttgtgctattttggggtggggggaagctgtcaacaagcaagggtttgatttttttttcttttaggagacagagtctcgctctgtcccccaggctggagtgcagtggcgcgatctcggctcactgcaacctccacctcctgggttcaagcgattctcatgcctcagcttctcgagtagctgggattataggggcgcgccaccacacccagctaatttttgtatttttagtagagacggggtttcaccatgctggccaggctgatctcgagctcctgacctcaggtgatccgcccacctcagccccccacagtgctgggattacatgcgtgagccaccaggcccggccaggtttgattttattagtacatagaacaagcttctcttacagaactccagccacttaaaacataggtacatgtatatgaccctctcttcccataccaactcctcctgttatggcctgtctttgttgttttcttatctatttataagttatcagtacaatgtgttttactgatagatttctttgcacctgtttatacacctgcacagaggctaaagctgttgtccagtgtggtagccactaccatatgtagctgttgagttttttgtttttgtttttgttttgagatggagtctcgctctgtcactgaggatggagtgcagtggcatgatcctggctcactgcatcctccgcctcccgggttgaagcgtttctcctgattcagcctcccgagtagctgggattacaggcaactgccatcatgcctagctaatttttgtagagacagggtttcaccatgttggccaggctggtcttgaactgacctcaggtgatccgctcacctcggcctcccaaagtgctgggattacaggtgtgagccaccacgcccaaccgctgttgagttttaattaattaaaattaaataaatttttaaaaattcagttccacaatttcaccagccacatttcaaatgcttcacagccacacatggcttctgtgttggaaagagcggccatagaacattgccatcactgtagaaagttctgttggactcacagcacatagcaaggctcagcacatattaacgaggtgaatgttgaccacttgccagattttgtgacttttttttttttttttttttgagatggagttttactcatgttgtccaggctggagtgcgcagtggcgcaatctcagctcaccacaacctccacctcccgggttcaagcgattttcctgcctcagcctcctgagtagctgggattacagacgggcgccaccacgcctggctaattttgtatttttagtagagacggggtttttccatgttggtcaggctcgtctcaaactcccgacctcaggtgatccacccgcctcggcctcccaaagtgccaagattacaggcatgagctaccgcgcctggcctagatttcctgatttctgaagcagtgtatcttagcattgtgttttgctgtattccagcttttaaaaaattctcagttctggaaaacatgctcatttgataaaactcaaaccgtttttcctctgctgttccactatgacaatcaacagagaagatttctgtgaccaaatatgtggaggcttccgctatatatcaagcagcagacactagctgggtgtcctttaattcaattccattctgatgctatctacctggagatagtggctgatcctgggggttgagggctcagtcctgaaggactgccccctccttcccaccagtcgcaagtccaggcttccaggacttctgatggactagcttcaagttggggttcccctgaccctctctttgggttcaattaatttgcaggagcagctcacagaactcagggaaacacttatatttactggtttgtttttgggttttttttttttttttttgagacagaatctcgcccgtcgcccaggctggagtgtaatggcgtgatcttggctcaccacaacctccgcctcccaggttcaagcaattctcctgcctcagcctctcaagtagctggaactacaggcgggtgctaccacactcggctaattttttgtgtctttagtcgagacagagtttctctatgttggtcaggctggtttcgagctcctgaccttttgatctgcctgcctcagcctcccaaagtgctgggattacaggcgtgagccactgcgcctggccaccacatttactggtttattacaaaggatattattaaaaatacagatgaagagatgcttagggcaaggtgtgggggagggggcacagagcatccatgccctccccgggcagccactctctaagaatctccccaaaaaccctgtcctcttgggccttttatgagacttcatcagatagacatgattgaagcatggacaaccatgtggaaatgagattggtcagaaactgcctgatcacatcctaatagatcaggtagtgacacccagcagggcctgtctgtgcagattcttcttggcctccctgtgcagccttccttccttcagggtatggggcacgatcctcatgaagcctcttgaatgaggatcatatggccacaatcagaatcctgccttgggcaggtgaaagaagggcacgtggaggtcagatagagagattctgttttctgaggtcgaaagtgctctgatattttaacaaaagactgtagcaagaggccgcgcatggtggctcattcctgtaatcccaggacgttgggaggccgaggtgggcagatcgcctgaggtcgggagttcgagaccagcctgaccaacgtggtgaaatccataatccagaataatccagttttcaaataaatattgtagcaccatagtatacggaaaacaagtctttatttttatattaaaggttagttttgcttcatcttagatttagagtcaaacttctttggtttgctattaggaatagtcacttccattctggtttcactcaactcttatctcacacacacacacacacacattagagagtcagtcagtgtgtctgatgggtgtgtctttgagaacattagctgaaaggtctttgcgtggccttttgtggtcaactatttgctgaatcacacacttcccagcacatcaccctggcattttatcataatcagcctaggaacccagtcataagcccacgtgtaagctgcttggcaaatgcaacttgcttctggaattacattaactgggtctcctctttctaccctgccccaagcctgccttgcccttgtttcaaaagaattgagggtttaaagtaaaatctcttttctaaatgccctggcttatccctggttatttgaagaaatttctctctctctctttttttttttttttttttttttttgagatggagtctcgcattgtcgcccaggctggagtacagcggcacgatcttggctcactacaacctccgcttcccgggttcaagcaattctcctgcctcagcctcccaagtagctgggattataggcgctcgccaccacgcccagctagttttttatatttttagcagagacggtgtttcacattgttggccaggctggtctcaaactcctgaccttatgatccacccacctcggcctcccaaagtgctggaattacaggcatgagccaccgtgcccagcacgaaatttctctctctttatgaacatagcctcacttaagtaaaagcacttgacatcacaatttagccagagctttctaacaagtaagcatatgtcaaagcctgaaactgttgatactttctccttaaagctcatgcacagtgtaaagagagcagctgcttctgaaaagggaatcaagatatcaaaatgcagttcttctgacagattaaaaaccgcggagatgagtttcgtacactgtggaaaactgattttgaggtcagggagggcattctctctgaactctgagaggcttcctaaaggcctaaaagaagtcactaggctgggcgcggcggctcatgcctgtaatcccagcactttgggaggccaaggtgagcagatcacctgaagtcaagagttagagactgtggaaaattagccgggcgtggtggcacatgcctgtagtcccagctacttaggaggctgaggcaggagaatcgcttgaacctgggtggcagaggttgcagtgagctgagatcgcaccactgcactccagcctgggcaacagagtgagactccgtctcaaggaaaaaaaaaaagtaactagacttttagaggcagcagagggaggcgtgcatggggtaaggagaagagattttttttttttaatgttctttttcacccacattctctgaggaatgtgatgtcccatctgtcactttacaggggtggagacttttggcctcagcctgtgtgaagagactggcaggaatactcacgctagggaaaaggcagcagctaggcgtgcagtggttgatggggtttgtattaaggaaacataaatttcattaacacttcagtgttgccactgacattgatggtaacacttggtaggaaaaggaagaagactgtctcaaaatgtgtttttcatggattctccctagagtcagaagtatctcttactctcctttactgtagcgttgctcactgctttttctggggcattctggccagcatccatggaactgggaatggtttatgggacttatgcagtttgcatgcattgatttttgcatctcggctgggtgtagtgggaaagagcttaatctatttcatgaagccacatgcagatgtctgcacccccccatggctgcaggctttgctttcagccttctttcaaggaaagcctggggctttctggtttctcatttatatttgtgtctgcagggtgcaacaccggaggatttcagcaacctcccacctgaacaaagaaggaaaaagctgcagcagaaagtcgatgagttaaataaagaaattcagaaggagatggatcaaaggtatagtgcatcaatatgacttattaagaaattcaaggccaggcgcagtggctcacaacctgtaatcccagcactttgggaggctgcggtgggtggatcacctgaggtcaagagatcaagaccatcctggcctacatggtgaaaccccgtctctactaaaaatataaaaactagccaggtgcagtggcacacgtctgtagtcccagttactcaggaggctgaggcagcagaattgcttgaactcaggaggcagaggttgcagtgagccaagatcatgccacttcactccagcctgggcaacagagcaagcctctgtctcaaaaaaataaaaaataataataattaaaaataaaataaaaattaaaagaaaagaaattcaagttcaggctgggcatggtggttcacacctgtaatcccagcactttgggaggctgaggcaggaagatcgcttgagtccgggagttcaagaccagcccaggcaacatagcaaaaaccctaaaaaaaaaaaaaagaaaaaaactagccaggcatgatggtgtgcacctgtagtcccagctatttgggaggctgaagtggaaggatcacctgagcccaggaggtcctggctgcagtgagctatgatcatgccactgcactccagcctgggcaacagagtgagaccctatctcaaaaaaaaaaaaaaagagagagagaccagccttggcaacatagtgagaccccatctctacaaaaataaacaaaagtagctgggtgtgatggcacacctgtagtcccagctacttgggaggctgaggtggggagaattgctttagcctgggaggtggaggctgcagtgagctgtttgcttaagaatcaaaacccagctgggcacagtggctcacacctgtaatcctagcactttgggaggccgaggcgggcagatcacaaggtcaggagatcgagaccatcctggctaacacggtgaaaccctgtctctactaaaattacaaaaaattagctcgcatggtggcgggcgcctatagtcccagctacttgggaggctgagacaggagaatggcatgaacccgggaggcggagcttgcagtgagccgagattgcgccactgcactccagcctgggtgatggagcgagactctgtctcaaaacaaaacaaaaaaatcaaaacccatttgccataaagcagagatgccatagaggaggagggcctctgtgaggggaaggtgcattcattaaaacagctgtaggaaaagccagtcaaataacacacacacacacacacacacacacacacaccctcactcctagcaagagctaaggatctgtctcaagaggtataccactgcattccaccttgggcaacagagcaagaccccgtctccaagaaaaaagcacaaagtaggatgatagatgttaaataccaagcactccagataccctggggtcaaatctggctctatcagttactactgctgatgtgtcagtgtgcataacatgcttggaaccgtgcctggcacataagtgtctgcgaaataaaatgaatcaatatgttaaaggtaaacaaactacgtgtttcaattaaaagatattctcagaatggaccaaaaaattaaaaacccaatacacaaagcaatgtatgctatctacaaaagacagatctaacttataagctctagaaatgtagaagtaaaaaaatgggagagaagatataccatgcaagggccaatcaaaaggaaactggtgttacaaggctggcttctgggctgaataaaaggaaagaaaaaaaaaaaaacgtgcttgggccaggcgcagtggctcacgcctgtaatcccagcactttgggaggccgaggcgggcggatcacgaggtcaggagattgagaccatcctggccaacatggtgaaaccccatctctactaaaaatacaaaaattagctgggagtggtggtgtgtgcctgtaatcccagctactagggaggctgaggcaggagaatcccttcaaccagggagtcagaggttgcagtgagccaagactgtgctgctgcactccagcctggcaacagagcgagactctgtctcaaaaaaaaaaagtgctcaaagttagtatagaagacttaaattatacatttagtaacattgacctaatacataaacatctaacaactgcagggcacacactgtattagcccattctcatgctgctaataaagacatatttgaggctgagtaatttataaagaaaaagaggtttcatggactcatagttccacatggatagggaggcctcacaatcatggcggaaggcaaaggaggagcaaaggcatgtcttacatggtggcattcggcagagcttgtgcaagggaactgccctttataaaaccattggagctcataagactcactattacgagagcagcctgggaaaaaccgcccccatgattcaattacttcccactgggtccctcccatgacacatggggatatgggagctacaattcaagatgagatttgggccagggcacagctaaaccatatcaacactcttttcaagcccacataagaacattttcaaaattgagtatatctttgtttcacaaagcaaatctcaataaatatcaaaggaaatgtatcattcaagctatattatctatattctgcaattaagctggataccaataacaaatattaagaaattggccaggcgcggtggctcatgcctgtaatcccagcactttgggaggctgaggcaggcagatcacctgaggtcgggagttcaacaccagcctgaccaacatgaagaaaccccatctctactaaaaatacaaaattagccaggcgtggtggcgcatgtctgtaatcccagctactcgggaggatgaggcaggagagtcgcttgaacccaggaggcagaggttgcagtgagctgagatcgcgccattacattccagcctaggcaacaagagcaaaactcagtctcaaaaaaaaacaaaaaaaaaaagaaatatgcctctaaataagccacaaactaaacaaaaaatcatagtagatattagaaagtatatgaaatagaattgaactttaacatacattctatatatagtttgtgggatgtccttaaagccacgcatatagagagatttattgctctgaatgcatattaaaaacagaggtaaaaatcactgagccttagctcacttagatcctcacttacgatctatctcaagaagtcggaaaaagaacagcaaattaagcccaaaggaaatagaagcggctgggcatggtggctcatgcctggaatcccagcactttggagactgaggtgggtggatcatctgaggtcaggagttcaagaccagcttggccaacatggcaaaaccctgtctctactaaaaatacaaaaattagctgggcatgatggggcgcctgtagtcccagctactcaggaggctgaggcaggagagtcgcttgaacccgggaggcagagggtgcagtgagccaagatcataccactgcattccagcctaggcgacagagtaagaccctatctcaaaaataattaacaaaatatatatatatatatatacacacacacacacacacacaattcaacagatccaaaagttcttccttaaaaagatcaataaagttgataaacatgtggaaagattgattaggaaagactgggaggagagaagctaaagataatggatatagacaactctgttgagggcttttgctgagaaatagggaggtagtgggaggtgtgggccatgaagtcaagagacgagacgggtttcggaaaggacatcataagggtggacaacattacacttggcttgtcatgtttgttatttgttaaataaataaatgtttatttaaacatttttaagaacatttaacattatttaaaaatgtttaaaaattatttataaacatgatttttaaatgtttatttaaatatgtatttatttaacaaatattcattgagcatctactatgtgccaaggatggcttcgacacttgggatccatcaagttaacaatgtaacttgagctcatagagcttcctccaagagcttccattgtaacaggaggagacagacagtgaacaataagcataataataatgaatgatgcatgctgtgggaaagaaggcaggaaggaaataaggaagataggaaggaaggaagagaggaaagaaacaagataaagcggctggaagtccaagtgggtctcagcctcttaggtggagggtggtgaggacttgtagaagctctcttcctgttatttctatatttttagttaaactatttctcatgactcagaatgtatcttttggtttgtcttttggccttctattgtattgtatggcctgctttggattttcttttgctgacactcatcaaagttggcccttaaccctggcagtcatttgctctaaatttttaatgactcgaagcctaccaaaagtgccctgcaacaagggtaaaattagtagagctctttggtcttcaacccaaacatgccccaaacttctctagggatgcctgcccgggctaccatgggctgcttccagacatgatttcaggaaggatgtgggatccacagtgtgtagctttaaggctctgtcacttacctgtcgtggataccaactatggattcagtttcttaacagtggaaatgggtgtgtgttaacatttccaaagcaattgactgtgcttcttcgtcaggtgagcacatgcagcccgtgagacccaggatgccagctgtagctttggtttgcatgaagaatgcacacgtggaaatatttgggggtttttgtttgtttgttttgttctgtttgagatggagtcttgctctgtcgcccaggctggagtgcagtggcgtgatctcggctcactgcaacctccacctcctgggttcaagtgattctcctgcctaagcctcccaagtagctgggattaaggggacatgccatcacgcctggctaatttttgtaattttagtagagacggggtttcaccatgttggaaatacttgggttttgaagccagattcggtggctcatgcctgtaatcccagcactttgggaggccgaggcaggtggattgcttgaggccaggagttcaagaccagcctgggcaacatggcaaaacgcagtctctaccaaaaatacaaaaattagccagtctcataacctggtctcaaaaataaattaattaattaaaaatttttaaagtattggcttttatttatttatttattttatctgtgtggcaaagggaagggcaggattaatttatgcttctcagttattggggacaataaggagataaccattagagaagagaactgaaattgaaaaatcagcttctttatttatagccattggtagcagaattcctatagagaatttccagaatggaagctggcccaatagtcccttatccatactctaatcttcccacgtttccattcatatggctttcaaagtggtagaatattggctgataagagtaacctttgccgggtggtgcggtagctcacgcctataatcccagcactttaggaggctgaggcaggcagatcacctaaggtcaggagttcaagaccagcctggccaacgtggcaaaaccccatctctactaaaaatacaaaaattaggtgggtgtggtggcatgcacctgtaatcccagctattctggaggctgaggcagcagaattgcttgaaccctggaggtgaaggttgcagtgagccaagatcgttgcagtgagccgagatcgcaccattgcactccagcctgggtgacaagagtgaaactgtctaaaaaaaaaatggagtaacctttacagcattctactcgttctttctttcagagatgccataacaaaaatgaaagatgtctacctaaagaatcctcagatgggagacccagccagtttggatcacaaattagcagaagtcagccaaaatatagagaaactgcgagtagagacccagaaatttgaggtatgaaacttctgttgtggaaagctttgttggaaacgaagaacaggtgttcctcggtgtagaatggtgtggggccctgacgatcctctcactgggaggtacacagtgggaatggcaggctgtttcaggagttatggtcaaaggaaaaatacactcttcgccgttgaacattctcctactcatcatagcctatcttaatcgtggctgtaaaacctgacaatgtttaatgttgtatctgtatacggtgcggggttggcggggttgttttttaattttagagacaggattttgctttgttgcccaggctggagtacagtggcatgcttgtagctcactgcagccttgatctccttggctcagcctttgaggagctgggattacaggcacatgccaccatacctggctaacttttatttttcaattttttatttgttttagagttgaggtcttgctctgttgcacagactggtcttgaactcctggccttaagccatcctcccaccttggcctcccagagtgctgggattacagctgtgagccactgtgagccactgtgcctggccagtattttttgtactttaagttattctgcttcatctcatggtaataaaattgggagtatagagcgatccgttatcccagtgaatcaaagaagcaatgaaaaaaatcccctgaaatatacaattgttctctcagcaggcccattatggaaagggtgtgtgtgagaaccagcagcaaacacaaaggagaaacaagcaggaaacataaataatcaaagcttgagggagggagaggagcactcaaaagctgtcaacaaaagcctcctgaacccactctccctaccacgtttaaagactacagagcatggaaaaatacattagcaaccgattctaccagtcagaatagattgtttccagcaatgaagggtcaactatggcttttttcattcttttttttgagatgaagtctcgccctgttgcccaggctggagtgtagtagcgtgatctcacctcagtgtgacctccacttcccaggttcaagtgattctcctgcctcagcctcctgagtagctgggactacaggtgtgtaccaccacacccggctactttttgtatttttggtagagacagggttttgccatgttggccaggctggtctcgaactcctgacctcagatgctccacccgccttggcttcccaaagtgctgggattacaggcgtgagccaccacacctggccagctttttccattcttttcagaatccatcattaatgttcatttgagcatttagaacttagaacggtccttttcttattattattcttttttttgagacagagtctcgctctgtcacccaagctggagtgcagtggtgcagtctcgactcactgtaacctccacctcctgagttccagtgattctcgtgcctcagcctcccgagtagctgggactacaggcatgtgccaccatgcccagctaatttttgtatttttaatggagatggagtttcaccatgttggccaggctggtctcgaactcctgacctcaggtgatctgcccacctctcccaaagtgctgggattacaggcgctcaccaccacccccagctaatttttgtactcttagtagagacagcgtttcaccatgttggccaggctggtctgaaactcccaacctgaagtgattcacccacctcggcctcccaaagtgctgggattacaggtgtggccaccgcgcccggccttctcgtcatttttattcctttgacttgtttatactgtttcaaatgctgaaggtcattttatctactttaatttttaagtacaagtttcatttctatcaaaaaaaaaagttacactcctaaaaaataggaagtgtggctttcaaactgagtcactgctttaagcatggctgtaccttcaggtatcacagggcgacctcatggtcaagaaggaactagaagtgacttatccaagactgcactgctgcttaaaagcccaaggggatagcatagtccagtgtgctttctgccccatcgtgggcaaccacataaatatgagtttgtttctatgtctccaacttcgggtgaaatggaagcaaccgtccttcagtacatttgaacagtcgaaggcagaaaacgtggccattctgcccccacgtggacttcctcacattgggttaaatggccaagagtagcccctgagtttgggaccttaggatgctccgggctggccctcagatggcctttgggaccttaggacactctgggctgaccctcagatggccttaggttggagtctctcattgcttttgtctccaggcctggctggctgaggttgaaggccggctcccagcacgcagcgagcaggcgcgccggcagagcggactgtacgacagccagaacccacccacagtcaacaactgcgcccaggaccgtgagaggtacagtatctgcacagcgcctgcctctggcaagggagcctgttggctttgtatttatttctaaattttggaatctggaatgaccataaggcacttgttcaatgccaaaatgtctgttgcgattgacctgtcactttttccatgatgcagatttataattccacatgggatgggtgatctgagcgtgcgatgatttaccatggcctcagttacagcactcgctgaggggcggggttgcaagtgctctccagtcgcagggactcaatctgagtcctccctggggtcagtcgctttagttgctttgtgttttcctttcttgagcagcccagatggcagttacacagaggagcagagtcaggagagtgagatgaaggtgctggccacggattttgacgacgagtttgatgatgaggagcccctccctgccatagggacgtgcaaagctctctacacatttgaaggtgacatttcatgtctgctggattcccctgccttttataaaccataatatctgagttactcttctttcacttttccttccttccttccttctgatcatttttattcctttgtccttccttccttccttcctaccttcccttccccttccccttccccttccccttccttccttcccttcccttccctcccttcccttccttcccttccttcccttccttccttccttcctttttttcatacagggtctcgctctcttgcccaagttagagtgcagtggtgcaatcatggctcactgcagccttgacctcctgggctcaagtgatcctccaacctcagcctcctgagtagctgggactacaggcaagcaccaccatgtccggctcatttttgtacttttgtactttttgtacttttcagtagagacagggtctcactatgttgcccaggctggtgttgaactcctggattcaagcagtactcctgcctcagcctcccaaagtgctgtgatcacaggtgtgagccactgtgcctagccacactcttctctttctgtgaccagaactttctttagaagccttccagatctggccgggcatggtggctcacacctgtaatcctagaactttgggaggctgaggcgggcaggtcacttgaggccaggagttcaagaccagcctcgccaacatggtgaaatcccatctctactaaaaatacaaaaactggctgggcatgctggcaggcgcctgtaatcccagctgctcgggaggctgaggcacgagaatcacttgaacccgggaggcggaggttgcagtgagctgagatagcgccactgtactccagcctgggtgacagaacgagactctgtctcaaaaaaaaaaaaaaagctgcagcagcagccttccagatccttctctactatgcttttatcctactcatggtatgattattatttggttgtatattttgacttttggttcgtataacttaacagcttccagagagcttgcttcactgcagcagacgatagggaggatgatcatttcatccattcatttaatatctagtatctatagcgctcctgtcttgtaaaggcccatgaagtggggggatgcaggtcgtatgatatggcacctgcccagagggaaatcaggcagacacacttaaggagcaagcagcggctgggtgcagtggctcacgcctgtaatcccagcactttgggaggccgaggcaggcggatcgtgaggtcaggagatcgagaccatcctggccaacatggtgaaaccccatctctactaaaaatacaaaaatcagctaagcgtggtagcgcatgcctgtaattccagctacttgggaggctgaagcaggagactcacttaaaccaggagtcggaggtggcagtgagccgaggtcgtgccactttactccagcctggcaacagagcaagactccctctcaaaaaaaaaaagcaggcagtttgcagtgtttgccagaagagggatacagaggaacggggaggacaggggagaatgaggtcgcttccttaaggaagtttggagaacttgccatggcatggggggtgtggccagaaatgggtgtggtgtggctggagcttagatgtcttaagtcctaatagtgaaatgtggcactaaagagtgggaagtgccaatgggggcgaggtagggaaacatctgggttttatgtggcaaacattgaggagctatgggaggtcccctagcagggtgtcgatgcagtcagagctgtaccttaggaaagtcatcgtcagatgtgtaggatccactggaagacatggaggatggttagaaagactagcccaggccgggcatggtggctcacgcctgtaatcctagaactttgggaggctgaggcaggcagatcacctgaggtcaggagttctagaccagcctgcccaacatgatgaaaccccgtctctactaaaaatacaaaaatcagtgaggcgtggtggcgggcgcctgtaatcccagctactcgggaggctgaagcatgagaattgcttgaacccaggaggcagaggttgcagtgagccaagatcgtgccattgtactccagtatgggcaacagagggcaactctgtctcaaaaaaaagaaagaaaagataaactagcttagtgtttctaaaccaatgaaccttgaaacgatgtcctgcagagcgttaataaggaggccatgaaagaagctctcaggccaggctcagtggctcacacctgtaatcccagcactttgggaggctgaggccaagagttcagggctacagtgagctatgatcgtaccactgcactccagcctaggcgatagtgtgaaaccctctctaaaaaataaataaataaataaataaaattacgaaaaagttgcattttaatataatgaataaatttttaaaactagcaatcagagctcaagtaagtttgggaagccctgggataaataaattttacagatttctttactacaggacttttcagagcctttaatagactaaatgttcattgtgacaaaataagaaagacgtaccagtttaaacgttcccagttttacttcatattccaaccatcccccaccgtaccctgttgccctgttaacagctccctaaactctttgccttgcagaaaactggggggtggtgggcagcctttgaaatgatcctagcagaaggtcttgggggccttgttcaaggaatggatacagagatgccgccattgacaaactgcatatattcggggctgatcaaaagccaggaacaaaaaggagaggaaatccaagacggctcccagagttgcattcctgggaggacagagaggtctagggaagtggaaaagcaggaggatatagttaggaggaagaacagtgaatccaggttcatctatgttgtttcaggtgttggggccatgtctaggtggcagtgtgctgcagacagtgggaaaagtggaatcttggctgcagaaagtaccagaatggaagcaatatgtgaggacagtgtttaaagaggagcagttgggccgggcgtggtggctcacgcctgtaatcccagcgctttgggaggccgaggcgggtggatcacctgaggtcaggagttcaagaccagcctgaccaacatggtgaaacctcgtctctactaaaaatacaaaattagccgggcgtggtggcacatgcctgtaatctcagctactcgggaggccgaggcaggagaatcacttgaacccgggacaagtggcatcacactccagcctgggcaacagagcaagactctgtctcaaaacaaacaaacaacaacaacaaaaaaattgggaggctgaggctggtggatcacctaaggtcaggagtcagaccagcctgaccaacatggtgaaaccccatctctactaaaaatagaaaggttagccgggtgtggtggtgcacacctatagtctcagctgctcgggaggctgagacaggagaatcgcttgaaccggggaggtggaggttgcagtgagttgagattgcaccacagcactctggcctgggcaacaagagcaagactccatcccccacaacccccccaaaaaataacagacaaaagagaagcagttggagccacgagggtacctttctcctgagagagatccaagtgagacagaagaagactagagaagagaaccaaagatttatccagtgagaaatacttaccattctgggagggaggagaaagagggccctggaggacttagagagggtccctagagagacagaggtaagaacctggacatttctgtgcagaaggagatggttttgaggcagtgggtgaggggtccgtgcatctgagaaggtccgagtggggtgaattttgtgtggacttcatcttcgacgacacttgtttcattgcgaaggccactgtttgcttcctccctgcatttgccaagacatctaacatatcctgatattgctttttcaggtcagaatgaaggaacgatttccgtagttgaaggagaaacattgtatgtcatagaggaagacaaaggcgatggctggacccgcattcggagaaatgaagatgaagagggttatgtccccacttcatatgtcgaagtctgtttggacaaaaatgccaaaggtgctaagacttatatttaataccataaaaaaaaaaaacttaaaaaaaatggagttgtttctccccacaaccgtgactgttacaggcagttcctcaagagactggctggcaagcaccataatgcacgttctcctgtagtctcacgtggacttcagggtccgggcacctgaattgccttgtctagtttgggctgtaatcaagtttcacttgctgatgaaattttatgtggaaagctgccaaccgccaacttacagctatgtcattcaaaatctgataaacatttcttcttttggcggtatctgtagattaaaaaaaaagttgcattgtagcttctcatctttctgaatttaaaagccggcacgcatcatgcaggtgccaaagacttccctactcttgtttatatctagtatccaccatacactgagctacattaggtggttacagattgtaacttaataaactgaactgtgttagtttgttaaattgtatactcattcacttgggaggaagtcacaagtgaaataacatctccttcttgactaaagcagtaaataagattcttatattggcaccaaaagtgtgtgtttttacttaaacctggtcagcatccttggtagggcatcacgagtaccctgttccatctacatgatcccagacaaccagctgaaatctggaaaagtttggtgaattgaccacttgatttttacattgcattgctgattttccaagtgtcatcaaattgacaggtttttgttgttgtgtttgtgtttttgttgttgttgttgttttgagacagagtctggctctgttgcccaggctggagtacagtggctcactgcaacctccgcctcccccaggttcaagcgattctcctgcctcagcctcccgagtagctgggattacaggtgtgcaccaccacgcctggctaatttttgtatttttagtagagacgggttcgctctgttggccaggctggtctcaaactcctgacctcaagtgatctgcctgcttctgcctcccaaagtgctgggattataggcgtgagccaccgcacctggcccaaattgacagttgatcagatgtgctagtgctgtttagatggagttacttaaaaggcagagcgtgtccctgcatcagctccttttggctgtgatttcctctcacacttggttcggtttctgttggttttccaagtagagctgcactcacgcttgcccaggtggggctataaagagaacgtggtgtggcagcaaatgcttctccccacagacacagatctcagcacattgctgttcaaagactttgggggtttgcttttgtttttttgttgttgttgtttttgttttgttttgtttctgcttttaatcattggcaaggtttggatttactggaaattattttagaatttctggctcattttatacaattaactgtagccagaatgaagtaaaatgtctcaccacatcgaaaggaatctaggccacatgagaatttgcatttttaaattggcattgatgtgggaggggagatagtgaagttggtcacatgcgtagatggttgccaggcatttcactgtgcccatttccagaatccaccccgagatcatagacaacccactacaaatgggtcagaatgaaggtgttgggtcagattctctttttatttgattttgaaaattatttccttgtgtccttcctactttcaagtaggaaattagcccctgcctgcctctacattgtgggttcatttgatcagctcaagtccatttaaagctgattttccaagcagtagctgcacattcgggctctagaacctagtaggggttctggatgctaggggccgtgtttcaagattctcacagccagttaacctttatttagtgacagcctgattttttaaaaaactttttttttttttttttttgagatggagtctcgctctgtcgccaggatggagtgcggtggcacaatcttggctcactgcaacctctgcctcctgagttcaagcgattctcctgcttcagcctcccaagtagctgggactacaggcgtgtgccaccatgcccagctaattttttgtatttttagtagagacagggtttcaccgtgttagccagaatggtcttgatctcctgacctcatgatctgtccacctcagcctcccaaagtgttgggattacaggcatgagcccgtgcctggctttttttttttttttttttttttttgagacagagtctcactctgtcacctagactcaagggcaatgatacaatcctggctcactacaacctctgcctcccgagttcaagtaattcttgtgcctcagcctccccagtagctgggattacaggtgcctgccaccacacccggctaatctttgtatttttttttttttttagtaaagacaggttttcaccatgttggccaggcttgtctcaaactcttgggctcaagtgatccgcccgcctcagcctcccaaagtgctgggattacagggtgagccaccgtgccaggcccaaatttcttttggatacttttgctggcatagtatcaataaagccacccatcccgaccccaggcctctttgtaaatattgcagcaagaaaatcagctgacccttcaaccacaaggatctgtttaaatgagcagtaggaagtttccagctttacccagtaaacaagtgaatgggaaacctaaggtattaaaatctgacctttctatccgatgacaaactcatttccagtctgtgaactcctggacaaagcaaactaaccactgaaaaactcgaaaatagggcaagacgacattaaccttgtgaaagtctgctttgaaaaaaggcattctgtcaagctgtgtatttttttcttgattattcaaatttatttcgttattcaaatttaattcagaaaatagctcagttggtttcagggggaatggggtgggaggggtttgggcacataaatttatgatgataattttaaatgtacgatcattaagttgtatgcctcagtactataacaggtgaatctctgtaatattgactaaacagttaaaagatattttgtaaatttcaggtccatcgcatcaatgcatgaaatattagaaaaccaaattccaaagaatcaggaatttccatttccacccaaagtatactttattatcttctagcagttgtctgttaatataaaagcagcaaaatctcagctacttatataattttctccttttatttgaaagttacacttagagattaataatatgtacagagaagcttttcctgcctactctgtttataactctgtccaacttgcccacaaacactgccctccttcaacccatctgatgtgggcaaagccactgttttcttaggcccataactcagtgcagctgttttatttttataatgccggtcaacctttttgtgtgtgtgtgtgtgtgtgtgtgtgtgtgtgtgtgtgtgtctacgatgtgcttatttaataattgccaaaatatttagactagagtaacttccggtgggtcaattggattgtgactttcttttgtggttttttggttcttcgattgctctctgttaaatattttcataattccccccacagaatacgtgtgtatatactgcaacttaaaaactaaaagcagtactcgaatgagttgttttaatgttgtacttttatctgtttgttttatgggttctcctgctgcctaatgacctttctgtttttataactgccggaaagccgcgaagcctctcgcatggggagctaggtccccgctgcggctccgcacttgagtttattataaactctggggttctgagtaagttttgtttgaatacagcaacatgattgtctctttctattcttatcctaaaagactctgtctggcatcttttagttgtaccctcgtatctgcttctctaataaatgttatattttttctcagtattgtgtattttaagtgacttttcatgtttccaagaaaattattctgtgtaatatgaatatttaactctttcatctccagtaataggggattttctagcccaatgcttttttaaaaattctgcctcccacccctacctcctcctttaaatgatggcacctcccctgtttctgatcttgcgtgcactcagggcctgagaagtctgtgtttcttttgtttcttttctctctccttgagatgaagagcttttcacggtttattgcggaatgaatacagaacaacaggttttccttttcaccaaagattttacattgtactgctgaagagccaagagtttccttctgagagaactggaccttcatgttccttgtaccattctaggaaattgatgcatttcttttcttttcttttttttctggagttgaattctcactctgttgcccaagctgaagtgcagtggtgtgatcctggctcgctgcagcctcgacctccctgggctcaagccatccttccaactcatcttcccgaatagtcgggactacaggcgcatgccaacatgctggttaatttttttttaattttttgtagagatgaggtctggctatgttgtggcccaggctggtcttgaactcctgagctcatgcatcctccctcttcagcctctcaaagtgctgggattacaggtatgagccactgcacccaacctccgtttcctttttttttttttttgagacggagtcttgctctgttgtccaggctggagtgcagtggcccgatctcagctcactgcaacctccgcctcctgggttgaagcgattcttctgcctcagcctcccaagtagctgggattacaggcacctgccaccacgccaggctaattgttgtatttttaatagagatgggttttcaccatgttagccaggctggtcttgaactcctgacctcgtgatctgcctgcctcaggctcccaaagtgctgggattacaggcatgagccacggcgcccagccccggcctccgtttcttactttctctcaaaactaaacttatgagaaagacgagttggggcggatggcctcatcagtctcctgtttgggcttctcttaactctgaaggaaagaccagctaaaggctagagagaaaaccgtgaaagttcctcatctcagacccgccctgtggtaaccgattgctctaagacgccccctcccatccctcccctcccactaccctcccctcccagggcggtgcagtttgtagccaagagcaaaatgcccgcctggaacccgcgccttcctctctaacagagagtttctctttctgtttctctttgtgttgtagattcctagaggggagtgcctgcgagcctcgggtgagccttcctggaggagcctccgtctgcttgttcccacaggcctccagcgccctgccctgtggacagcccacccctccgcagccccatccctgcggggcggtctctctctctctccagcatgctccctgcggccctgccctcccgcccagcccgggccacctcgtgggggacaagtctcgccagcgcccacccccatggctcgggtcagtcctcatcgctccccctccccaccccgcgcaggccactgagacggtgggacacacgcccccacctgctccttcctgggccctcagtccacccgggctcgtcctggcagcccttccgcgcttcacacagtgccttttgtgaaagtgtcatcacgggtcccctgaggagacaaggcaggtccagcgcacatcaggcggactgagcactcgatgtcatccgtgtcgatgtcatccgtgtgtcccagactgcctgctgtagaaaacacttcctcctctcctgagtctgtgaagtcctcagtggtcctttttggattctaggcttgcacctcatactaaacattgaccctttcactatgccctcaacctgggagcatctggcaggcaggggggcaggtacacacacacccacaggcacacccaccagtacacacgcgtgcgcatacacacattttggtttgacgccctgttttcagtggcctggggaggtccacactggaagtcgaattccagctcgccttgttgactcgcctgtgtccaccggccatgaggagcccacgcctgtcctccccatcactttcctgtccctgagaactgtagatcatgcgcttgtgagcgaggccctcccctctgcaccagctcattgcaaagcgaacatcctctcctttccaggagccccaggattagcatctgaaaagggtagcacttccttttttgttgttgttttttttttttttttgagacgggagtctcgctctattgttcagactggagtgcagtggcatgatctcggctcactacaacctccacctcctgggttccagcgattctcctgcctcagcctcccaaatagctgtgattacaggcgtgcaccaccacgcccggctaatgtttgtatttttagtagagacagggtttcaccgtgttggtcaggctggtctcaaactcctgacctcaggtgatccgcccgcctcagcctcccaaagtgctgagattacaggtgtgagctaccgcaccccgccgaggttagcactttcatcaccaaagaccccgtgcctctcgtggtcctttgagggatcccgccgccaccacccttgtattttatcacgtgctcttcagggcatgtggaattcgttgagtttgcttttagagccaagtttctttccctgtgtgggtttttgaggaaaacctgaggtcccctaatctgtggccaccaccccccccccccgccacgccttagagcagagcagcccctcctctcatttggtgcagaaacagtcaagaggaaccattggcctagagctcctgtgaccgagagcgccacggaagcctggggatgacgtcgggcagctttattctttgcttggctttggtaactaggtggtcccctcaagcatcctcagttcctcttgctgtttatgaatctaagacaaggaagtcctatagaagccaaagggacagggacggaaaggacaggtcccaagggatggggctgtctttacttgtggaaaccaggaaattgctcctctcagccaaccaaggttgaccacacaccacccttccggagcagctcagtcagccctcggggacgagaaaccacaagcgcagagacgctgaggcccaggcaggtgaagaggaagtggctttgggtttttaaagtaggtgagcgtgagcctctctgactgcttcttccccgggggggactgcaaaccgctcagggttgcggcagagccatggacttccggtccctgcaacgggtgacctaagcgtggtgcacccatcagtcacgcaggaggactgacttgacagacgaaagacaagcccggatgacacagggtgagaagagtcagggccgcacctctgtccctgcaaaccaacaggtgcatggtgagtgtggcagtccccacagctccacaatgggctcccccgccaacggggacgacagggatcttcaggaacttctgacctcaccaagtcaagtggaccactctccactccacgaggatgtgaaacggttctttaaaatgggattttagagcctcgggaatgcatgtgcgtcgcatctttcatattatgggtcaggatagattcatttcttgcaacatagtggaaaagatataagctgcagtaatttgctctttgaatgaccgtcacccccagtataggatatgcttgtatccccccgtcactcctccgcctgttttttaaacttttccaccacctgcgtccaaaaagaatgttatagcgagtgctcttaaatgttgaacctgggtgttgcttccgggccagtctgcgtggctccatgaaaagctcactgctgccccagccgggcttcttagaggaggtcagttgtcctatgtatcatcatttactctgggaatcctactgtgaaatcatgtctgtatttttctggagcagttcacatagagtagaatgtggaatttcccgtgaacgtctccttcctcccccgtatctgccgcctgtcacttcgccaccgtgctagaatactgttgtgttgtaagatgactaattttaaaagaacctgccctgaaaagttcttagaaacgcaatgaaagggaggaacttgtcctttacccagtttttcctttgtaggatgggaaagtataaaaaggcacagaaggttgtcatgggctgttccttgggggtttttatcctgctcaccgtggagataagcctgcggcttgtctaaccagcgcagcgcaaaggtctcaatgccttttggtaacatccgtcattgcagaagaaagtttacacgacgtcaaaaagtgacgttcatgctaagtgtttttccagaaatattggtttcatgtttcttattggctctgcctcctgtgcttatatcatccaaaaactttttaaaaaggtccagaattctattttaacctgatgttgagcacctttaaaatgttcgtatgtgtgttgcactaattctaaactttggaggcattttgctgtgtgaggccgatcgccactgtaaaggtcctagagttgcctgtttgtctctggagatggaattaaaccaaataaagagcttccactggaggcttgtattgaccttgtaactatatgttaatctcgtgttaaaataaaatataacttgtggctccgtgtcacgggactgttttgttgcatgaagatatgaccctagttgtggaagcagcctggtgtcattggaagccccctgggctggggagctggcccctgggaggagctggagacctagatagctctcagttccacccccatccacggtggagggggaggctctcagaccgtggtgacgtggaattcgggctgatgtagtgcgaggattgcgagaggctgcttatggccaggagtattttttgcatgcacattcaactggttgctgctctagctctttggggacctcattgcttggggctggggcaggaggaggtggtgaaatgagggcacacctgagtttcattatttatctggtatcaccagtgctcaagccggtactcctggtggcgtggctggaatcactagtttctgtgaagctgcaggcagtgcggagctgtttcacgtggacaactcgaaagggcagcagccttgtgcctggcactggctggacatgtgcagtgggaggccccgtttccacagccagctttgaaaatttcaccctggccttttgggggaagataggattggtttgtgcccacacttctctgtgtcccaagggtttttttttttttttttttagcactgttttaggaaaacagttgtccaggaaatgacatattcgcagctacaccaagtgcagacctggcagctctgctgatgccaagcatcctcacttgcggagggcaggaggtgagggcaccaatatggggccattggtaacctctaaccacaagtgcgtgcagttggcttcaaggcaccattgagaattgctggttcccagtgtgacacagtgtggcacaagggaacaaggtggatctactgttatcctacccgaaaccctctcctctaggttgtcagcaaaaaagtccacttgggaagaatatttcgggactgcgcccagccgtctgtggggcggagacgggctgtctccacctgtgaacccccccatgccccacccgcccctgccgagccttctccaagagccgcaccagcgctgagaagcctagaacagagcctgctggtttggggcccccatttccgcgggtgtggacatcacagaggtcgggagcattgggggcgactagtttgttttctgctgcactggggaagcctcttgaagtaggaagttcctgactcaccggctccggggaggccacaagcctgtggggccggctcctccagcgggtcaggaaataccggcccgccccacgccctccacccgccctgggcacgcccgggcctgggaggcggctcctccgtccgcagaggtggtggggacccctggcgggagcagacggcagagcgcagcagtggagggagcaagaagggccccctgcggtgaggaacgagatggcggtggacagaggcaggattcggtcgtgcccccagctttttttaaattgaagcgaaagactcagaaatcgtgaaatgtatgggacagcctggaagctccactttgaactgctgctgccagagaaggatggtgggaaagagccaccatccagacgggttccctggctctgcgcactcgcctgggggaggcctccttttccctggtcctaaaacgctttcccgataggggaggcagggatctgtgttgccagcgccctctgagacccgggatgagcgtgtgaaggctgccagcaggcacgtggcagccccttggtgtgtcagctgcttctccagggtcccactgagtgcccattcggccttgacttgagcactcctgcctcccgttagacctccagatggtatagtgacctccgccggggacatctccggaccacaaaaggtacagaagaagcagaggaaggaccctatccttgtcctcagagctaaggggccgaaagctgtgggaggaaacacggacccactgtccccgtcggggatggggaaggctcccttcctccctgcggcacctgctggacggacgtctcagcctaggacagggccgcatcccttcagtccgcacagcccctggctgccacgctgtgccgagccctgcccttgagaacctgtttccagttccagctctccacaggccccctcatctaggctggtcccgggtcaaatcgaaggaaggaatggaggctgcaccctgagaaaccctgggacacccttccagaacatacattgcctaggctgtctactgctcctagctttccccaaaggcgtgtgtttcttctgcgcccagctcacccttgctccgtccaggtagcaggtgtctctctgtgtaggtgaagttgcagaagggacgagccagagggggctgtgattccgaaacctctgctcacttcccccaaggctctctggggctcaaaattaggtagcattaagaccctcaggataatttatgtttgcactgaatttaaaacagaacaatggtaggaactacactttttgggtggctgcgccttgcaaatgtattcggatgcaggtttgtgagcagcgccatggccgacagaaccacaggcaggcggcaggtctcctgcagcctcccccacggtgcaggggcgcctttccggctcctctaagaagcgctgctgaagccacgccctggcttagcgcggaggaggagccaccgtggggcaccgtggggagcgaggcctgagccccgcctccccagtcaccgagcacttcctgtccctgctcagtaatcaagcacagacttcagatcttggcatctcagtctgaactccttaaaagccaggtattttaaaagaaacgttttaaggcaaattggtacctatttccagcccacctttctgtagtgcaagaactgtctccaaacctcctaaataaatcttccagacaaaactttcattctcattttccatgttcaatgtcaatcacgtggattgacacatatctaaccttcaaatgtaaacaaagccaaaaatattgcttagagattcccacataaagacaaaggttgctttttcctcttccgggaacgctgtctacaggcactcagcatggcccagtttcccaaaccgtcataggctttcctagaatacagcctctaacagcactaggccggcccgaacccctgggaagagaatcgtttacctttataccaagattgggaaactgccaaagtctgcacatggcatgggcctgggctgactccgaggggtttgtgctgtgagacctaaagctcctatgagactgccccaaagcaaaaacatgtcagcaagcggccaggcgtggtggctcacgcctgtaatcccagcactttgggaggctgaggcagaaggatcacttgagcctaggagttcgaggccagcctgggcaacacagtgagaccctgtctacaaacaaaaaacccatcagcagtgcatctggtgcttctgtgtgaacgtgttcccgacaggatcaagtgtgccttcctcatcaaggagcagaaagttgctgggaaggtgttaagggcaggagcacagtcagaaagctcaattttaaaatgatgttttggccgggtgtggtggctcatgcctgtaatcccagcactttgggaggctgaggcaggcagatcacaaggtcatgagatcgagaccatcctagctaacaccgtgaaaccccgtctctactaaaaataaataaaataaaaaataaaattagccaggcgtcgtggcacatgcctgtagacccagctactccagaggctgaggcaggagaattgcttgaaccccaggaggcagaggttgcagtgagttgagattataccactgcactccagcctgggcaacagagtgagactctgtctcaaaaaataataataaaatgaagcttttttcaggaaaaaaaaaaaaaaaaaggcgggatgagggaaccacatgcaaagagccacctctggggtcaggcaaggtggccgactccggaggggccccaggctttccatggaactggcaatgtgtcatcttggttccttgtcaccgtgttatccttgcatatgctgaaatgtttctgtacgctcgtatctgatagcggcagggaagcagaagcctaggggagccagggtgacatcattttgagttcggctccacctaaaactagcaagggaggctgggcccggtggctcacacctgtaatcccagcactttgagaggccgaggtaggcagatcgcttgaggtcaggagttcgagaccagcctggctaacatggtgaaaccttgtctctcctaaaaatacaaaacttatccagatgtggtgacacatgcttgtaatcccagctacttgggaggctgaggcaggagaatcgcttgaacctgggaggcagaggttgctgtgagccgagatcgtgccactgcaccccagcctgagcaacatagcgagactccatctcaaaaaacaaaaaattaggcacagtccaggccagtcacaacctaagatgtttacgtctgaggaagcagctacgtaacgcctgcgaggacaaactcctacgatggagaaggttcagatgccacacaacagtgtatgcttgaagatgaccacagtgaggcttcgatgtgcttatgcactaagatgccaaggatggctttctttaaatcaacagagcaatccactgtgtcaggctgtcagcccacctgacagacacagcgtagcttttctatagctaagacccctacataagaggagttgaaaacagcgacgggcatccctccacttgctttctgaggacgctctactctgtacctgagcagctttcagtaaactcttctcagtgaactctgcgactcaccttgagtttcttcctgcatgagatccaagaaccttctctaggggtctggatcggaacccctttttcctgcaacaatgggatttcacaaataaatgttgataagttatatataaaaatctcaagttcttctctcccccaaaatgagacccaacaaaaaactcagactactgaacaccagtattgctgaacgcccagggccagtgtgcaaaggggaggtaaccccctgctcacggccactctggagccgcctgtctgggtggctggagggagactagcctgtgggatgtgctggcctcaatcactggccacatctggccctacttctctgaggctggggctgattccaggaaaggagatgccaataggcctttatagcagctgggtcccctcttctgctcgcctccacagcctccaggtggtctctggtttcagaaagccacatggaaagccccctcctgggcctggtgatgtgcaatgtgagccccagggcttggcgggctgtccgcgtggcggagagcctcaccttccctccagtaacagaactgcggtgaaggagagacgactgtgtggccgtgggaacatttattctgtgtttattctgacattttgaacacaaactagacagcacagacatggggcccgatcccagcctgcacagaagcctctctgcgtcgcgacagtgcagcgtgcggcctctggctgcagcgccggctttcagaaggctggggccaatgccaggggaaccccaggctcagcagggagggagcaggatctgggacagaagatccgaaaagtgaggcctcagggcctctgcgggacccacctgctggaatttccaccaccacctgcttctacaaagactgatagaaacaaagacgcagtagtgtggggggtctggtcccagagccccttccccacccacgccccgtctgctttgatcctgatgatggtcgcacctcgccctggcggtttctccaggggctttggtgccttgctgtgctcagtggctccctccactcagcatccagaggctgcttcccaggatccacctgagcgctgcaccctgcacagcccccacatccctccaggcgggctctgcactgctgctgctgggaggaagggaaagtctgtcttctttagcatcagctcgggaagctgcctttgcctcaaatggccaagctgtgaggtatccctgtttcatcatccggttccctggtgggggctcagcaaatttcccatgaagatgaactgctgaacttcgaggcaaattacagccaatccagggggcaggctcagcaggacgcggtgtgggggaccagctgcctccagaaacatcccccactggcagaaatccaacctcctcctggtgttccaatcagcaatgagtccagagtcttcagtctgcaggagaagtgctgagagcagcccgggacttcagagccttcctggtgacgcccaggagatgcagaggtgcggcgggaccaccagggaggacctgtgagctcctcactggccagggcttctggctgcgctcaccggccctgagcagctccctccgagtcttcggggctccgggccaatcgcacagtggagacgccgtgaagcagcagctactccctgactctggcccaggccgcagcctctgtctgacaggggtagcatcgggctccagggacaaagctgggccgagctagcaagaggacagttgtgggggacacaacgatgacagtgactggcagaggcactgccaggacaaagacccaaattaacgtcacagagtcttggtcgtttcaacaagcctgaagtgcatatattttctagttgcagcgttactgcaaaccaaaccaacttttctgcctctttacacggcggggttctgcagcagcccggcctctcttctgggcacaaacacgccttccgcggggtggggcacatggggctgtggggacacgggcactcagcagtggggccgggccatgtccagggccctcccacatcctccaggaaggtgctttcagggacctgctctttggatgttcaaaaggacatgtgagggtctctggagagtgaggagaggacccagagtgccatggagggaccagccggggcgacttacagactagcccagcagatcacacggcccgcgtctcggcttcgatcttctgctccccgtgcaggttctctgggcccagcggctgcgccacactctggcggatggcaatctcggggccacctccatacaggctgttcaggtaggtccaggtctcctccgaaatctgcccgtagtcagctcctgcagggcacgagaggcacccctaggctcacctttgcctcctcaaggaagccaccggcctgggcagtgggggctccgcagggccaggccccgaagcgggaagacggcaaccagggcttctatgcaaagctgtcagatggaaatcaggatttcccagaggaatgtccatcccgctaagggccccggataacacatctctggctgtgtcccttgttcctgggggtggggctgacataaacagcagggtgggcaaggccagcagcaggcagaggggtgggacctggaggacacaagcagagaccaagccccttgggccatctctcagccgcctgggtctggactcaggtggacgtctcagcctgactctaagacaggtggtaagggggctcctggaaggacgggactgggcagcagcctggcagccaggaagggcagagaggagcctggctgaccccagggggaactcaccctgcttcagctggacatggccgcttcctttgacctgtgcaatcctgctgttgtcaatgggcccggggggctctgcaacagacacagcgggctcgggttcagcccctgccatgccctccaccctccacagcagcagagccatcccaagtggggccgccccaggcctgggggtcagcgtgaagtctctaatggatgaggcgcctgagccacccaatgctcctctgtggcagtctgaggacccagcagagggaatttccaggacacacgagatggtctcagactctgtgcgggccgcaggagctgcggtggatggcccatgcccttatctctgctggcagctgccgctcaccacgccccttcccctctgcccagctatctcatttagcctcggcaaccacaggacaagacagaggtttacagagacagagccgaggcctgggaaggtgaagtaaccactcaggtcatagctggtagaaggcaaggccagcgtccaggccagggcgagggctccggagctacattctcaaccacagccatgctgaaggcctcagccaccaccagagaggcctcacggtggccctggcaccttccccgactagcgggatggcaatgaggcctcccttcccaagcacaggtgggtgctcatgctccacaccaagggtcccgtgagcagaaccgtgggctctacccaccctgccgggccccggagccacaggttagattatgccccgagggcgccccagccgaaatttttaatgcaggtttaatagtttagagcctgtgggcttccatggcttggttctgctgttcttcactggggacttgggggaccctgggagcttgtgatggggcctgtctccacctctgtaaatccaaggagtcagatgacaaatctgtcatttcgggcgacacactcccctgaggaaagggccttgcaggagggcagagcagcttgctgggcatggcagggagtggagaagggcagggggcgcagagcaggagcagcttcctgcctctgggtggggacagtgatccccactggggactggcaaagccccatgctctctgttcaccctggatgggtggcacctgggggcaggcatggggcctgcaggagcccctgtgtgccagccctcccctgccagcatcccatctcccaggaggcccccagggcaggtaagtgccaggtcccccctcagctcaccgttgtccttccccttgacgaacgcctcccactcccggaaccactgcatgctgatgcagtagatgacgcccggcgactcctcggcctggaaggccttgttcaactggcaggcgggcagggacgggaggagacagagggcaggtcagtctctatttaccttcagcaaggatttcccaaatgcccccgccccagtccctcacccaagagtcttacaaaaacaccagatactcaaggtgaaaaatcaaacccccagacaagctcaaacaaaatgaacacacccatcactcagagaggacggtggtaacattttgtgggtctcttcaataactgtttgacccaactgagaccacaagggagattctactttttgagaaggaatctcactctgtcacccaggctggagtgcagtggcgcgatctcggcttactgcaacctctgcctcccaggttcaagcgattctcccacctcagcctcttgagtagctgggattacaggtgtgtgccaccacctggctactttttgtgtttttagtagagacggggtttcgccatgttggccaggctggtcttgaactcctgacctcaggtgatccgcccacctcgacctctcaaaagtgctgggataacaggcatgaaccactgcgcccggcctgggagatgctaattttctccggttgaatagaatgtgcctatctgctcagagaggcagctctccttctgacaggagcattttctttttcgagatggggggtggtctcactctgtgcccaggcgggagtgcagcggcgcaatcatggctcactgcagccttgacctcctgggctcaagtgatcctcccacctcagcctcctgagtaggttggaccacaggtgcataccactaggcccagccctgacagtctctttttcgtttgtgttctgagacagggtctcactctattgcccaggctgcggtgcagtggcatgatcacggctcactgcagcctcaacctcccaggcttaggtgatcctcccaactcactcagccctccaggtagcggggactacaggtacacatcaccatgcctggctaatttttgtattgtttgtagagatggggtttcgccatgttggccaagttggtcttgaactcctgggctcaagtgatccacctgcctcggcctcccaaagtgctgggatcacaggcgtgagccaccatgcccaggcagcagaatcatttcctaatggccacaaagcacgggcgtccctcagtgtctctc

SEQ ID NO: 699 - DNA, 3938 bp, Homo sapiens
ttttgacaacttaaatttattgtaactgcccaacaaaggaagtagagttggaggtttatctgcaagaggtttttttttgttttgttttttgtttagtagctccacctcttaatttattattattattcattttattttattttttgagacagtctcgctctgtcacccaggctggagtgcagtggcacaatcttggctcactccaacttctgcctcccgggttcaagcgattctcttgcctcagcctcctgagtagctgggattacaggcgccctgtcaccacgcccagctaacttttgtgtttttagtagagacggggtttctccatgttggccaggctgctctcaaactcctgacctcagatgatccactcacttctgcctcccaaaggcgggcgggcgctgcggcggccgcggctgctgcttcctcgggccattttgctgtggagcggcggggaggaggagccgccgaggagaccccgggcgaggagctgcgagccggaggaggccgcgcggactccgggctttccgccgtcgcggggatctcggggggcaaagggatcgccggggagggggaccagagagccgcgcccgccgcgcggagcgccccttcgcgtcccctgcaccatgagctggggcaccgagctctgggatcagtttgacaacttagaaaaacacacacagtggggaattgatattcttgagaaatatatcaagtttgtgaaagaaaggacagagattgaactcagctatgcaaagcaactcaggaatctttcaaagaagtaccaacctaaaaagaactcgaaggaggaagaagaatacaagtatacgtcatgtaaagctttcatttccaacctgaacgaaatgaatgattacgcagggcagcatgaagttatctccgagaacatggcatcacagatcattgtggacttggcacgctatgttcaggaactgaaacaggagaggaaatcaaactttcacgatggccgtaaagcacagcagcacatcgagacttgctggaagcagcttgaatctagtaaaaggcgatttgaacgcgattgcaaagaggcggacagggcgcagcagtactttgagaaaatggacgctgacatcaatgtcacaaaagcggatgttgaaaaggcccgacaacaagctcaaatacgtcaccaaatggcagaggacagcaaagcagattactcatccattctccagaaattcaaccatgagcagcatgaatattaccatactcacatccccaacatcttccagaaaatacaagagatggaggaaaggaggattgtgagaatgggagagtccatgaagacatatgcagaggttgatcggcaggtgatcccaatcattgggaagtgcctggatggaatagtaaaagcagccgaatcaattgatcagaaaaatgattcacagctggtaatagaagcttataaatcagggtttgagcctcctggagacattgaatttgaggattacactcagccaatgaagcgcactgtgtcagataacagcctttcaaattccagaggagaaggcaaaccagacctcaaatttggtggcaaatccaaaggaaagttatggccgttcatcaaaaaaaataagcttatgtcccttttaacatccccccatcagcctccccctccccctcctgcctctgcctcaccctctgctgttcccaacggcccccagtctcccaagcagcaaaaggaacccctctcccaccgcttcaacgagttcatgacctccaaacccaaaatccactgcttcaggagcctaaagcgtgggctttctctcaagctgggtgcaacaccggaggatttcagcaacctcccacctgaacaaagaaggaaaaagctgcagcagaaagtcgatgagttaaataaagaaattcagaaggagatggatcaaagagatgccataacaaaaatgaaagatgtctacctaaagaatcctcagatgggagacccagccagtttggatcacaaattagcagaagtcagccaaaatatagagaaactgcgagtagagacccagaaatttgaggcctggctggctgaggttgaaggccggctcccagcacgcagcgagcaggcgcgccggcagagcggactgtacgacagccagaacccacccacagtcaacaactgcgcccaggaccgtgagagcccagatggcagttacacagaggagcagagtcaggagagtgagatgaaggtgctggccacggattttgacgacgagtttgatgatgaggagcccctccctgccatagggacgtgcaaagctctctacacatttgaaggtcagaatgaaggaacgatttccgtagttgaaggagaaacattgtatgtcatagaggaagacaaaggcgatggctggacccgcattcggagaaatgaagatgaagagggttatgtccccacttcatatgtcgaagtctgtttggacaaaaatgccaaagcatgctccctgcggccctgccctcccgcccagcccgggccacctcgtgggggacaagtctcgccagcgcccacccccatggctcggtggcctggggaggtccacactggaagtcgaattccagctcgccttgttgactcgcctgtgtccaccggccatgaggagcccacgcctgtcctccccatcactttcctgtccctgagaactgtagatcatgcgcttgtgcatggtgagtgtggcagtccccacagctccacaatgggctcccccgccaacggggacgacagggatcttcaggaacttctgacctcaccaagtcaagtggaccactctccactccacgaggatgtgaaacggttctttaaaatgggattttagagcctcgggaatgcatgtgcgtcgcatctttcatattatgggtcaggatagattcatttcttgcaacatagtggaaaagatataagctgcagtaatttgctctttgaatgaccgtcacccccagtataggatatgcttgtatccccccgtcactcctccgcctgttttttaaacttttccaccacctgcgtccaaaaagaatgttatagcgagtgctcttaaatgttgaacctgggtgttgcttccgggccagtctgcgtggctccatgaaaagctcactgctgccccagccgggcttcttagaggaggtcagttgtcctatgtatcatcatttactctgggaatcctactgtgaaatcatgtctgtatttttctggagcagttcacatagagtagaatgtggaatttcccgtgaacgtctccttcctcccccgtatctgccgcctgtcacttcgccaccgtgctagaatactgttgtgttgtaagatgactaattttaaaagaacctgccctgaaaagttcttagaaacgcaatgaaagggaggaacttgtcctttacccagtttttcctttgtaggatgggaaagtataaaaaggcacagaaggttgtcatgggctgttccttgggggtttttatcctgctcaccgtggagataagcctgcggcttgtctaaccagcgcagcgcaaaggtctcaatgccttttggtaacatccgtcattgcagaagaaagtttacacgacgtcaaaaagtgacgttcatgctaagtgtttttccagaaatattggtttcatgtttcttattggctctgcctcctgtgcttatatcatccaaaaactttttaaaaaggtccagaattctattttaacctgatgttgagcacctttaaaatgttcgtatgtgtgttgcactaattctaaactttggaggcattttgctgtgtgaggccgatcgccactgtaaaggtcctagagttgcctgtttgtctctggagatggaattaaaccaaataaagagcttccactggaggcttgtattgaccttgtaactatatgttaatctcgtgttaaaataaaatataacttgtggc

SEQ ID NO: 700 - protein, 822 aa, Homo sapiens
MIHSLLPPKGGRALRRPRLLLPRAILLWSGGEEEPPRRPRARSCEPEEAARTPGFPPSRGSRGAKGSPGRGTREPRPPRGAPLRVPCTMSWGTELWDQFDNLEKHTQWGIDIKYIKFVKERTEIELSYAKQLRNLSKKYQPKKNSKEEEEYKYTSCKAFISNLNEMNDYAGQHEVISENMASQIIVDLARYVQELKQERKSNFHDGRKAQQHIETCWKQLESSKRRFERDCKEADRAQQYFEKMDADINVTKADVEKARQQAQIRHQMAEDSKADYSSILQKFNHEQHEYYHTHIPNIFQKIQEMEERRIVRMGESMKTYAEVDRQVIPIIGKCLDGIVKAAESIDQKNDSQLVIEAYKSGFEPPGDIEFEDYTQPMKRTVSDNSLSNSRGEGKPDLKFGGKSKGKLWPFIKKNKLMSLLTSPHQPPPPPPASDSAVPNGPQSPKQQKEPLSHRFNEFMTSKPKIHCFRSLKRGLSLKLGATPEDFSNLPPEQRRKKLQQKVDELNKEIQKEMDQRDAITKMKDVYLKNPQMGDPASLDHKLAEVSQNIEKLRVETQKFEAWLAEVEGRLPARSEQARRQSGDSQNPPTVNNCAQDRESPDGSYTEEQSQESEMKVLATDFDDEFDDEEPLPAIGTCKALYTFEGQNEGTISVVEGETLYVIEEDKGDGWTRIRRNEDEEGYVPTSYVEVCLDKNAKACSLRPCPPAQPGPPRGGQVSPAPTPMARWPGEVHTGSRIPARLVDSPVSTGHEEPTPVLPITFLSLRTVDHALVHGECGSPHSSTMGSPANGDDRDLQELLTSPSQVDHSPLHEDVKRFFKMGF

SEQ ID NO: 701 - DNA, 90508 bp, Mus musculus
  misc_feature (1)...(90508): n = A,T,C or G
cagaaaccggaagtatcctgtctctggttgttccttggttcctgtgacctgagggatccaagcgggtccctctgaacagaagtggtggtcttacctgtgctcacaggtgtatctacacccctgggagaccagctctctcccagtggtgtttgggtatggagtgctgtgtcacagaatcagctctgggtgctatggctgatagtttcttgatgtatggttgatatggaagggcccagcccactatggaaggtttccctgggctggtggtcttggggggtgtaagaaagcagggtgagcagtccacagacagcaagctagtacacagccctcctccttgcctgtgcttcagctcctgcctccaccttgagctcatgctatgacttccctcagtgatggactgtgctgtggaactgtaagctgagccaaaccctctcctccccaagctgattttggtcatgctgcttatcacagcgatagaaaccctatgtaatggctaagacaccacaagtcagtgtctcagcttcactaaggatctagttaatgtgctccagcagcggcgtgcatctgtgctgcaagtggctgtatctgtcatgggagtcactggtcattctagcagcaagcacaggtcaatgaccagtggatggtcaacaacagctctctggacaaaactggtctgagagtctgatagttatggtgccacacagggttaggatgtgagtggctgacagtgtcatcacattttgtctgagatagatgtcatactctgacacagatgtcacaactgcagattggattacaggtgaaagattagctttctactgggtacaggtttttaccaaggcttccatgttcaagataccagtagtgtccatatgataaacccatctatactcctagctatagggtcgctgactgttggttttctatagctgtaacgttctgatatgtcatttcatcacatcttagtgccaagatttcctgagggagacactgtctctagttttggtttgtaccttgtatagcttttctgttgtcatgctttctgtatttctttgctatctgtctgtctatctatctatcatgtaccatcctatctattttagttttttgagacaaggtttctctgccctggctcttccagaacttgttatgtatcctgtggtccctcagaaggaacaggaaaactgtaggatgaactaaaacccaagtgtctgggactacctgtgagggagtttcttcattggatcatttgcaatgagaagatctaccctaaatctgggccacaccttctggtggcagcacacataaaaggaggtgggagaaggaagctttttggttttgcctgcttgctttggctcttgctggcaggttcatctatgtggacactgatgctgatgcactccttcactggtgtttgaacctacttcttcaggattccaatgtagactgaagaccaacagctctctaggaatcccctgggacttctccactagactgagacttgtcagacatccagtctcatggactaaacagctgttagccaatccattgagagacagcctctgtttgactacacagccacttcctgtaggtcactcataagagtgattaaatctctacactaaaatatctatattagactcactaaatcttgatatactcaaatacactcagatgcatacacccctccccccacagatacacacacatacagatgcacacacacatacagacactcagacacacatatgcacatatttatcctgttaattcagttctattcctctggggaaccctgactaatatattctcctccattttctgtatctcatatgaggagaattgcatcatcctttgatctgctggttttgcgatgtttgagatgggcaatctggagtggttttgaaatatctatgtgtccacacgttcctggtttaatttggtaagttcataagaggcaatgcttcatttgtgtaaataagttacttattcagcacctcatgatgcacacggggcagatagtatttaggggtagcacacaggcatgtggaaattgaaggacaacttatcatagcttgctccttctgctgtgtgggtcccagacattgaatcagtccttgggtttggcagcaagcacctttacctgctgagccatcctgctggcccaggagatggctgtttattgacacaagtaagatgcagactcactgcctcagcattggtgccccaaatggagaaaactgctggttgaaagatggggtcactcaggacaaagccctgcaggggactctgctgtgtgacatgggatatcttagagcatgtacagcttaaaacattcattctctctctctttttcattattccttcacatcttctctctctcttcctccctccctccctccctccaaagttcctccccaaccccctttatttcttcagtttttacctctttctgtttccttcatcttttcccctttccttctgatgtcatttccctataatgactgatggttaagatgagagtatcctgttgatacagaacctccatcatgccatactcccttcttgggagtaccttactaatggttgttagtccctggccttttctgtaaatgtctctgacaggactactcagatgtgttgtgccccactgtctcctacagggacccaggccacctctgaggtaccatgactaagtttcccttttctagtgttctgctcatgcccatttcttcctagatatgggtctcatatttaccctgcagttctgtggagttaacactatctcttttgcgtctttattaaaacacctcccaacccacattggacctgtgagtttccctacctgtcactggataaggagctggggaaaggcctaggacagatcctagctctgaaaaccccacacttttggctttgaagaagtcacttccctacctacatctcacttctgcgtttgtctatgagggtaaggctggctgtctttgggaatccagggctttctggttgcacaggatttccttcatccagtgtttctgtgggaaaggctcacctaacactgaccttgcactccttatggttaattctgttccccaccaaagatgctaggaggaaatttcccatgtcagaatcttctggatggatatttcagattctcccaaaggccacctgacctcagcactcagataaggagaatctgacaagaggaaggaccttgttcagaggtgggagaatgcaaactgggagtggctgctccagcacagtcagtaatgaccttaacttgggtttgctgttggttcattacccggggtgacctgcatactgacgtgtcctcagaagcagtgttacagaaaatctggtaactaacagtcaaggcatttactcagtcgcagctagttgtttaacttttgagagcttgatggtttctctcaaagaattaaaaacatatctaaagcagacccatggtattagctcacattttaaggaagcaaatttaaatctaaacaacgcatgaatttttttctgcccttggctctataaactgaacaagtccacaacacaaacgcaaataaaaactttagcatcaaattttaaaaatttcttttcttttttttttaaagatttatttatttattatatgtaagtacactgtagctgtcttcagacaccccagaagagggagtcagatcttgttacacatggttgtgagtcaccatatggttgttgggatttgaactcaggaccttcggaagagcagtcagtgctcttacctgctgagccttctcaccagcccttaaaaaatttcaaatggcataaaatcaaggaacagattaaacttgtgacattgtgcttcacacttaccatttttctgtattatattttaattaattaattaatttctttattttggattacaggttgttttattagacctggaagacttgctggagatggactattcagcttgagtttctgaacacagaagcagaagtcttttaattttatataccatttataacagtttccaacaacaaagtatgtttgcaaagtgttctgtttcctcatctcttccaccctctccccatttttttggtggtgctggtgttgaatccagggcctggtacaagcaagctatgtgagttcttgttcactggcctctctctagtcccctttactttgtctctctttcttatgtgttccgtgtggaagaaaaggaaggagagcaggtactagtgtgtcaggaactagtgtagagactagagggcaatgttttgggaaaatgttctttcttaccttgtttttaggcagggattttcctctgtctgtctgtctgtctgtctgtctcccctctcctttcaactcttccgtgtgtgtgttcaggtggttgtgggagccagaaggggccagttgattccctagggctgcccagtgtggctgttgggaaccacacccacaagtttctcataactcttaagtaattttttctttttaaagatttattttatttatatcactacactgtagctttcttcagacacaccagaagagggcattggatctcattatatatggtcgtgaggcaccatgtggttcctgggaattgaactcaggacctttgaaagaacagtcagtgctcttaaccactgagccatctctctagcccatactatccttttttgggggtggggggtggggctcaagacagggtttctctgtatagccctggctgtcctggaactcactctgtagaccaggctggcctcgaactcagaaatcacctgcctctgccttctgagtgctgggattaaaggcgtgtgccaccatgccccgccagcccatactcttatgcaattttaactgtggagccatttctccagcccaaggcagagtctttcttgttactacagctttgatgtgcactctaggacagtaagtccgtggactttgggccagttctcctgtctccctcccatattattgtgtgtgtgctggattacaggtgctagaattgaactcaggtcctcaggcttgagtgacaagcattttctttcacctgctgagcatcttcctgaccttcgtcttttgattgtaatcacaatggactatcaatcgagctatatcattgtaagtcagggcacagtgaaaccactgaactagaccacttctggggagaaaggaaggcttattggagatcaaactgatcaaactgtttaagctaactctcagggacagaggacagggggaggggagagagagagagagagagggagagagagagagagagagagagagagagagagagagagagagagagagagagagagactctaggcctgaagaggactttgaaccctaaaagcccacctgcagtgactcacttcctccaacaaggccactactgttctaacattctaacctatcagagttccaaatcctgatgactaagcactcaaatataggagcctgcaggaggggtaggaggtatcttattcaaaccacaagagaaaatctgtgaatctcagcagctacccaggtgaagaaaatgaggaagacaggacatttgtcacttgaaggtagaatggttgcatgcatgagcctggaccatgctccccaccatgataatgatggactaactctctgaaactgtaagcaagcccccaattaaatgctttctttttttaagacttgccttggtcatggtgcctcttcacagcaacagaatagctgtcacggagttttgttttcctttttgtttgtttgtttgtttgaactctaataaagttgtctttgagtttccttttgagtccattcttaaattatttttattaatgagactaagagcccaggattggacttcaatttccctagtaacacatggcaactcctttgggactcttgttttttgtagaactatcactgttttctccaacagttgtttatttagtgtcagaggcagaagctcatgtgtggagtcagagaacaactccacagagtcagttctctctgtccaccaagtgagttctgggaactgaactcaggtcctcaggcatagtagcaagcaaacctaactcacggagccatctggccagcccttgttttcttattttgagcagggtccctagctacatcaactgggctagttttgattttgaagcaatctcccacctctgcctctcgaatgctgggattatagatgtgtggtgctatgtctgctcctcaatcccccaccccaagcaggatgtaatggagcgcgcaccctcccccccaaactctaagtatttgggaggtggaggcaagagttcagggtcagccatagttttgtgacaagttcaaagccaacccgagctaagcaacatattcccaaacaaactataaagctttggtaggtaggacctggagagggcaaaccatgatcagaaccttgagtgaaaatattattttaataaaaacaaaacaacagcaacaaaagctcctcctgtctagttgacagcgtgttctcaattgtggtaactgagaagtggaaatgaaagcacttggcgcctcggcttactatttgaactgtggttactaatgagctccagtgagcacactggcaagacaatgctaggattgatctccagcaaagggctcattgtattggctgcctgtcttctcatggttatgataaaacaccaagcctgaaagcaagctgtggaggaaagggtttctttggcttacacttccacagcactgaaagaagtcaggacaggaacccaagcagggctggaacctggaggcaggagctgatgcagaggccatggaagggtgctgcttactagcttgcttcccaaggcctgctcaccctgctttcttatagaacccaggaccgccgccatggggtggccccacccacagtgggctgggccctcccccatcagtcactaattaagaaaatggcctacagctggatcttaaggaggtattctcttcattgaggtttcctcctctcagatgacttcagtttgtgtcaaactggcgaaacaaactagccagtaccactgcatggctccacattcctgagccgctgtgtggggcctacgactccattctgctgctgctgtgttccactggggttttccaagttctgccgctgtacttggtgagtacgtaggctctgtgcttacctcaggaaccttgtgtcccctttcctttggcataggaccctcaacaatgtgtgcaatctccacgacatcaagttacagctttaataagttaataaactttaatacgtttcttagtctgtgacaatgatgttcaagggctggagagatagctcactgttaaagcgcacctgttgctcttgtagaatggtgttacagctctgaccggaatagtgttagctagtgttacagctcctccagggtggggagagtgtttccccgctgcaagtgttataactctgctctggcccggcacaagaacccaggaaggtggtggctgcctcggcttgtgggggagaagcagcagagacagtagatgaaaacagtgttgtcacagctttccttggggcggagctttccatagagtttgggctttttactttgatggctggccgcgggtgggggtggggggctgagaggggcggggagggaacgaggaggggcagcgagctgagtctgaccaaccattagggaagtgagagtggtctgtgggcggaacctgagtgttggcgtaaggaggtcctcaggggaggggcctagctactcatgagccttctggggcttacaaagaggacctaggttctgttcccacgcccacaaggtgactcgaaccatcttgaattccagatcttgggtttccgagtagtttcctttgaacttgtgggacacccaagcacacacgttgtatatatacatacacatacttgcatgcaaaacactcataaaacaaacaaaaactttaaaaatcttattttttttaaaactataaccaatggtggatattttaacaaaagcaaaattatacccttttatctggggatgaaacagatccaattgagcctgagggtggagcaaaccagatgagggcagatgtgcttgttgggcatagaggtataaactctgccacgattattttgggttcctttctaaataattacagaaggtcgcagtggctctgtataacccgatcagaggacacccaaggctcgaaggccacaagcaagctatgctctagatgcctcttggccagttttcaccccagagctcaggactgggagacctagcctagtaagcatccatgggcagtccttagcctgtagcccgtggcctttctcctttcttcccagagaaacacccagtgtggaaagaccttccaggctcccaggtgtctggctgtaagccaagccagtgtccatgagacctttcctcattgcatagggtgtcggttccccaccccatcacccagtaacaccccccccccccccacacacacacccgtagttcctcctctgcagcccctatcaccatgggcaggtcagaagacacaggcggccgtgagcgatttcttttctttttctttttcttttcttttttttttttttttgctggtttcaggcttttttctgcctgagtggagatgaaacatcactcctcccacagatgggaaagaggtgcaggttggggtaaagtgagggacacccgatgcatcacacgtgcatcacgccggacgttgtgttgggggtgggggtgggagtggactctctaggctcccactcctcgggtcggcgcacgccacttgcctgcgccctaagccgccgagctctgcaggggccagaggcgcgcaccccacccgacacacccggacagagcagcggccgggtctcctacagcgcagggcgccgcccgcccgcccgcccgcccgcgtggtcccgtctccagcgcagcagacaacacacacccggcctgcttttgcggatcaggtgggnnnnnnnnnnnnnnnnnnnnnnnnnnnnnnnnnnnnnnnnnnnnnnnnnnnnnnnnnnnnnnnnnnnnnnnnnnnnnnnnnnnnnnnnnnnnnnnnnnnnnnnnnnnnnnnnnnnnnnnnnnnnnnnnnnnnnnttgtcctggtcactcgatcatttcctctgtatccacttctgaactctaggctctgtcccaccctgaacagtgtcgctgcatctgtttgcttatgggggtctcccgccaccttccctcgctatccgaatagctgatattcagggcagcacagggcagcacagggcagggcagggcagggcagggcgagtagggcagatcagatcctgggaccaccggtactaaccagtgagtgtagaaagcaggaggtgtcttttcctactgtagttaggacagggcgggttggctcttcttatggacaagatggaaaaggggtgcaggtaggggcaaagtgagagacactcgaatttgagagacagacagactcctaacagtgaaggaaggaccaagccaaaatcaagcctgggcaaagtctcaggcactaactttgctgtgttgggtgatgggaggtaatctcgtcacaacttttcaaaccacctcgttcccactgcaaggagacaccatcaagtgtttgaagatggcaggggaacctctcaacaaaacacacacacaaacgttttattattttatatttattttgcatgcaaagtactgtgtttcattatggcattttcatacatatgcgattgcacaaactcttgaaaatcatccaagaaacagcaaagcgggaaataatgttgtggggggggggcgcggaggagagagaacagagactggagagagtgctgtcctccttgctgcgggggccaggaagaggctaggagggcggggatgtcaacgccactagctcctccctcaggaaggaccccagggactcttatttttgtagttttgcttgtctgggccactatcggccccagaacagatctgactgcctctttcattcgcccggaggtagataggtgtgtcttaggaggctggagattctgggtggagccctagccctgccttttcttagctggctgacaccttcccttgtagactcttcttggaatgagaagtaccgattctgctgaagacctcgcgctctcaggctctgggtaggcaaaggcgagggggctcgccatggctcgggttgtccagggattggggcatcaggactacgggagtctctgccttttgatagtgcttccttacagttatttttgggagtagttgcttcttcctgatgggagccgcgtgcgggtccaagctatcttttgcaagtaacaggtgtctggtgactaaatgcagggctgaacacttcacttgggattacctggttccagggactttgagtattggcgcaggccccaaatggcctaggaggggtacctggagaccctggctcctgctcctgtgatcttactacatagaaccgattcttttatttctactttctgtgttaggaacgccccaagaggatgttttggggaggcctcctgtccccattccctgtgattagggtcagttttcagtggaatgcctgagatcagaaggcgggagatcaattgattactgtcaatggccccctgtggctaaactttaccggaagctttctcagtcacagagcaggaaaggccgccttgcactggccatactgactctgagcagccatttgcccggtttctgacacttctgagccaggggctgaccatgggttttattccctgtgcacttctgggtcttggtgaaacttttagtgtacatgggtctcttaggttccccagcctaacaggataagcttggcactgttggctggatttatagagaaggaaatcaaagttgggagaagccaagtcactggtttatgggtgctcagggtttggattgaatctgaggttggaatgcactccagccagcctctaaggcttgtgtgcttcctgtttgtttgtttggagtgtgtggttttgttttgttttgttttgttttgttttgttttgagacagggtttctctgtgtagccctggctgtcctggaactcattctgcagaccaggctggcctcgaactcagaaattcccctgcctctgcctcccaagtgctgggattaaaggcgtatgccaccacaacctggttgctcactttctattcagcatctcccaccatggcaagaaaacgactaaggaacagatggcatgactctggggggaagggctggggagagtggaagggaagaggtagtgggtggggctgagcatttcaacaggtgcagttcaggtataaatattattttttgaagtgaatatgctttctgataaataatcaggggtctttacaagttatttactaatttttaattacactctaatttacgtacactaaaatacataaaccgtaagcattcttggttttaatgagttggaaggtttttagagggacagtccttgtgtttggtctaggctggtcattttctgagaagtggctgaagtcttgtgtgacaaaacttttgccaggggatacagcacacctgtctactcacctggatagtgagtccagggcagaccaaaatacggataccaccaaaatccaacttggcggaccccagagctttattaatgttatttatgggaatataggtgaggggttacttacagaagtatacatgactcatggatagctgtatcatcaaaggacaggtgacaagtcacaaaagctgggaacctggagcatagccttcagataattcaatagttggagagtaccctttccaggtaactgatctaaacctggtctaggcagtccagctggtttctgcttcttccaggcagctggtctggtctcagagtcttctttgcagctcagcttctatcagtctgagagtaactctcagtttttattgcttgctcttgtagggaggggcctagtgaatctggtcagtttcagggacttcctggatctgttttttggttttttgtttttttttgttttttttttttttggttgttgcttacctccctgtttaaggaactcccctgaagtactgaatattttaatctaggaaagagaatgttatacaagtcttgagttgtgtgtctggggaaggggtggagttcattgatacagacacctgaacccaggacctttaaatacccagttgggttgttgtaatccactgagttatactctaagctcctgatattctaccactgagcaatatcctctagcccctgtgatgttttgagatagggacttgctttgtagggcagactggccttgggttctctaattttaagggagaagacaatagtgtgtaatattattataatctttgggactgattagagtgaagttgtgcacagtggtgcgcacctttagtcccagcacttgggaagcagaaataggtggttctctgtgagtttgagacaatcctggtctacaaagtaagttccaggacagccagggcggttccacagagaaaccttatctctggaggaggaagaggggaaagatggggtgggggaagaatgttatgtctcccagggccatagatatgacttagattccattctatgactcttagaaaggagctcacccttaatgggcctcagaaaagtgcccagacctccccatctatgggagaggtccatcttcagtggcttccaagctcattaatgcctgtctagctacctaatatttgcttctgaagagttgagacctaacatttaggacatgggtgcctggtggatctgggtacttgcatctgaaatggaggcataggagggctcagcatctccacacttgctgaccttcaggcccttgaggtaaccctggggagtcagagagaagaaagtcagcgggtgggtcttttgtaaaaagacaggagatacggtagtgtagcccctggggtgaacgggatcattactaagatcatagcagacagaactcatttctgccacagaaatctggacactgtcttcgtggactaaatctgattttgtggatttgtgtaaaactgacaaaccacttagcaggattattgggatgcacagtgttttgtttatggtcagggaaagctgtgttgaccatcttcttttcagaatgtataataatagatctgtctctccatgactcctctaatctagaggacaggtaacttgcaagaactttcaggaccctctgggaagtgtccaatcatcccttacagcctggttgactcaggtagggaccaaaataatggccattcttttagtccctggttcttcatgggctctggtccaaggttggttgactactccccccgcctggccccttcccccggaaggttacttaggacagccctgaagagaagcttggacatagggcacatttgatcacttttaccttttataaggcaggcagatccagcagcaggaggatgtacatattttaatttttatttatttatttatttatttatttatttattttgatcataaagcattcttttccctttctttcttccttccttccttccttccttccttccttcctctctctctctctctctctctctctctttctttctttctttctttctttctattttagtttttcaggacagaatttcactgtgtggccctggctgttctggaactcattctgttgaccaggctggcctggaactcacagagatccacttgcctctgagtgctgggattagaggcatgtaccaccctatgatctgaaagcttcaattacaagtgattggtaactctaacgagttgaagtaaaccctagggacactgtgcagggccaaatccacttctctcttttttaattctcgaggatcaagtttgtccttatcatagagagcacatttgatgagtgaatcatcgttcaaggaggaggaaggctagggagcctgcgaactgtggctggagcatgcactactaggagagccttttatcctaggcacaaatgtgttggaggcttatgggtctagaggaatctctattccctttaggacccagttggtaaactgtttcaagacctaaagaaatcactgttgttcctgatatatttcctctccaataaatgccagccacgaccaaagcaaaggccctaaaacccatagggaccgaaaagaaagcctggagatcaaattgagagaagagccaaagggtaggcaggctcgcttgggccgccatcaggaacctccctccccgagccgcagtgtctggccgtccgttttgtccttgtttatgaatctcctgtagatgacagacacggtctcttttgcagggtcttcatcttgctgttaaaagaacttcgacacaggttccacgggaaactcattttatgaaaaatcgcaagaaaaacaacagggcaggcaaggcataaatcttgttagggctggaaggagctggctaagtgggggaaagtcaggccttttgccatgaggtccaaggtaggctccgcagtggggctgcaagcggcagtgcagggtgggaggtgtcagcagagaaacactgattcagacagggtcacacggagcgtgcttccaaaggaaggacagaggagggtctactgctgggtttctgtgtcaacttgacacaatctggagttatcacagagaaaggagcctcccttgaggaaatgccgccatgagatccagctgtaaggcattttctcaattagtgatcaatgggggagggcccaacccatggtgggtggttccatccctgggctggtggttctgggttctttaagaaagcaggctgagcaagtcttggannnnnnnnnnnnnnnnnnnnnnnnnnnnnnnnnnnnnnnnnnnnnnnnnnnnnnnnnnnnnnnnnnnnnnnnnnnnnnnnnnnnnnnnnnnnnnnnnnnnnnnnnnnnaccaccaccaccaccaccaccaccccatggcctctgcatcagctcctgcctgcagattcctgccccgattcctccagtgatgaactattttggtaatggtatttcagtatagcagtagaaaccctcactaaaatacagaaaaggggcagttagactttttatattagaactcaggaaagtgaccaggcaacgaaatagaagcaatgacctttatttattttaagtttttttgagacagggtctcacttaacccaggctggcctagattatatgtagttaaggacggtcttggatctctgacttcctgcctccatggagtgctggatgacagacacggtgtagtgctgaggattgaatccaggactgtgtgggctaagaaaggacactaccaactgagctacatccccagccctatggcttctgcagttgttagtacctgtgtgagcaactacccaaaatgagataaaatattttcttcaggcctagagagattgctccgatgttgaagcatgcgttctgctcttctgaggacctgagtttatattcctagcactcaagtcaggtggctgataaatgcttgtgactccagctccagggatctgataccttcctcccctctgagggtacccgcatgcttgtgcacacaccccatatagacacacacacacacacacacacctcattaaaaataataaatcttaaaaaagttatcaccctagaaaatacacattttctccttcactgcccgccctccccccacaatgccgccatttcctggctttgttgcccactcatgttttttgttttttgctttttcttttgcctgatcctggacttcgtgtaagtaaaatcaggcatatctagtttatttcactcgcacaatgagttaagattcaattgtagtgtgcttatgagtaattcgattgttctattgttaagccatttgcttatctcttctctcattaatggccaggtcagtcccttccagtttggggttaacatgcaaacattcttgctaaagccttttagaaagttggtgctcatccaggagtgaaattactcccatagcagaactggagttgttgagatatgccgtgtgtgtgtgtgtgtgtgtgtgtgtgtggtgtgtgtgtgtgtgtgtgtgtgtgtgnnnnnnnnnnnnnnnnnnnnnnnnnnnnnnnnnnnnnnnnnnnnnnnnnnnnnnnnnnnnnnnnnnnnnnnnnnnnnnnnnnnnnnnnnnnnnnnnnnnnnnnnnnnnnnnnnnnnnnnnnnnnnnnnnnnnnnnnnnnnnnnnnnnnnnnnnnnnnnnnnnnnnnnnnnnnnnnnnnnnnnnnnnnnnnnnnnnnnnnnnnnnnnnnnnnnnnnnnnnnnnnnnnnnnnnnnnnnnnnnnnnnnnnnnnnnnnnnnnnnnnnnnnnnnnnnnnnnnnnnnnnnnnnnnnnnnnnnnnnnnnnnnnnnnnnnnnnnnnnnnnnnnnnnnnnnnnnnnnnnnnnnnnnnnnnnnnnnnnnnnnnnnnnnnnnnnnnnnnnnnnnnnnnnnnnnnnnnnnnnnnnnnnnnnnnnnnnnnnnnnnnnnnnnnnnnnnnnnnnnnnnnnnnnnnnnnnnnnnnnnnnnnnnnnnnnnnnnnnnnnnnnnnnnnnnnnnnnnnnnnnnnnnnnnnnnnnnnnnnnnnnnnnnnnnnnnnnnnnnnnnnnnnnnnnnnnnnnnnnnnnnnnnnnnnnnnnnnnnnnnnnnnnnnnnnnnnnnnnnnnnnnnnnnnnnnnnnnnnnnnnnnnnnnnnnnnnnnnnnnnnnnnnnnnnnnnnnnnnnnnnnnnnnnnnnnnnnnnnnnnnnnnnnnnnnnnnnnnnnnnnnnnnnnnnnnnnnnnnnnnnnnnnnnnnnnnnnnnnnnnnnnnnnnnnnnnnnnnnnnnnnnnnnnnnnnnnnnnnnnnnnnnnnnnnnnnnnnnnnnnnnnnnnnnnnnnnnnnnnnnnnnnnnnnnnnnnnnnnnnnnnnnnnnnnnnnnnnnnnnnnnnnnnnnnnnnnnnnnnnnnnnnnnnnnnnnnnnnnnnnnnnnnnnnnnnnnnnnnnnnnnnnnnnnnnnnnnnnnnnnnnnnnnnnnnnnnnnnnnnnnnnnnnnnnnnnnnnnnnnnnnnnnnnnnnnnnnnnnnnnnnnnnnnnnnnnnnnnnnnnnnnnnnnnnnnnnnnnnnnnnnnnnnnnnnnnnnnnnnnnnnnnnnnnnnnnnnnnnnnnnnnnnnnnnnnnnnnnnnnnnnnnnnnnnnnnnnnnnnnnnnnnnnnnnnnnnnnnnnnnnnnnnnnnnnnnnnnnnnnnnnnnnnnnnnnnnnnnnnnnnnnnnnnnnnnnnnnnnnnnnnnnnnnnnnnnnnnnnnnnnnnnnnnnnnnnnnnnnnnnnnnnnnnnnnnnnnnnnnnnnnnnnnnnnnnnnnnnnnnnnnnnnnnnnnnnnnnnnnnnnnnnnnnnnnnnnnnnnnnnnnnnnnnnnnnnnnnnnnnnnnnnnnnnnnnnnnnnnnnnnnnnnnnnnnnnnnnnnnnnnnnnnnnnnnnnnnnnnnnnnnnnnnnnnnnnnnnnnnnnnnnnnnnnnnnnnnnnnnnnnnnnnnnnnnnnnnnnnnnnnnnnnnnnnnnnnnnnnnnnnnnnnnnnnnnnnnnnnnnnnnnnnnnnnnnnnnnnnnnnnnnnnnnnnnnnnnnnnnnnnnnnnnnnnnnnnnnnnnnnnnnnnnnnnnnnnnnnnnnnnnnnnnnnnnnnnnnnnnnnnnnnnnnnnnnnnnnnnnnnnnnnnnnnnnnnnnnnnnnnnnnnnnnnnnnnnnnnnnnnnnnnnnnnnnnnnnnnnnnnnnnnnnnnnnnnnnnnnnnnnnnnnnnnnnnnnnnnnnnnnnnnnnnnnnnnnnnnnnnnnnnnnnnnnnnnnnnnnnnnnnnnnnnnnnnnnnnnnnnnnnnnnnnnnnnnnnnnnnnnnnnnnnnnnnnnnnnnnnnnnnnnnnnnnnnnnnnnnnnnnnnnnnnnnnnnnnnnnnnnnnnnnnnnnnnnnnnnnnnnnnnnnnnnnnnnnnnnnnnnnnnnnnnnnnnnnnnnnnnnnnnnnnnnnnnnnnnnnnnnnnnnnnnnnnnnnnnnnnnnnnnnnnnnnnnnnnnnnnnnnnnnnnnnnnnnnnnnnnnnnnnnnnnnnnnnnnnnnnnnnnnnnnnnnnnnnnnnnnnnnnnnnnnnnnnnnnnnnnnnnnnnnnnnnnnnnnnnnnnnnnnnnnnnnnnnnnnnnnnnnnnnnnnnnnnnnnnnnnnnnnnnnnnnnnnnnnnnnnnnnnnnnnnnnnnnnnnnnnnnnnnnnnnnnnnnnnnnnnnnnnnnnnnnnnnnnnnnnnnnnnnnnnnnnnnnnnnnnnnnnnnnnnnnnnnnnnnnnnnnnnnnnnnnnnnnnnnnnnnnnnnnnnnnnnnnnnnnnnnnnnnnnnnnnnnnnnnnnnnnnnnnnnnnnnnnnnnnnnnnnnnnnnnnnnnnnnnnnnnnnnnnnnnnnnnnnnnnnnnnnnnnnnnnnnnnnnnnnnnnnnnnnnnnnnnnnnnnnnnnnnnnnnnnnnnnnnnnnnnnnnnnnnnnnnnnnnnnnnnnnnnnnnnnnnnnnnnnnnnnnnnnnnnnnnnnnnnnnnnnnnnnnnnnnnnnnnnnnnnnnnnnnnnnnnnnnnnnnnnnnnnnnnnnnnnnnnnnnnnnnnnnnnnnnnnnnnnnnnnnnnnnnnnnnnnnnnnnnnnnnnnnnnnnnnnnnnnnnnnnnnnnnnnnnnnnnnnnnnnnnnnnnnnnnnnnnnnnnnnnnnnnnnnnnnnnnnnnnnnnnnnnnnnnnnnnnnnnnnnnnnnnnnnnnnnnnnnnnnnnnnnnnnnnnnnnnnnnnnnnnnnnnnnnnnnnnnnnnnnnnnnnnnnnnnnnnnnnnnnnnnnnnnnnnnnnnnnnnnnnnnnnnnnnnnnnnnnnnnnnnnnnnnnnnnnnnnnnnnnnnnnnnnnnnnnnnnnnnnnnnnnnnnnnnnnnnnnnnnnnnnnnnnnnnnnnnnnnnnnnnnnnnnnnnnnnnnnnnnnnnnnnnnnnnnnnnnnnnnnnnnnnnnnnnnnnnnnnnnnnnnnnnnnnnnnnnnnnnnnnnnnnnnnnnnnnnnnnnnnnnnnnnnnnnnnnnnnnnnnnnnnnnnnnnnnnnnnnnnnnnnnnnnnnnnnnnnnnnnnnnnnnnnnnnnnnnnnnnnnnnnnnnnnnnnnnnnnnnnnnnnnnnnnnnnnnnnnnnnnnnnnnnnnnnnnnnnnnnnnnnnnnnnnnnnnnnnnnnnnnnnnnnnnnnnnnnnnnnnnnnnnnnnnnnnnnnnnnnnnnnnnnnnnnnnnnnnnnnnnnnnnnnnnnnnnnnnnnnnnnnnnnnnnnnnnnnnnnnnnnnnnnnnnnnnnnnnnnnnnnnnnnnnnnnnnnnnnnnnnnnnnnnnnnnnnnnnnnnnnnnnnnnnnnnnnnnnnnnnnnnnnnnnnnnnnnnnnnnnnnnnnnnnnnnnnnnnnnnnnnnnnnnnnnnnnnnnnnnnnnnnnnnnnnnnnnnnnnnnnnnnnnnnnnnnnnnnnnnnnnnnnnnnnnnnnnnnnnnnnnnnnnnnnnnnnnnnnnnnnnnnnnnnnnnnnnnnnnnnnnnnnnnnnnnnnnnnnnnnnnnnnnnnnnnnnnnnnnnnnnnnnnnnnnnnnnnnnnnnnnnnnnnnnnnnnnnnnnnnnnnnnnnnnnnnnnnnnnnnnnnnnnnnnnnnnnnnnnnnnnnnnnnnnnnnnnnnnnnnnnnnnnnnnnnnnnnnnnnnnnnnnnnnnnnnnnnnnnnnnnnnnnnnnnnnnnnnnnnnnnnnnnnnnnnnnnnnnnnnnnnnnnnnnnnnnnnnnnnnnnnnnnnnnnnnnnnnnnnnnnnnnnnnnnnnnnnnnnnnnnnnnnnnnnnnnnnnnnnnnnnnnnnnnnnnnnnnnnnnnnnnnnnnnnnnnnnnnnnnnnnnnnnnnnnnnnnnnnnnnnnnnnnnnnnnnnnnnnnnnnnnnnnnnnnnnnnnnnnnnnnnnnnnnnnnnnnnnnnnnnnnnnnnnnnnnnnnnnnnnnnnnnnnnnnnnnnnnnnnnnnnnnnnnnnnnnnnnnnnnnnnnnnnnnnnnnnnnnnnnnnnnnnnnnnnnnnnnnnnnnnnnnnnnnnnnnnnnnnnnnnnnnnnnnnnnnnnnnnnnnnnnnnnnnnnnnnnnnnnnnnnnnnnnnnnnnnnnnnnnnnnnnnnnnnnnnnnnnnnnnnnnnnnnnnnnnnnnnnnnnnnnnnnnnnnnnnnnnnnnnnnnnnnnnnnnnnnnnnnnnnnnnnnnnnnnnnnnnnnnnnnnnnnnnnnnnnnnnnnnnnnnnnnnnnnnnnnnnnnnnnnnnnnnnnnnnnnnnnnnnnnnnnnnnnnnnnnnnnnnnnnnnnnnnnnnnnnnnnnnnnnnnnnnnnnnnnnnnnnnnnnnnnnnnnnnnnnnnnnnnnnnnnnnnnnnnnnnnnnnnnnnnnnnnnnnnnnnnnnnnnnnnnnnnnnnnnnnnnnnnnnnnnnnnnnnnnnnnnnnnnnnnnnnnnnnnnnnnnnnnnnnnnnnnnnnnnnnnnnnnnnnnnnnnnnnnnnnnnnnnnnnnnnnnnnnnnnnnnnnnnnnnnnnnnnnnnnnnnnnnnnnnnnnnnnnnnnnnnnnnnnnnnnnnnnnnnnnnnnnnnnnnnnnnnnnnnnnnnnnnnnnnnnnnnnnnnnnnnnnnnnnnnnnnnnnnnnnnnnnnnnnnnnnnnnnnnnnnnnnnnnnnnnnnnnnnnnnnnnnnnnnnnnnnnnnnnnnnnnnnnnnnnnnnnnnnnnnnnnnnnnnnnnnnnnnnnnnnnnnnnnnnnnnnnnnnnnnnnnnnnnnnnnnnnnnnnnnnnnnnnnnnnnnnnnnnnnnnnnnnnnnnnnnnnnnnnnnnnnnnnnnnnnnnnnnnnnnnnnnnnnnnnnnnnnnnnnnnnnnnnnnnnnnnnnnnnnnnnnnnnnnnnnnnnnnnnnnnnnnnnnnnnnnnnnnnnnnnnnnnnnnnnnnnnnnnnnnnnnnnnnnnnnnnnnnnnnnnnnnnnnnnnnnnnnnnnnnnnnnnnnnnnnnnnnnnnnnnnnnnnnnnnnnnnnnnnnnnnnnnnnnnnnnnnnnnnnnnnnnnnnnnnnnnnnnnnnnnnnnnnnnnnnnnnnnnnnnnnnnnnnnnnnnnnnnnnnnntgtgcgccaccactgcctggcagaatctaatttttcttattgtatgtgttctttcctataatgtatctaattttaatcatatgtccacctagggagattctccctaaaaggctactgggtggcttagttttgccttattgcccacatattcaaaaggcagttcaagctggattggcggttctgttcttcctgcacttgaatgggaattgtcaaaagctgggtgcaggtgaagggctgaagactgcataggagagtagtagtgtgtgtatgtgtgtgtagtgtgtgcaggtgaaggaactaggttgtcaactgcactgtgggatgctaaactgtctcctgtgcttgtctgccccagaccagctttaggcatagagattcctgggctccagagtcttctgtgttatcaactagggagtttcagacttggttcttgtagtcaacaatctaggcagtttcgggaatgttcctggctttacatatgacaagggtcactggattaatgatggtgccggtagctgagagagaagacaggaaggagggcagagaaaggaatgaattgccttcattgttaagtgttgcagaacagtgctgggagggggtggctgttgggagaaggacaggatgggatggagaggttccattgggcaaatagattaccaaaatacacaaagagaggaggacagagcggaaggagcagtgagtgagttgaatcccagaagcggagccagcaggaacagtggcattttataaaaatgacaattacattcattgtatgtggatgtggatgggtgtgtgcgtgccatggtgcctgtgtggaggtcagtgggcagtctgtagaactttgacctttcttcccgccatgtggttcctgggactcgagctcagatgttcaggcttcataactagtgccttagcctgctgggctaactggccagcccaaggaacctggttttcagatagtttcctggctggcttagaagttgatacatggaccatactggccttaaactcatagatgtccacctgcctctgcctcctcagttctgggactaaggacatacagcaccatgcccacccagccgaagaagtaggtttttgagacaggccttttcagtatagtctatgtatcccagattagcttcagtctctctctgaatccccttgccccccatttcccaagcacataccccctcacctgcctaagcaagtatttttgttatatttattttttaatatgtatttttgattatatatatgtatctacctatatatatatctgtatgtgattatgtgcgcacaagtacagtgcctttagaaaccagaagagggcgctagatccctggaactggaattactgacagttgtgagctaatatgtggtgctgggaactgaacctgtatcctctggaagagcagccagtgctgctgaccaatctcttcagctgcttattttttaattagcatacaaaacaagttttttgagatatcttttttcttttctttcatgataagatattttctttatttacatttcaaatactatcccaaaagttccctgtaccctcccccccgccctgctcccctacccacccactcccacttcttggccctggcgttcccctgtactggggcatataaagtttgcaagaccaaggggcctctcttcccaacgatggctgactaggccatcttctgctacatatgcagctagagacacgagctctgggggtactggttagttcatattgttgttccacctatagggttgcagactccctcagttccttgggtactttctctagctcctccattggttgagatatctttatacaaagctttgctctcccctcctcctctcttccctccttcccttttcccctcctcccctcctcccaccctgcctcctccctttctgtcctcctccccgctccctccttcccatgctttcacttggacccttctgtccctggtagtccccctccgttcctttaaactctttctcctcttatgtcccctttctagtttcataccctacgcccacacttacatagctaacacctaaacgcataactacacacacatatatatcagctcatgagagagaatgtgaggtattcatctttctgagccaggcaggctacctcaatatactagtctccattttcatccattttcctgagaatttcatttttatttgaggcttaataagattcccgtgcatattagtataccctgaactttgatgtccactcaccagccgatggacacctaggctgaatttcatctctttgcttatgaacagatcggctgttgacatgggcagccaaggatctccgcctatgacagagagtccaggaatggtagacctggggctcgtggctgttattagttttatgagaaacccttgcacaggtttgcatagtggctacaccagttcctattcccaccagcagtgaataaggacctctcttgctcacatccttgcctacagacatctgttgtcatttgtgtttttagtgatagccaatggctagggtgggaaggactctggaagccattttaatttacatttctctgatggctaaagatgttgagcacattaaaaaccaaagcaaagcaaagcaaagcattggtcttttgtgtttccgcttctgagaactgttggcttagtggccatgtattacttggcagggctttttttggcttgtttacttttattcaattctttatatagtgtagatagtaacctttgtctgaagtacagggattgctgtactatgaccacagaaggtcttttcattatcaattgtcttcttcaacttacttttcaatgtcttaaagttttcactctagaggcttattcctaggcatattgtacatttatttatttatttatttattcattcattcattcattcatttgttcatttatttatttatcctgaagctattgagaatggaatatttctcctaatacctttctcagtgagttaattttttttggtatatgtaaaaaagctactggcttttatatgttgatatttctatcttgcaactttactaaaaatgtttatcagatctaaaagttttctggtggagtctgtaagatttgtttgtttgtttgtttgtttgtttgctttaagacaagttttctctgtgtagccctggctgtcctggaactcactctgtagaccaggctggcctcaaactccaagcgctaggcctaaagttgagccccaaccagcaggtggattttaagtgtaggatcatgttatttgagagcgggaaccatcgggcttctttgttgtctacttttattctgtttgtatcttcctcttgtctgagtgctctagctaagacttggggcactacactgaacatgagggggaaaatagccacctgtgggcacccttgtgtcaccccagagtttaaaggagatgctcagttctctcctgtgtaatcttggctacagatttgttacatattatctttattatgttgacatatattccgtttgttcctagtttcagacttttcatcatgaaggcatattgaactctgtcaagtgtctttctgtatccattaagccaatcatgcctattttgccctatgtctgtttatgtgatatgttctatttatggttttgtatttgttgaaccagacttgcatccctgtgatgaaaccaattggtcacgatgtatgatcccttcactataaaaaaaaaaaaaagaactaagactaaaataattatttgtgtgtttgcctgcctgcctgtatgtatgtatgtatgtatgtgcactgtgtgtgtgtctggtgcctctggagcacaggagaggatactggaccctctggaacttgaggcacagacagttggtagctatcatgtaggtgctggaaagcagatctggctcctctgcaggagaatgctcttaatggctgggcaatttctgcagctccattaatgtgttcttgaattttgttgagaattcttgcatctctgttcatcagggaaattggaccttccttccttccttccttccttccttacttctatattaatttaatttaatttagttgagacgggtatcattatgcagcccagactgccctggagctcacagaaatccagctgcgtctgcctcttgagtgctgatattaaaggtgtgtgacatcaaacccagcatgaacctagattttactaatnnnnnnnnnnnnnnnnnnnnnnnnnnnnnnnnnnnnnnnnnnnnnnnnnnnnnnnnnnnnnnnnnnnnnnnnnnnnnnnnnnnnnnnnnnnnnnnnnnnnnnnnnnnnnnnnnnnnnttttgtcagtgtctcttcctttcctactttgtgggacaatttgagaggtacagttcttatgtcctccttaaacatttggaacttggggctgagagacagtgttcttccagagggccagagtccagtgcccagcactcagtcacaacaccgctctgtaacaccagtctcaggggatcctagaggatctgacatcctctgctggactccacaggaaccgcctgcatgtggtacacaggcttacatgcaagcaaagccactcatacatatcaaataaattaaattattataacaaaaaacattgttgaaaaaaaaagtttgggatttagcagtgaatccataaggtcctgagtttttcattgtgaggagatttctaactattatttcaatctcagtgttttaggtatgtttaaaatttttcaatctttgtgtgtgtatatgtatgtatgtatgtatgtatgtatgtatgtgtatatgtatgtatgtatgtttttgagacaagatttctctgtgtagccctggatcttctggaactggctctgtagatcaggttgggcttgaactcagagatccgcctgtgtctgcctctttgagtgctgggattaaaggtgtgtaccaccatcacctggcttgtttcagttttcttaaactagagattttaaagacttttacctgggaaggccaagaaagagattaagcagtacggagctacagggagttaaggccaaggcagggttttttagagtggaaaagattagtaaaatctaggttcatgctgggtttgatgtcacacacctttaatatcagcactcaagaggcagacgcagctggatttctgtgagctccagggcagtctgggctgcataatgatacccgtctcaactaaattaaattaaattaatctaggggtagagataatggaaactgttgagactcccgtgctcacagttccttatgagagcatgtgtgcatctttataacctggacttgagatctctgtctatagtgtgtatcagccagctagcttttgttacagttgtggtgtgtaaccaactctagagctcttttttcaagtgatgattttttttttttcccacagaggacgtcagctgtctgtaagtgcagggccgtggtcttgtggtttttctctagttgtcagtcaaccagaaggtttgttccaaagtgaactcttattctgagacctagaggctgagggagctacttctgtttggtgtgtatcatttttatagtgagagatcaagaaaagatgatttaatgcttctccaaacaccctctgtggacgtgcatccaagcatcctctctgtagatgcctgcttcagcatcctctctgcactctcacccagtttccagtagtcacagccagtcacatgacaaagtaaagagtacagatttaccccttgcttattttcagggaatcagtacttggagatactcatctaattgacaatatgtttgttaatataatagtttcctcattagttatcaagggtacatttgaagaccccagtgactacctgaaacctacaggattttctgtgttctgtgttttcctctgtagcttctctggaacccagggcagtatcactgtgatgtcaccagataacaagctgtgactgttatgatccttcccagcatccagctctgtcaagggttgtagttacactctgacctcactcttgtctttatgacatcacccctcaggacctgccccagcctcaggagttattacaagtctcacaaactggggatacactggataaaggaataattcttgtcctgggctgttttcattgggatgacacaagaattcattgtgtgaagcatggtatacatttgaaaacccatgacttgcttgtatctggaattttccattgaatatttcagactgtgacttactgtagataaccaagctctcaacctgttcttcagctttttttttttttgagatagggtttctctgtgtagccctagctgtcctggaactcactctgtagaccaggctggcctcaaactcagaaatttgtctgcctctgcctcccaagtgctgggattaaaggcgtgcgccaccacacccggtgctcttcagctttctacagctttgcaaacaggactcctcttttgggggcccacccttgatttttcctcctgtattagtccactttccactgtgacaaaaccaagaagaaaggcttatttgggctcatgccttcagcagtttcagtccctaattgcttgacttggttgctttgatggtagcgtagcacaggatagagcaacccacgttggctgattcctcctctccagcctcggctccaaccttgtattttgcaagaagacaaggcaccaagctcattggatattttgatctttctaagcacatgtgactttcagggctctgcaaaggttatactttagcctaattcttgacctctgtcccgcatactctgacttctgctccagcctcagaaattacagcagttccttgggccctcttcccctgcttacaatgttcctttacttcctcccaagtctaccctctatagactcctactcatccttcaagactcagttgagccgttgccctttctctgacgtcagactctgcattgtgttgttggtggggagtctggcatcctgcagggtgggcctcagctacatgtctgccaggggtcactgtttcttccctcttgaactgtgagctgataagagtttgagaattcatggttggcatgcgttatagaccacagagttctctggttggcacacaccagtgttggtgtggcctgtggagacctgctttgggcctttgcttgcccttttttttttaaaaaattgtataagagtttttgttaacgtgtgctaagtgcgctgtgtgtgtgcctggtgtctgcagaggtcagaagtagctattggatcccttggaattggagttatagacggatgtgagctaccatgtgagttcaagaaacaaacctaggtctttagaagaacaacacatgcgcctaacctctgagccatctctctagcatcatgcctcagtccttgacggctatgagatctgagtcctgctccatcggttggctactaggaacgttgccttctctcctgagaggaggctggtgggaggggaggcattggggaagtgaaagagttgttgagatttaggccagactggtcaccatgtaggccagaaaggtcaccatttaatatgcttacttacccagaattatttctgagaatccttctggatctaaaagaggaagtaaggatagattgtccaagtctcagccagggctgggttgatctggtgcccaatctccacatggagactgcaaagcttggggtgcagacatgagagaggctgtgggactcttctgtggaagcatggctgtacccagagtgagctggggtagagggggagcatttaaaccaaagagaggcctggaagctgagggaagggagggcttggtgcttcttagaggctggagagtgacaggtcctggaataaggaactcacccgactcccaattgattacatgaatctcgggggaattggggaggagtctcagagttgctatatccagaattgtcacagtggacagttctagaagtgagattgtgtagtcctgggaggacagaaaaataggaattatttctccattttacctgtaggcaaactgaggcttagagtgctcatgtcttggccaagaatgatgagtgaagtgggagaagtgggtcatgcaagtcagatcttgaattccaacagtgcgtcttggagcccctggtagctccaaggagaaagcattctggagacaggtgctgggtcttagggaactggaggagactcttgcctggggcagggggagggggagggggcggggctgaaaatgctggagagagagaagttaggactaatcctgtcacacagcccctgtgttcttctcacacatgttcttgcctgataacaggccaccatacctagtttaagaggtactgaagatctatcaaacccaagtcctcttggatgttggacaaacactctgccaactgagctacaacctagacgctaggacttgttcttaataagcctttcattattataagcccgtgggtccctcttcaagagctttgctcatgattcagtgatccctttgggagtccagtgaccccttcacagggaccgcctatgaccctcagaaaacagatatttacattgcaaccgtagcagttgcagatgttcaggtatgaagtaacaatgaaatgattcccatggttagtggccaccacaacacggggaactgtattaaagggctgcaacattaggaaggttgagaatcactggtctagatgctttagtctgggctgtactgcagtctaggccactggaaagggggctgtgtgctgaaagtgaggtagccataccccacttggttctagtggtactggttggggtgttgtgggagcctcagtttccctgtcagctagacagcacagggcacagattgatccgataatctccctgaacagctaaacaaaagacggagggaaaggagtccgaacccacaggaagtgaattctcaaagcaaaacccacagagaggaagtgcttgttattcccagaggaatcccaagttgtcagcttgttcttgactgtagatatgaggaagccatcttctagatgtacctgcctggtggtttactgtggctctgccaggcaagcaacatttgtacaatttccctcaatccattcttgaatttgttaattccttctgggttgatggagcccttaccaagtactgggctctgcacctgcctgtggagaggtgagaatttacctaggggagaccatacctagatgtcttgagtgtgcactgagtctcctagggaatgtgagacaagtcttggcctcctctgaggtgactagctggcttcctgcagatgtggtcttcacactgagagtgacaagggatgttcctgaggcagaggagccctcggtgagagccgaccctccagcccttcctgtatctgctctaggaagctgagagctctgttggctggaaggcagaaaggaagccagaggaggcggcaagcctggtaccggtcagctgcccagagcggtattattagggttagcaacatccagagaacagctgcctgccttcccccttctaacagaagtcggtgagtgcttatgtggaagtccagatgtccctaggaggaacttgtctggcatcaggtccgggagaagcgaggacactcgcaaaatcagcacttggctccccaagcataagagcacagtctggggttgaagatggattttgatggatccttaggaaagtctggttttgtgtgtcagacaatatagtgcaaaggaaggctaaataatatttctaaatacaaacaggactgagtgtgcttgggacgccatcttttatatgttccaaattttcaaaaattaccacagaggtgctccgtggctgagtccaaacaccaagcacccccgaaaaggtgcaccattcagagactgtggcatagatagcagagggagactccagcaccagggcagagaaggaatgaatctagtctgcacaggacatggtgacttgctcagtgtgatggtccactgccctccagctgcttccttagagttcaaggccactctgactgacctgggctgtgtccctttacattcatgtgcagaagtaccggagatgcagaaggggacatttatctgttttgttcttaacaccagctgggcagcagccatgtctatcaaaggtactagaggcgagagcttcatggagctatagatgtctgtggtcagggaggtcccggggagtgttgggagggaggggctatgttaatgaacctcagaatttcagtgtccccagtgcgaaatgttgcagactttagacatagaacatcaatgatgtcatcgtggtggagatgtaatagtcaccaaagaccctgcttttatatcctggtttcaaggagccttccagacttcccaccctcccaccttggctctgagctgcatctttccttgaggctcggtttatctgtaaaggagaagggtttgaggattgacacttagtgtttccttcagctgtgaaatgtctctgtgtctgattatcgccaggctgagcctacaggagcaactctttgctttcttgacttcccccccccccctcagggtgtgacagctgagcagccacagcagtcaggggtgagaggatcaagtggcatggtagcatgttgtgtgttcagaacaggccagagtggagtcctgcgatgcagcttgggccagcacctctgattcactgcatgtttgattttaagttgagtttagctcattgtgtgttcagagcctttcattgttgcacataatctatggctcattcattcggaaaggcaccattacgtggggccacaaaccaccatgtggtgctggaccaccatggatcatgttccacatctggcttaccaggaaatggttacagtgttatcttgagtgaatcaaggcttgtgctctcaaaaggcgaggtacaggctgcttcagacagccctggctgaggctgtacttccaggagccgggactgcagtcgttgctgtggaattgtcccaaggattccattgagtgctcaaggcagctgttgccaccatgagggtaggctggttaataggatgacagtcactttgctcacagcagccctgggagcaagagtttgaaggctgttaattagggaatcagggtcttctctttaggagcaggaacatcagaggaaatgcctgcagtatagcagaaagcactcagtagcactgtgactttgatgaattctttgaacagtgcttaatatttgctcagcatcccagggaagattggggccccttgcactgcttccaaacaacatatcagagacccacaactgagtgacctccaggaacagggaggtactgattctcgggacaggtcattttcttcctcctgaccagcggctattgcatactaaattcaaaatggcttccctctggtgcccatggttagtctcggcctaacctcctgagctgtggtcagagggagcagaccttctcaacagtgctgggccttcctttcttggagccagctgaaaataaatgcaaggctgtttcctttgttgctaggcaagatgtgctagggtcaggggacaggtgatcaacctgggtgcctggcttgacagaaacgactctgacttgaacccacaactcactgggacccgagagtcagaacacagccctgctaatttgcatactgcttttttcttagcactcagggaactggtgttttggttgttacagtaaaatgactcaaatttcaggattctgtgggtcacatggcgagggcagctgcccggggaagacatgcaacctcccagcttgctttcattttctcttctatccctgcagcaggtagagctatggctgactcatgatgggggctgcgctagggcaaatccataatgactggaaaataaatataaatcgaaaatttgttgagtgtggctagctagaggaactccgggctcagggccctatgtggagtatgtgtagggtctcagttttttgattcaggattgggggtccagccactgcccagtgtcatgatagggtatcttactgcataccattcacctagaagagatgcagatctgaaatgcaaagtgtggtttcaacagcacaggatagcatctctaccatcagaaagttgaaagttttaagtcatccatcatacgtctggaaacctctggaatggaggctctgctgtctgccggtgaaaagcagaaaaagaggtgttgtccccctcactctccaggcctcagaggtaaaacatggctccctccagacagaggctggcgttcactctgttgggactcttggaccttgtaaggtttgaagcagagaggtttggaacggaaacaaacccggaagcagtgcctttggcagccggaagtcactctgccttcccgagcaagagtctacaaagtccaccgcagcctctccatacccagcagccagccccctcatcctggtgctctggggccgtgtctaggatttcctgccattcctcccatgcagtttccttttcctgctctgctgggcttaacttgatgttcagatttgctttctcagagggatgccacttgggacatggtcttcactgcccgagatctgctcactgcttttgcagatgggcaagcttccggcgaaggaggtggtccaggaaccagattactctctctatagctcatgcttacctttactcgttcttcatggcagttaccatgccggggccacgtttgacatctttgcctgctcctcatcctggcagctaagtgacagggatggatagtgctctggctttacaaagggggaacatgagatacacagattaaggaatgctctagaaccacatgggaagaaagggggttgggactaagacaaggcaatgagatggtgcacacagcagaaagaagacctccaagccagcagggagaaaggaagtccagcctacaaaggggcggggcctctgaggtcatggggccaggcagagctccttagtcctgagcccctccacccagtctcctttggtcattaaaatactggccccaaattgttcgttctatgctaccagcctcttatgaatgggtgaagtgcggtggccagggaaccctgaagaggagggtggtggcctggggcccggtgctggggtttagcaaagatggcagatgctctttggtcccttttaggcagcttatgccacagagccagctacatactgcttgccccactatgcaggtcacacttcctgtttgccactgggatccaagtggaactttgagtgaaagatgagagggtggatagagcctcctaaccaaaattgcaccagtcggaggtggaaagataccaaaacaggctaaactttcctttcgaagctagggaaactgaggtgaacagaagtttaaagcgagtgagaacctgtcctggctcccatagtttgccaaaagtcctgatgtgagattatgaaaccctcagatgagtcctcgtttccacattccacagctgaggggttggggctggcacaggtgtctgtctgggctgggaggagtcttttcgtgagatgagctctgtgaacaaattatttgcaagtcaataccagcaagcacacttgaagccacctctcctggcagtttatatctaccacgggagtgtgtgtggggtggacatcaggcagcgcgttgcacgtgtccagacagcggcctgagcacaagagggagtaacctggtgagtaacttcctggcagtgagtggcagaaccctggagggtaaggaggtggtgactgggtaagaggggaaggctgacttagtatctgctgcctttaaggcagctttggtgttagcctgctaccctgcactctgatttaagggaggacgcagggcgtagcctcataactgaagagcaaagtactgcttaaggcttagagtactaaaaagtgctgctcctccctggtgccacagtagggttagaaaaccctaaagcaaggtgagagaggaggatcagatgcagcgcacatgcaaggccacatacatgcacccccccccccccacgcacacacacagatacaccaagataaaaacacatgcatgcacaaacaccgcagaaatcactaaggttagctgtctcttagctgaccttgagcagtgtgttaatggcctggagcctctgtgtattggctccatggaggctgttgatgaatgacacacgagcaggatctaggaagagannnnnnnnnnnnnnnnnnnnnnnnnnnnnnnnnnnnnnnnnnnnnnnnnnnnnnnnnnnnnnnnnnnnnnnnnnnnnnnnnnnnnnnnnnnnnnnnnnnnnnnnnnnnnnnnnnnnnnnnnnnnnnnnnnnnnnntggctgtggctctccactccagtgctttgttttactttctgtatccctataacctgacaccagtggagtggctgactgtattttgggagctttccctccccctggtcacccatgaagactatgttttaaaggaatatcccggggcttacccccacacaccaacccggcagcgtggcacccttcttcccattagagctcttgaggacaccattgcacatcgggggatccatgtgcagcacctcagactcttcctggcaaacagacagtctgtctgccttcagtgtcgtcctcttttaaacatttgttcagtttatatggcctagagcaggctggaggggtggaggtctgctcttcatctgggttccatccccatacaggacctgtgcagatgcagaggggacagaaagtgaccgacagagtggctttccgagcagcagtgagttatgtcctgcagggagaggggaaaaacaatccccgttggcacccagtctctacacttccccttttcctcctgggtttgtggttaaactttccaaaccagacagcttcgggggaggctcattagaaggcttattttggttccatttttatttgaaatttacttaaaaacagccgagaaccggagggtttagacaggaagaccatgttgcttgctgctcgtttctgttggtgcagcagcttggactgcgctgcccttggcgttggtgatcttggcttcttttgcaaagggatgacagaaaatatggctcacgtttatgcaaagtcaacactgcttgctctgtgactttttatttatttctattttaatcttttgagtgttggggaaacatctaacttatttaaatacatttttgtctggttacaaaagtcgtatgttctcatcacagactgtgccaatgcagcgagcagagcggaagccctggccatccttccacagacagagaggctccctcctccctctgtggccccatttcttctgctcatacctcctgctggtcagtttcctttgcttccaggccgcgccttcgcattagtgttagcattttaggggataacatgagggagttgtccagtctctgcatcttccacagggcttggtacacagtaggtacttcataattatttatttcttggaacaggatctggtgcatttccagtatttagagaacagaaaagcccagatgggcaggtgtgggagatcacatgatccctcaggtacctgagggtctcaggactcagcactgatttttttctgacaagtccagcagtctggtgagattggggagatactgttctgagatgatatcacagcatctggttgcagccaggagtttcccaatatttgtagactgctgctgcctgagagtcttttgggcacctgcagtttatgtagtaagttcagtctaaagtgcaggggacactcagcatgtgagtgccagcacacggatgctaaaagcgtctgcagggatgcctaccctgagatgggttctgccagtgttgtgtagagaggtagctgctataagccatccctaccgcatctttgaatcagcaactggtacttcccagtgagcttactggatgctgaaagttgagttttttattgaggaagcagtaaacatggcaactgtgattagtgttacaaatggaatgtaattgcttaagttcaaggtcaacctaactgaggacgggctatagtaggagtccctgctttttataaattgcttttaagcccagcagggtagcacacgcctctgatcacagcactcaggaggcagaggtagactgtgagtgtgaggtctacctagtctattagtgggttctaggctagccagagctacatagtgagacctgtcttttttttttttttaatatattttaaaaagttgaatttatttacttgtaaaaatctacttctaattgttctatgacccaaaggtggggaaaacatttatttatttattttattctttgtgtgtgtgtatttgtgtgtgtgtgtgtgtgtgtgcacaaatgcaggcaccacggtatgtgtgcaagtggaggtcaaaagataacttgcaggagtccaggtacagaactcaggttgtcaggcttggctgcaagtgccttggcccaccaagctgtcttgcagcctcatctccactcttgtgtggagatggaccatttaccctggagcagctagggactctggaatctcagagttggaagaggacagaatcttcttctgtgtaccttgtgtgtgtgtgtgtgtgtgtgtgtgtatacatacatatatatatatatatatatatatgattgtgtgtgtatgtgtgtgtgtgtgtgtgtgtgtgtgtgtgtgtgtatagtaagcaggcagagagatgagctgaggcatactgaacagcagatgaaagaactgatgcttgagtgctcaggagcccacctggcgaacgaaacctgagttgtcagtgaagagcatttgcaatggctgcggttactataaccatccaaattaatgtgatcatataagctacagatccttggtcttcagacgtttacaacctgaaatgggggaggagacaggtgtggtggttgctgagggaagaggtaagggatgctaaattaatgcttagccaggggaataattcagagagggaagttctccatgctgaccaggcccagttggttccggctttgaccctgatggacacaagtgtgctctgagcttgttcccctctctgttggacggggctaatggagtgtgctcctcgggggtattgggtgccccatccttccctcagtcagcaggttaggtcatcaagtcatcctggatcagttggggggctggtgagtacaatcaccttcttggatctgctccgtgacacaaagaaggtgagccctggaagcgggccaggaattgagctcttgccatgaaggcagagagagctggagatataactagtcaaacaaccctgaaaagtccccaaggttgggtgttcctttttgcgtcaagcttgctgacggcagctaaggaagctgaagactgtgttgggtcctccacacagggcaacctttttgctcagaggctggggaactgcaaccagagaagaaaaccccaacattgcttctccgcagagaagaaaaggtattcaagggctgtctgctgacgcttctggtggaacagaggcctgaagctgggtgtaggagaggtgaccatgaaggggccagtggtacccactaagaggctgaggacccttgagggacctgtggggaaggcagaagcaaggagacagagctgggtttctagatgattccgtaaccccagctgtgcggtggttggtaatggagtacctatttcaggttctcacagggcagcacctcacctgccttatccatgtgtcactgagagtgaagctcacttttgcaatggcctgtgctttcattagagagcccagaacggggcttgggggaagcagagctatgtggacatttctggaatgtttccagacagttgaacatgtttaggaagccagtccccaaccccccttccttgttctctgtggtttcctagtttgtctcatggggcagtttggatggcagcatctttacctcacgccgagttgtactgcatgcatgctgccctcccttcctccacgcctcggtttactcacgtgtaaaatggggtagctcagaagattgggggcattggttgagagggaaggaatgcagagtacaggccttcaaggtagcctcaaaatcctcttgaaatccacggagctcaaagtgaacaggtgagcaaggtaccgatgagggagcctttgtttggacactcccctccgcagggcgatgggttacctcagggcccgttttccactgaacacggagatccttgggacccatgagctgtgtcattgtcgagcctgacacttgctaggtgttggtcctggtacaaaacaaatatttacctgacaaatgagtaagcagaccaacacttagcctcctctgatttgcaccagtggctggtcagctttattttaaaaaattatcatttgctagacaagtgctctaccactgatctctccccactaaccttcttccagattaaatatatttatgtgtggcgcgcgcgcacacgcgcgcgtgtgtgtgtgtgtgtgtgtgtgtgtgtgtgtgtgtgtgtgtgtgtatagttgaggggaacgctgtgggagttggctctctccttccaccatgtaggtcctgggaattaaactcaggtcaccaggtgtgaacaggttcactgagccattttgctgcttctgtttgcagacttcttcttctgggatatgagcaggtaattaagaggtcctggctttgcctgaacccagcatgcattcccaccaagtcattcaggacagccaccagagtccttggggtttcctgctgtgggagccatggccctgccgccatccaaggctgtggtcaaggcttgggtagggaaggtgattcagaagtgttctgggaatcgctcagtccatgccaaggccgggctagctgttttcaggctatgggtacatggtggactctggagacacacagagcaaaatgtgccagagtctgtgagggagagttctggaataatcatcaatgtgaatggagaaactgttgtttattgggaactggttaaagggacttctgccagcacttcatgggtgccatctctttccggtgtctgagagagtggctttgcaggcaagcaggagaaaccaagtgtttagagttgcctgaggtcattcagtcaacactgcaggctctcctgtagatgtaggctctacgcctggcagatggggaggtagggacagtttgttccttaggcacaagggacagtaacacaagctgctgttccctaagtactttatgggttccatgaactttacagatggatttgttgatcttggtaattcaaggactaaatgactttttaaaaatcggttatggggtcttgctgcgtcgctcaggttgacttgaattcctaggctcacaaaatcaccttttaaaagctgctgtgattatagatttgagccacagagcctggctaaagcatccctcagtctactccatctgctctcctcctgcagtgctagggctccaagacctcacttatgctaggcaattaagtgttttagggcactctattacccctgctttataggttagtaaacagtctcagggagtgcatgtccagatcacagggcaagaaatgttccagtccgtgaacaagagctgtctcatttcaagaacagacagaaaatagcattccccagtggcccgaatttgagttattttgtttgtttacttgcttgttagtttgcgagggcattatttttaaactttctgctaaaacttcttctattagatatgaattcctgaaagcatttttacgcttgagtcaattcattataagagtttgagaaaaatataataggagggaaaaaaaaatccaagacagaacaatctcaggattttctagtaaattcttagatttgaacacccctgggccatacacgactcactttgagtcagtttgtctgtctcccccctttcgagcatcaagtcaggcaagtcgcagaagttataagagagagaggcaaggacagcagaggtgcaggaggagtgaggtgggaatgtataatggttagcgcctctcacttttgagtcaagatctccttgtgtagaccaggatggccccaaactcagtggtctgctggtcattgcccctcaagtgctgagattccagttgtgtgccatcatacctggctggtgatggttaattgtgactaccagcttgatgggatttaaaatcaccatagaaacatgcctgtgattatgtctaggaggaggatgcttccaacaaggttgaactggacatggaagagctaccccaactgggcagcaccattctgtgtcctggaatcttagacggatgacaaaggagaaatcaggggccagaaggctcagtgtttaggactgcatgctgctctcacagaggacccaagtcagttcccagcacccaccttgggcaactcacaaacagtttgtaactccagctccatggaaaccggccacctctgccctccagggatatctgtcatgagtgtacacacacacacacacatacacacacctaaaaacaaaaataaattttccccttttaaaaaattcagctagctgagcatgggggttcatgtctgtggttgtaatcagtgacaacagactgcctttccttgctttttggtagaagacaagacaactacattactccaagaactgggcctctgtgccaccatgggaaggactctagatttcagctgccatctgaaaggaccaatgggtattaaaaacagacccagtcaggtgtgctggtacagacctgtaatcccagcacttgggaggctgaggcaggagagtcacaagttccaggccagactgagccacatagccctgtttcaagaactaaaatacagcctgagaggacccagtctggaagggtacccggagatgacaccattgagtcacactttactaaactattttcacggaggggggtggggtggggnnnnnnnnnnnnnnnnnnnnggtggggtgggggggggagggaggggcaatttttgggatatctcctccatctgtcagctgactctcaacaggaataaacctgggcaagtgtcttagtcagggcttgtgttgctctgatgagacaccatgacaaaatgcaagctggggaggaaagggcttatttagcttccacttccagatcatagtccatcgctgagggaagtcaggacagaaactccaacagggcaggaccctggagcaagagccgatgcagaggccatggaggggtgctgcttactgccttgcttcttatagcccccaggaccatcagttcaagtatggcaccatccacagtgggctgggccctccccacattagtcaataaataagcaaatgccctacacctggatcttaaggagacattttttcaattgatggtccctcctttgagataactccagcttgtgtcaagctgacccaaaatatccggcactcaaggcatccctgaggtatgagtggaagaaactgttatgttcagtgggaagggtggcgctcatgtggatatgaggagttcctggctctggggccttgcccatgttacccaacctctgagctgcaatttccctgcctggagaaataggcaggttgcccaatggctgtggtgagggtggaatgagaccattattgagattgtcttggggctggagagatggctcagaggttaagagcacctgctgttcatacagagaaccctgtttgattcccagacccccttggcagcttaaaactatctgtaacttcagttccagggcatttgaccactcttggattttggggaccacacacatgtgcaaaacactcatgcacacaattaaaaacatgtatgtacatacatatatatggtggggaggggaggaagagagacaggtttggagccagggtggccttgagctcacagagattggcctccctttgtttccagagtgctggcttgaagggcatgcaccaccatacctggcttttattttgaagcatcttgtgaagatgagcagttccccattcctgaaggcttcgatcaaggggcttgggaaagagggttagtggaagcctggggggactgaccagttaccacccgcataaaaaacaggagagacttaaagcaaggatggtgaatggactttttccttttaggtcatctagaaggccctgctgtttttcagctaggggcccagcattgagacagcaaggttgaggtgtaggaattagccctgggaaagctgacatctgctcggagggacactaagaaacaggcacaggccagactggaaatctctgactctcagcagctgtgcctctgactagacagagacctgctgctctccttgcatggccaaagcgtgttctctgctcctgctccctgggtggaatggctttcctctgcccagagactgatgtcctcccatcattgataagtagctctcctggccctagactacagcatgtcttccagctctgaaggagcaatgattggttccaaagcccagaaccttcacctggagcctagctgtatgttctaggggccagggatcccccagggctgcattaccgatatttggagagaaaagctggcctaccctcttcatctggtagggttgtgggggagctgagcaggcagactacacagaggttgctgaatggaagtggaagggagagctgggacagagctggtgtaggagacctgcctggggcccttcgctgtggaacacagcgtgcataccttataaagtgtcaacaggaccggtttcttccttacttaaagcgtgaagggattagattaactctaggccacagtggaaggtctgtcttaaagctggaccgggcaggcggtgtgcaagatgtgtggctatgtattacttgggaagatgcggtaggggcccatgagatggctcagtgggtaaaggtgcttgctgccaccctgatcagaatttgatgcctgggtcttaacagtagatggagagaacagaatctcaaaggttgtactttagtcacgtatgctgtgtatccccaaataacatgcaaaaaaaaaaaaagaagaagaagaacaaacaaacatagtttttctcctacttttttcttttcaaggcagggtttctctgtgtagccttgaatgttctggaattcactctgtagaccaaattggccttgaactcagagatctgcctgcctctgcttatgaatgctgggactaaaggcatgcgctatcattgctcaaatgtaaattttaaaaaactgaaagaagaaaaaaaaaaggtaataattccattttcccagagagagctgagtgtcctctctggcagattcataggagcctatgctcctgaccacagagcttcatgaggctgccaccatcatttcagaaatgttgctaggagaaaagccatggccagagcaatttggggattaaagggtttatttaatcttacagctcgtagtccagcatgaagggaagtcagggcaggaactcagaggcaggaaccaaagtagagaccatgcaggagtactgcttcctggcttgctgtccttggctcgctcagcttcttcatatagacaggccacagtgggcggggcttcccacatcgatcagcaattaagatataccttcagagcaatctagtggaggcaatttcatttatttacttacttacttagtatttatttatttaatgtatgagtgctttatctgcatgtacacctgcatgccagaagagggcatcagatcccattagagatggttgtgagccaccatataattgctgggaattgaactcaggacctctggaagagcagtcagccagtactctttaactgctgagccatctctccagcctatggaggcagttaattgaggttccttcttcctgagtgactctggtttgtgtccagttgacaaaaactaaccagttgtaatagccatgggaacatcaggctagaaatctcttcccaagaccgatgaggcaggctgacacacaggcactttcctcacacaaatgtgacagcattggtgggactgagcactgcgctaatcacgatggtgctttcggagacaaagctgtgtccttctcaaggacaagcccacttgtccttcatgaggacaagccatttagctcttgatgttctgcatatgtggctctcagtaggtgccagcttccacacagatgttatcattcccattttacagatgtagcagcgcaggcacagcggcatcaagtaagcctcccaggatagcacacctcacgtggcagagccatgactggcatccagaccctagatctctgatctcttatccagcctgctccagcccttccatcactctgagacatgatcatccccatcacacaggacaagaaacccaagtcactttgccccctggctcagcaagattgccttttgtgaccatcccaaatagatttgggactgaacaaatgacagctagcaagctttgtgttactagtgctctctgccaagaacacttaatccccacattcccatagaggtaagtggggtaggaatcacagccagaagtgacttgaaacaaaaccagggctccccacttcgaggctgcagctgccacttctggatggacagtgtgaacagaccaaggcctgagggtggcatggtgacattcctcacccctctcccgtttgtacccacctgcccaccgcactgagcgcaacagctgacctggggagcatcccttggaggcccccagggaggaagggcagttctgggatgcatcgggggagtatcctaactgggtgggctgactctcagagcatctccctttatgaaggccatgtggagggcagaagtgagggttctctgagttaaaggagggaagctgcttcctgtgttctggagtgtgggagagttgggatcggcaggaggccccatggggagctggtaatggctcagttgatgaggagtttgaggagcatgctcagagccctgtgttccatctccagcactgcaaacatttagaggccccactaccctgaggccagtcccttccccagtggcctccctcccatggaagaccttagttgcaccctcccaaggagttcagtcccaatgaggaatccaggagatggaagaggcagggtctacccatgatcctgggaccctagagagtgaggtgggcagggtgggggttggggagatggtgtcagagtatatcaagcttccacagggagctttctggaattttccatccttaacaatacacatggaaaaagcctgttaatgaggcccacttgtgtgttctaatcaagcagacaggtctgtgtaaccaccatccagaccagagcttgccacccctaaggagcctgccgtcccctcttgtaacaccataagttaattttacttgtgtaggactttaagttgaagcatatagctgataccccctcccccacctttaaaaagacaaggttgcatgtatcccaggttggctccaagctctctgtgtacttaggcctggccttggaaccctgtccacccctcccaagtgttagacagataggccctgtcatgacatgcctgacttaagaatgtgtcctctggatcagtctccttttgctgagtactgagtgctgaggtccccttgttgatgtgacctggctgcagcttgctggttctcatcgctacagaaaggttgccattgtggcaattggtggcaacttcccgcttctgttgggtcttggtccagtgtgggatgtagctgatgctcatcacttggaaatagacttgagagaatgactttgtctcaggaatgtgccctgtgggttgaatggatgccatcagagaggatttcagcaagctattaggaagaacttccagtccctgaaggttatggtcagctggctcctgctctcagaggaggaagccgtgaaacttccttctgagaacaggaggaagaggctcaattccaggctgcgtgacctggggccaggccttgactccttcctgtctggcattggccccttccctgtcgtctagggttcccagacttcccggcagtgtcccagtcacttggggagggaatgggacagggggccctgagtaccatctccctgcttgagccaatgtgtgccatagacagcattgcctctgagaacaataggcttttggaaaagcacagccgatcgcagggcgcttctgtgcacacagtgtgcaggcctagtgtgcacacagcctgagttccatccctcatatcacataactggttatggcgcatacccatcatcttaggactgttggggaggcaagatcagaagccctaggttgtcgttggctacacagtgagttcataggctgctagggatcctatctcaaaaaggaaaacaaacaaacaaacaaagggtgggcagggttaagccttgtccctcaggagcaggtatgggtttctgaggctgtcccaagtgcatatggtaaaggcttctctatggagatttacaccattttctaaagtgcagtgttccacataactgtgtggcttccagagccaggctgtggaggaagagcttatctcagaaccacattttggcgtcccatcaaagtgccttgtccgctcacctgcctctgccccaggctgtgtcatacgcatctccggggaggcatcacttgagaatgagtgcatctcacagggctcccagttttccctgggactgggtgatgtggagggtggtggcctcatcgcttgtgactcctggcctggtttggtcctgcagtttttcctctgggtgaggaagtcagaggaccaacccagagccctgattctgccttgctgcgtagacctgaatcaacagccctgataaacagcccatttcccggggctgagggaacaaagcctgtggctgctgccgagggatctgtctgcccaccccacccctcctcttcctgaaacagctgtttattcttttgacaggagttggaaccctgtaccttcctttcctctgctgagccctgcctccttaggcaggccagagctcgacagaactcggttgctttgctgtttgctttggagggaacacagctgacgatgaggtatgtttaaaggatttgtgtctcccagccttgggtcactgcgagctactgttaggtcaccaaatggttccacctgagggaggacccttgctctcttccgaagctttccttggtcccttctgtgatttgttgtcctttcccttttgtttctgaaacaggggctggtggaatgctggctggggactttggtattctgcttctcttggcagcccccggggctatgccagtcaaggctgcagcctggagttctctgtgtggggtttgggttggcggggctgagtcttgggcagggcgcggtgggagggtgctgagtcttctctgctctgggctgtctcgtacatgtccgttggctggctgttcctgggaggtatcacttgagattgattgcattccacatgacactgctcccagggacagcccggcactcccctagcagctctgctgtagaaaatgctttgatggtggttcctgggggcagccaggaaaaactgtagttggatcctaacgttagacttcctaaaggagactgaagtagaggtggtgaggcaggtgtacttcagaacaggttgtactgcccatggtggtgtgtgatggctgtgtctgtagatttagtcagagtcctggctctcactttcctgtatctgtgtttattctgaccctaatagtattaatattttctctgtgtgtgtgtacatatgtgtacttatgggcatagaggccagaagagggcattggatccctggggctggcactataggtagttaagagccacttggtgtgggttttaggaaccaagctgtagtctctctgtagaagcagaaagccttcttcccactgagccatctctccagccccaactccgattccaaccttcttaatgaaaacatgactgaaagctagtttttctttctttttccccatccattgtatcatgtttctccccatggggaattttataataaaatggtctccccttattccaacactgccccactgcccaaaacgagacctagaggtagacactgtgacctaagatcattgcttctgaacatgttcagcaacctcgtgccagccacctcttcactcaagtgtggtctcggccagaaaacagagccatgggcaccacgatggccattggtgagtgtgaggcggataggacatacaagtgaggacagtcaacaccaagcacaccaggagatccctgctaatggcagaaaagtgattgagtcaggccccccagttcatctgaggagaagctgaccctacctagtgtttgggctctttgggggtgggggtggtgtgtggggaggcaacagtcacaacaacaaggcaatcctgagtagcacaaagagatctgagtcttcccatgatggttggcagggccttcgggggccaactcctgggatgaaatcccagccccagagctgtctgctgtgcacacaggtaagctgattaacccgacgagcctgtttccatgtatgcacaaatgggattaatagagttacatcccaggaccattgtagcggaactgaaagacagctggagaatgcttcagcctgggcctggctcaggacggaagcaggtatggagctgacttgatgggggacggggcactttaagaaaaagaatttaaagtcatagatacaatattccctagggaagtgaacatgtagactgtgaaaaggggtatatcatgtaagcgagtacggccaagtccttcaaacaagacactcagaaatcaataaaatgatggaaaagttggaaaatggatgggatgtgtggagctgcgtgatacatgtactatattttggctgcaaattaaaaaaagtaattttttttctacttttggttatgcccaggtatgtgtgtcagtgtaacggtatgtgcgcatgtgcacatgagtccaggtgccctcagaagccagagaggttgaattccccaagttagttgattatgatctgcctgatagggatgctaggagagcggtgtgcactctgacctgcagagccagctctccagccccagggccgcagacctagtatctttactaggatattctagaccagaggttctcaaccttcctaatgctgcggccctttaataccgttcttcatgtcacggtgacccccaaccataaaattatctttgttgctacttcataactggctttgccactgttatagatcataatgtaaatacctgtgttttctgatggtcttagatgacccctgtgacaaggccattcattcaacctcaaaggggtcatgacccaagattaagaaccactgttccagtggcaatttctttttattttaaattaactttatttagtgtgtgtgtgtgtgtgtgtgtgtgtgtgtgtgtgtgcgcgcgcgcgcgtgcgtgtgcatgcatttgtgccttgtatgtggnnnnnnnnnnnnnnnnnnnnnnnnnnnnnnnnnnnnnnnnnnnnnnnnnnnnnnnnnnnnnnnnnnnnnnnnnnnnnnnnnnnnnnnnnnnnnnnnnnnnnnnnnnnnnnnnnnnnnnnnnnnnnnnnnnnnnnnnnnnnnnnnnnnnnnnnnnnnnnnnnnnnnnnnnnnnnnnnnnnnnnnnnnnnnnnnnnnnnnnnnnnnnnnnnnnnnnnnnnnnnnnnnnnnnnnnnnnnnnnnnnnnnnnnnnnnnnnnnnnnnnnnnnnnnnnnnnnnnnnnnnnnnnnnnnnnnnnnnnnnnnnnnnnnnnnnnnnnnnnnnnnnnnnnnnnnnnnnnnnnnnnnnnnnnnnnnnnnnnnnnnnnnnnnnnnnnnnnnnnnnnnnnnnnnnnnnnnnnnnnnnnnnnnnnnnnnnnnnnnnnnnnnnnnnnnnnnnnnnnnnnnnnnnnnnnnnnnnnnnnnnnnnnnnnnnnnnnnnnnnnnnnnnnnnnnnnnnnnnnnnnnnnnnnnnnnnnnnnnnnnnnnnngtctgggatggtctgggcagcttcctgttcaggtggcttcaggcagatccccagagtatagtccttgtaccttgataggtagtacagctgggctgggtaccagtttgagggagcgctggagacttggtacatcgtgacccctgaacaggaagaaagtaaggtctggatgctatacaaggttctgggaccctggtgggtaagtggggcagttccttgcttcctcctatagccccagacagctaccagagctagacagagctacctgtactctgatataaataaagctctgtcttgtgaggggacccagaggcccaagctgctggggcctggtgagctagcatctgtaccacagtacagatacattggtcaactgaggagtctatctttaaatcatccaggactgaggagtctatcattaaagcatacaggccatggcagcagggtgagcccttgtgcgtgcctaaggaatatagatgcctgggactgacttcccatccagacctgggtaagtggagaagcctggaagagaagcctgctgcaaatgacttctttatggactgtgaaactctgtttccagggcaggaagctgacccttggccttctaagagtgaccctcagccactttcctgcctgatgttggcaaatgccttctgtgggcactcatgggaggcttctctcagcctgcacctggggtctcgggctcatcccagctgctctgtgaggggtgtcatatgagcctaagattcttgtctctggtgaacactcagttctgcattcttgattggaacctctctccctaagaacattgtcaggttatagctgccggttgtggagaacacgctgactgcctggtacagcatgctttgcaggcacagtctatttctgtcctttgtaaagccctaagggagatctttgtgtctctatattacacatgggacaaaacctcaggttaaagcaacttccccaggggatacatctgggaccctgccatggtcagagtcaccacctagtctgatctttacctgtagtgctggattaaaacactcttggatataattgagggtttggggataccaaaggctggtgctataggcagaggattagtatagaggtggagtgctctcttagcatgactagtatagagagttctatcactagaaatgtgtgtgtgcgtgtgtgtgtgaatgtgcaagtgtgtgcatgtgtgaaagtatgtatgcaagtgcatgtgtgtgagtaagcatgcatgcgcatacacatatggatgtgtgagtgtgtgcaagtgtgcacacgtgtgtgtgtgagagtgtgcaagtatgttagtgtgcgagtttgtgcatgtgtgaaagtgtgcgtgcaagtgcatgtgtgtgcacacacatatgtgtgcatgtgtgtgtgcatgtgtgcctatatgtgagtgtgtattttgtgtttatatgtgtctggatgtgtctgtgtgcctgtatgtgtgtgtgtagctaacaggcaatgtccagtttgccattctattgctttgtttgcttttgtaacgtttgtcactccttgacactctttagctttttgcctcgacccccccccccagcccccagggaatggagggtccccagtggccttgtttactcgcatgcctctgtgttcaagagcccactggtgcccagtaacctagttcatggtggctgatgggtcagagtggtgcaggactgaagtccctcaggactctcattgatttatttatgccacaaacatatgggtgcatctaccaagccccctgcagggtctgtgccaatctggactcatcctgcctgctcattccttggggaggaaagagtggcttccaggcccagggggtggagagcacatcctaggaggtttggtttctttggcaagtgctttcttccctgcctgtctcctgctctccaaggcaacgataatggcttttccagggaaccttgtgtgtccagctgaggttcacctttcaccctgattgaaatggagaaaacagcagcgcccagtgtctgcctcagagagggattgtttggaaggaatgtttccatctggctagtgggtctctgaggttctcctgaggggtgttcattgagccatgaagtggatccaggaaggtggaggcttgccttatgagatgccactaacactggtgtgtcccaggaggagggacacaggtgctaatctgtcaaagctctgcagggttgactctgggagtggccagaggagcaagtgagaagtgacaagaacattgggtcacagggtctcagagtttacaggagggctccagccaccactgtctatctgtctgtctgtctgtctgtctctctgttttgatgtattttattttgttttttgtttttttaaaagactggatttctctggctgttctggaactagctctgtagactaggatggccttgaactcaaagatccacctgcctttctgagtgctgagattaaaggtgcaggccaccacaccttgccctctttcttttaaagtgtaactcctatttttattttattcccagattttttttttttttacaaattataggagagacaacacattcacttttaaaagagataaacatacttattagagagcttgatctcagattgacccatacgaaatgttcgtgttttataaacgcaaccatctaacatatgagatgcctttttatttttcctctttcaaaaattattgtagtaagctcactgggctctctaaaactataaggacgtactgtataagtcttctgtaaagccatgcagttaacaggtgagacatgagagcaggtgtttatatagtagcaagcagaacagcgtaggtgaaggtccatctgaagccacttcttcacaggggctttagtggaggtcgtggggcagcatcagtgtctaaatcatgctgggggtatttggtccttcaaggtggcctctacaatattctgaatggcaaacttaatggcctctagtgagcatatgccaggcacagtttgtgcaggccctcggcccgctttggtggaaccattatttggttctttgtttcttgctcctcctcctccttctcctccccctccccctcttccttctcctcttcttcctcctcctcctgatgatgattgtcatcttggagccaagatctgaaagaagccaaactcatttcttacctgataggcaagatggtcatccaccaatcttcagaactgcagtttgaaaattctgaggacacacagaacttttaggccatgctggctgcaaatgtctcatattggatcagcgagaaaatcaaaatggttttaaaagaccaattggccatgctgacagcccttgcttccctgggaacttggggtctagatcctaggaacatgttgtgcctgtttcttttttgttttgttttgttttaaagatttatttatttatttttatgtatacaagtacactgtagctgtcttcagacacaccagaagagggtgttggatcttattgtagatggttgtaagacaccatgtggttgctgggaattgaactcaggaccttcggaagagcagtcagtgctcttaaccactgagccatctctccatcccgctgtgtccatttctaacacttagctctgacagctttcagttagccacagccaaagggcatgtggttccaaaccattagtgaagcccaggaagaaatcaaccttgggagtcagttctgatatgaattcctgaaatctacaaaagtcacacacacacacacacacacacacacacacacacacacacacacacccctaccaggctgctgagggtggggatcaggagtaccagcctggactgcctctggtggcacgggtgactctgtttctctgtgtcctgctccttctactaggaagaggctttggatttgatcctaggtaagtggggttggcacggctgagcctggaggcctgggcttgcccttatctcccagcaagcccaggatgtctttagacttgatcagagaaatgaaagttcatctctcttggcagcagctctagctcaggctgggctagagtaggtggcgaggccttgaatgtcccccgttctcatccatttgcagcactccagaactttctccaagtgttctgagcactttctaaggaccagtcctcgttttcagcagatcctcccagcagcgtcttttatgaacatcagtaacgaaggctaacattttggaaaagcatgtatcctgttatggcatggctctgaaatcactgctctccccctcccccctccctctctgtctctccctctcttctgccctcccttcttctatctctcctctccctttctttctccctcctaaggcagtctcactatgtaagcctggctgatctggcagcatagttttgtttcttgagatttgggattaaagatgtgcacgaatgtgtgtgcgtgtgcgtgtacatgtgcttgtgtgggggtggtgattggtgctggcagctcatgtaccagaatgtgcatttgatggtcagaagacaccacttaggagccagttctccccttccatggtacattttgggtatcaggctcaggcagcagacttctcagaaaaggttacacgcggagccatcactctggcccttgtttgttatttgagatagtcttgctgtgtatagcccaggctgtcctcaaatttgcacccctccatcactagtcttatccccattgtcaaaacaagaaaactagtttaatttgatctagcagagcctcccactcccgacccggggtgcctaatctgaagctctgggttgaattcagactttggcgcgcatgaatagcttgacatctgtggtgtgcattctctgaaccaagagacagagcacattaatgcttatgcatagaggtcatgggggcgtgctgctctggcttgctctccgtggcttgctcagcctgctttcttctgagtgccctacctagccttgaggtctctggagtgccactctagtgatactatgagttggaaattggggcgtgcagaacagcaggcagggcagagggagcagttaagatctactcagagctctgggtgacaaggccaggacccattgcctgtgaggtatgtgggccagacaggaggcctggctcatctgtgggccaaaggattgtcctctctgagcttttagaatctcaaagggccagctggtcttgaggaacggtttctcctcagacaggagagtgctgaaaaggatcaaaatgtcgtgacaaaacttcctaatataggaacagcaacatgaggtgtacactacaattgtcctctctctttggccattagaattgtctgtgactcccccagtaatgccagggttctggtactccacccccacccctcaacaggtgaataaggttctttgaactcagatccagttcttctttaccccaaaggctctgacatctgccaatctcccctcaggccactgagagctctgtgcatcctgtattaaagctttagctcacagtgacacacctaatccaacaaggccacacctcctccagcaaggccatacctcctaatagtgccactccctgggctaagcatatacaaaccattgcattccattccctggtccccataggcttgttcaaacacatgagtctaagggagtcatacctagtcatagcataatgcaaaatacatttagtccaacttctaagtccccataatctgtagcagtctcaacaatgttaaaagtccaaagttcaaagtctcttttgagaatcacccaatcacttaactataatccccaaagcaaaacaggaaaccagctaggcaaactccaaactctgtgcctccatgtttgatatcaaagcagtcttcagatctccaacttctttttcatctttgttgactgcaccaaacttctttctcctgggctggttccactccctgtaagcagctttcttcagcaggtatcccacagttccggcatctttaagatcttgatgtacccaagtcaacttcagcttcacagcttcttgtttcaatgtctgggatccacacctgatcttctgggatcctccaaagggcttgggtcacttctccatctctgccctctgtagtactctaggctctagttgactccactccactgctgctgctgttcttggtgatcatcctatggtactggcaagtaggtgaaagaagaagagtgaatattccttctcccaatgtccttatgtaggcctccagcagaaggtgtggctcagattaaaggtgtctaccaccatgcctggatctaaaacttgctttgttccaggctgactttgaactcaagagatctgcttaccccagtctcctggaattaaaggcctgtactacatttgcctggacctaagattttcatgatcactatgcttcaagatctccatgtcaacaagatctccatgtcaagatccaagtcagaaacaagtcttccatcctcaagatctggatcacaggtgtgcccttctgtttctggattatagttcatcccagatgtagtcaagttgaccactaggaatagccatcacaagcccgttgtggaggctgccccctgccccccgccccgcgcgcccctgaggctctcacccctttcttgtggcagctcttgtcttcatctccagtgtacaactgtcattcccactctgcatcttgccttcctgaacaatcaccgtcccaaagttcttctcagtcttttgttatcctcttccctttctttcacaatcttatgcagaatttaaaaaatacctgactccttcagtagttccagttgtttgctggcttgtggggggtgtagtggggtgaaccaggtggggctgaaaagtgggtgcaggcttagattatagccattagagcaagtcttcagtgttccagcaacaacagtttttgaatgggagcctcagaggtaactagaattctacggaacatcttagagctacttcctctctttccaatgcccacatggatgggcttcagcatcctttcagatcatgaagcctcattaactgtgctggcctaattggccatgactagtttgtgtgcttgagggatagggggaggggagacacttgtcgctgagtgagttacaaatgtatcctgttaggaaggatgtgggcagatgcctttcattatctttactgcatcaaacattttatgggtatgagtgttttgcctgcaagtatgtatatgtaccacttgtatatgtggaccccatggaggccagaagagcatcaggtcctgtgaaaccagagttatggacacctgtgagctgcaaatgtggatgctgggaactgaatcgagcaggtgtttcattgaggtgtttcaaccacacagctgtttctccagccccagaagccatctctcattccagatttagtttatttaatctatttccccctctttttttctccctgcctctacaggagaaaataatgaatgtcaagggaaaagtaatcctgttgatgctgattgtctcaaccgtggttgtcgtgttttgggaatatgtcaacaggtaattatgaagccagctagaaaggctgctttcattccctgtgactggtgccagctgagtgaccaatcagtctgaacataagggacggagccgtgagcaggagtccagtcttcctgtgttcctgagccccagatggccattaaaactgtagaccatccaagtcacttctgccttagtaattatcctctttcatgccgtgctcctcaaacctcgaatttctgtaagctagatggagagagaaagtacattaagccaaaaccaccatctcaagtaatttgtataagcagatcccagaagattcaggccaggcagggtagtgcatgtatggagtccttgtgcttgcaaggcagaggcaggagcatcatacaaatggaagaccaagcttgtcttcatagtgacttccaggccagctgtagccttacaaggagaccctgactctaaaaataaaggggctggaaaggtggctcagcagctaagagcactggctgctctgtcagagggcctgggattgactcccagcacccacatgccttggtggctcacaaactcctgtgtccagtgtcaggactccttcattgttttctggcctccctgggcaccagaaacacaaatggagcatatccatccacacaggcaaaatacacatactcataaactcgaaaaataaagaaaggaaaaaaagataaacaaatgatccaggtaggacttccacaagaaaccagctctgagtcccgcagtcctaaaatatttgcaggatgaaagggaccatccaagttgctgggatttgctgcaaaaaaataccaagttttaccagtgattcgttcgtgagtggctgaaagcctcttccgccctcccttggaaagaagggtgaatgaaatgtttctaggttgtcaaatgcatctgtgaattaaaatctatcagctgcctttgctcctggaagctctgctgtttgaggcctcagggggagatatgtctccatcaaaaagtccctgcaggctcctaagaaggagcactgcctgagctcagttccacttcagctggtccagagttttctcagaagaatacattttttttttaaaggtgaagtgtttagtggcccgagagttctttaatctagattgtcagccatctgatttatctctttcagactcttgagttttaaaatcagatgagccagcagaactcttggggctacaaaaagaaaactgtatctttaggtccaggagtaggaggggcaaccttccagtcggaatgagcaagataagagtttcaaagtgtagcaaacatgtaaccacttctgggatgttctgttgtttcattctgaatagccacttttgagaaaaggcctgacaagatagggtgtgaccaacttaaaaggtctggagagtaggccatttgaattgaggaagctagttcaagttaagagatgattcactaattggatatggctacccttaggctcttgggctgaagaacatcttggctagaccttaaagccagactgcctggttggtcctggacgcccatttactgcctgtgtggccttgggcaagttactcagctactctgttctttagttccctacttttaaaaaatgaggataatatcccagcatggtggatcagacctgcaatccccatacttgagtggctgagtctggaggatcactgtgagttaaagccaacctgggttacatagtaagcttatggtcagcctgaactacagaatgagactccgttttaaaaagaaaaagaaaaaccctaaaaacaaaactgtagagatcacaggtcagtggtagagcacttgcctagctttgcaaggaatccctgtaccactgatgagcaaacaagaaaattcccactgccttcatcatcctcatcttggtcatctctgtcataatagccgggtaccacagcttgtgtggtggcttcaaccagagtgtcttaggcaaaggtgccgtccttgtcagttcccatgtgaacctttctccttggtttgtagacagccaccttctccccagacccacatatgatggagaataagcaacttgtaattgtttccttttcttatgaaaacactaaatccatcatgaggccccagccttaggctcccatctaaacctagatacttcccagatgcctacctccaagtgccacatcttggggacagggctttaacagacacattcactacaccgtagcagtctttgctctgatgggcaaaacatgcatcaagattgtggtgtctagaaggtatgtctccaaccactcactgggcttgtcctctggggctggaacactcatttagataaccagcaagctctgaacggagtttgattagacacctttggtgttgtcttattagagccatgcctctgttttttgagtggctcactaatgaagacatggtgagtagagagctggctcagtggttaagagcacttgctgctcttcaagaggacctgggttcaattctcagcaccctcattgggcagctcacagctgcctgtaactccagctccaggggatgcagtgacttcctctggcctccataggcactgcacacatcagcatccccccctcacccccgcaacacacacacaccgagggggggtacggagggagggagggagggagggagaggggggagggggagagagggagagagagagagggagagaagaagagaggagaggagagttgaaagctcaagagtacatacatacgggtgtggcatctctgaaagagcattattatctttgttgccaggcatatgttctgagcatcatggctgtaggtggtctggctactttttaggcagttgtttgatactaagactctagatacattgtttttctgattcatgaaatcacttgtttttctgccagagtacagaaaggggaacaggtctctggcactatccaaactggctatgcactgacctgaggtggaccaagggcattcaccctagagaggcaggtggcactgtgctcaaagggatttaaatataactgactatatccaagaactagtatataagtcatttaaaactaatactgccttctgggccaaataggactgcagtgagatcctgtttcaaaaaataataataagggctggagagatggctcagtggttaagagtactccctggtccttcagaggacccaggtttgattcccagcacccacaccgtgcctcacaaccatctgtaactctagttcaggggctctgatgccatcttctggcctctgtggaaagtgatgctggcaaaatacctattcccataaatttttttaaagaaaataataaatgaataaggagaatatggtccaggaaggcatttgatttcaaggtttttgaaaatccagtgccatgttttagagccagaaggaatcttacaggttagtataaccattgagataaagaaggtggtgaaggtggccggagttactgagcatgtgtggatacccaggctgtgtcactcctgttcttagaatggttccgcaaagtgggaatgactctgtgtgtgtgtgtgttgatggcaacaccaagtctcaagaatgctcaattaaagtttatggtcatgtttggggaggacttgagcccctgttgcctgcctgcctgtgagccattcttttacttacagcacgcctgtccttgagctgggccattttatgcagatgacagagtggaggccagccttgctgggggccagccttgcaggggaacagggtggggtggtcagtagtggtttatatctttgttctaagtagtattagatcttgagatcctccgcctcaggctccatggaagagtgctcccgtcttctgagtgctcaagggccacatgaaagccgaatagagcccttcaccatagggcattacagtatggattgggtgagctccgtgcataaggagcctgtgatttaaggtgaatgaagggagttgaggtagagaggagaccgtgagagactgtgagacaaggaggcagagactgcctgccctggaaagagattcatagacatttgtaaaacacattctgtgggccaagtgccatgccaggatcagatcagggagggcacagaagaggtgactttttgagctgtgcctggaggattagtgctgctaaagtgacagttgagcctgaatatcattggcagattctaggagaagatggtaaaatttagaaggaaggctgttaaagacatgatggcaaccattaactacaaaatagtgccccaatgtcaagtagtgttcttaatgttggcttgtcttctcctctcttctcatagttgccctcttttcctcatggtccccccttttctaattgtctccccctttttcctcattgccttcctctccttctcattgtctcctcctcctcctcctatggtaagatgtggagttactccacaggctcagatgtggggttctgcacctcattagtagaatgactttgagaagactcatggattgcccctgccctccagagtaaggctggggacagagtggtgtgaggattcccaaagccactgtgtgtcaactgcgtggaacagtgcatggctaggctcaccaaagcactacattaatacattgatttaggagctaggtacattagggctttgtcctggagtatggatcttggggcaaagctggaggaggtaacagggcaggaaggcagatgtttgctccctgggaggaggcttgatctctggtgtggggaggaagtggggagaggagataagagccaaagagaccctggtagaatctgaaacaactattaacgatgggatgagcaaagtcagccatagggtttaggcacagtgcctctgcccagcaccaaattactcagtatggcactaagtcctgtctttttgagacacttctcattggtcattgctatgcagagcagggaggcctcaaacttgtagcttctgctgctcaaggctggaattagaggcaccaagccaccacacacattttccagtagcctctctggtcagcactgtcaccagccatggctgccttgaccactgcccacttcctaactgttctccacaccaactctttatgctcattgctgctctctggccacactagctttctaccagttcttcccaggcaaattccctagccaggatgtatgttgctgtatgttgccttctctgttacattgtatatttttcatgagccccagcactcggtgtgtaggacttgcctagcacgtgtaagactgatgagagctagtgccctaaagtagttgtagctggcctagccttctggttaaagcaacacccatgggggctgctcagaagaagggatctgagctgaatgtggcggctatttcctgtggggaagaatcctcagcctgaggtggctggccgtggcgcttccaccttccccgccttcctcattgcccagcttctgggactgtggtggaagaggaccttcctgtcatgtaacaaacagctgggtgactttaaaagagagaaagagggaaaaaaatcccccaaataaaaacaagaattgagagtgtttgggtgcccacttctgttcctcagtgatgcttgtgggaatcccctgagaacccaaacgcttaaggaaaaccactgcagtgaagcctttctgagaattaaaagtatatgacgtttctatttcttatttgtccttagcccagaaggctctttcttgtggatatatcacacaaagtaagtgttctgaattctgtgtatctattggatgtctggatcacttgattttttttttttagcccctaaagttgatttcctctcttcaagccagccaatgtagtgctcgggccacagtaaagggaggagagaggccaggacagggaggaggattgctagggccctggggtcagggctgcaactctgctagtccccaaactggtctttgtagaatagtgatgagttttgctctcggttctgctcaggggactctcctcaaatattgtcatggggaccatttttggttgacgtagggaaagagcccagggaactgcatgctgtagtgtgtaccctcagtgctgctgtgaggcactgagggaggacttacgttcagttccagtttcttatcttctgcatggtggccaggaagttcagaagaaataatttgtaacagctttcaccacacgtagccttcatttgggtgtaattcattccctggtgttacacctgccttgtatccttacctgctgaggggtcttggccacacactcaaacccactgagccctcacttcagccgtaaagaggagaatagacgtgaaacttgaatttgagattgccaaggtcatgcgaaaatatacactgggtaaccaaatgaaccagtggcattttcttggtgtatgtgtgtggtatgtgcacgtgtgtgagtgggtgtctatggttatgcctgcctatgcatgtaccagtgtgggccagagggcaaggtttattattctattcttctgtacctcaagtttggagacaaagcttcctactgaatttgggtattaattttggctataccagctggccagccaacccaggactcctggtttccccccctaccccccactaagtgccagggttctacacttgtaccgcttgctttggattttgtcagagtgctggagatctgacctggggtcctcatgcttttgaagcaagcactttattcactgagcaatcttcctagccactaatatttcttttattaaaattgtgtgtgtgtctttgtgtgtgtgtgtgtgtgtgtgtgtgtgcgtgcgtgtgcgtgcgcagattggaggacaacttggttctttccttctactcttatgggtcgaggaattgaacttgggtcatcagacttggtagcaagtacctttgtacccactgagatatcttatccgcctttctctattgcctatgacttttgtgtgtgtgtgtgtgtgtgtgtgtgtgtgtgttttctttcccaattattataagcacgtcttgaattcactaactatctcagacatttccagaggcaattgaggcctagagtgaatttcttagccaggtgtggtggagtgagcctcttgtctctgccataggccacatgggagggcggctgtggtagcctgagctacaagccaggaccccacctccaaacagggtccctaatgttgtatgcctgttcagagtcaccttgtcactgcatccaactttctctcactagagacacctgaaagtagagattattaaccatgattatcaaaagtcagggccaagattgatatataactattttctaacttttctgttgtcaatcttcagatttcctgaagctttcattgattgggcaatgggatttttttctcagattaatctctataatacatgcatgtatacagacacacacagacacacacgcatgcagtcattctcgggaaggtgctttttcttattttaatattacccctcgttacagccgctttatgttcaccaggctcttgcatatctgctgtctcattggtcattacagatcccttcgtggaaggattattattgattacccttttcagagaagaacgtggcagtttagacagtgtgagtgtatgccaaagtcactccactagcaggaggagatcgtgaccacaggctctcaggtctgcagggtctccaccattctgatttccctgccccttatccttcaggggtcccagggatgagcagagtgctcagggctgcccagaagggcgcagctgaggcccctcaagtccactctctgcctttagctcagctgccttttgcgtgtccatgtttcatgagctgcatcttgacgttcactttttctagtgctacccgacccttaaagttcaggaccgcctcgatttctagatgtgtttatattctttttcatttcctagaattccagaggttggtgagaacagatggcagaaggactggtggttcccaagctggtttaaaaatgggtaagggatcaggatgggttcctaagtccctgaaacccacagaggacccatggcctcctccctcccttcttctggctcactggactcactcatggagtctcctcattgctgttgttgtttttgttgttgttagcttctattgttattgtgaggggtggggagtgtgtttgtgtgtatgacgtgtgtatgattgcagctgtgtgtacaccatagtactcatcggaggtcagaaggcagctttcaggaggcaattctgcctttccagtacgggttccagtgtgtgatcaccagactcagatgctcaggctttcaggacaagcagttttacaggatgagccatctcaccagttcagaggaggctaacttacaagtggaattctgaggtgtctccccgcttccctccccctcctcccannnnnnnnnnnnnnnnnnnnctcctcccccccttcctgtctgccttcctccttcctctgccctttcttctccagttaagggtgaagttcaggctgaagtggaaatttcagaatagacacagaacagaaatgtcccttggagtactgttctgaaacatctcaccgacttctgaaataactgagggttacagggtcactggaacctcagcccctgacccacatggtggccagagaggcaaatgctgtaccttttatcagaagtgtgtagggatcaaggggtcagtgccctgagtcctccagtccacccagtggtgtgagtgatgccttctttcccttgagacacgagtcatggaagccacctgtccttaccaactttgtcctacctttgtccacaggacccacagttatcaagaagacaacgtagaaggacggagagaaaagggtagaaatggagatcgcattgaagagcctcagctatgggactggttcaatccaaagtaaggacagacaggagattggggtggggggtgctgagtggggttctgaggagatgctgaggggagtgctgagggggtgctggcaggagggggtgctggcaggagagggtgctggcaggagggggtgctggcaggaggggatgctggcaggagggggtgctggcaggaggggatgctggcaggagggggtgctggcaggaggggatgctggcaggagtgggtagaccttcctcaatgggctttggctaagaaactaagatctgggtgctttgaaccagactgaacactgtggtaattgcagcaggaaatggccagtggtaggttaaacataaacactgggtgttaaggactttacaggccacataggatgctgctgagaaaatgacaaggtctagggtgagccaagaaaactctctctagattcagctaaaacatatccatgaggtagaaattatgagctaggagatcccagagccaggaatccactccgtacacaagcagagaacgcgtgtctatcagaaactaggaaatggtagctggtgttttccaaactgctgctcgctacccactcacgttctcagaaagcagccgaagtatcaagcctaaacagactttaaaaacaagcaaggaatggtagcgttggtgcagcgggcaaagcacttgccgtgctagtgtgcaaactggaggtcagacccctggaagctgtgtgaagccagatgcagtggcctgcgtgtgtgagcccaagcataaaggtggaaatacagacaagagaatccctggaaggtcttaggtcagtcaggctgctttaggaagtgggaacccccaagaaaccctgcctcaaacatggtgggaagtgagaactgtcacctgtggttgtcctctgacctccacatgtgggctgtggaatctgcatgcccacacactacatacacgtcacacacacacctacacatagcattgaagtataagagatgatcaaagtgcataccctaaggatgagtgtttgtaagtagagttttgtttctgtgcatatgtgtattatttgcatataatataaactatttcttcacttgatcacaaccaaacttgtagttctttcaaattaaagctttaaaagatactgtgttaggcactgtgttggggacactatgatacgtttaagaagttcctcatctcagaactggggtttcttagctcagtagcggagtatgtagttagcatgcatgcgaccctgggttgatcccaaggactaatatcgaaagaagacaggaaagaagggaggagacgggatgggcaggaagtggggagtgggtagaggggtggggtgtgtgtacgtcatagtcctagagggcagtagatgttaaggtcatgtgatcagctgacgggaaaggtgtgatcagagctgcccagggcgactgtcagccctgggagacttgtgattgatggttcttctaggaaatggacattaggaactgccacaggcttaggacctgagaggtggcactgtgtcgtgtatgtgttaaggagtttctgggtggaaagcctcagctgctcatgagcttggctgaagatgagctgaagacagaaggtgaggtgtcatcaggctacaggtagcagggagatctgtagtcacagatgaggtcattggggcagaggagtaggaccgggtgtgttctgtctcagccctggaggagcaggcagagaaagagacctctcaaggggtgaggcacagctgtagaggaaggagagaacagtgcctcgttctttttgacggagctcaggctctggagaaactggagatgttctggcaagtccactgagttctcaggagattcatgccagtgtgcaagactgagaattccatcctgcccgtatcttaccataggctgggcatggagtagctgcctgggacactatgagtgtaaaatgttgggagcactgcagctttgctaagcctcttagatggggatgaggtccggggcctagacagctagagatggcagctatggggatgatgtctaagagctaaacagctagagatggtgcctatggaggtaagacacccccgcccccccacaaacccagggctagacagctagagatggctgctgtagatatctcagctccgccccaacctcttctttctcatttcccatcttcttaaatacctcagtcctagcctgggagaagttttccgttgtccaccaacagtaaaattctattatcaattctccctctcagattctttccacagcctctctcccttccatagccacctccgctgtttgtgctgacattacctctctattgggattgtacagcttgtgtgatgtgtgttccacatctttcctcagtctactgtgtgcttcataagaattttaaacatcgattcatttatttgtgtgtggcaaggcccgcatgtataagtcagaggacaacctgtgggagttggttctctccttccactgtgtgtgttcctgggatcaaactctggctgtcagctcccacgaaagtgcctttgcctgccgagccacctgtccagcctaatacacagaattgtaatacttcctctagctaacccgtggataccactaatgtacctgtgcatgaagacatacagttgggcatgaactcctagtaacctagagacccggatgctctattgcaggaggtggtcattttcctgaagtttttgccccctatggtggacctggccatacagaggtcacacagtttgagtgcccagtgcagaaggaagggcatttgagtgtcacatagcaccgtttcctcccgctctttagaaccttatcatggcggtcttggctcaggcagttgatagtatcacagtggcttctttgaggggatgtgcttgtgggttttgatgactgagcttgcttcaggcacagtttccccctagaaactggagtcccctcatcctgcctcccacctgctcccacctgcacttccaggctgttgtctggcttctccgtcacgcgccactgacatgctgaaattgccagtggaactgaacaattaatgaccgggaaatagaatgtttcaatttttaattttgctttaatttttaatagcgctgttttgtcttcctgctcaaaggaggttctcactttcaaatagccaaggtggacactgggtttccactcagtttcaagccagtagggcccgagaggccacagagctgaggagtggcatggcagggttgagcacccactatactgaaggttctcaggggaagaactgggtgccattttgtaactttaactttttcaaatcctatttttaatgatagttcttaaacgctttaaccttccttgtaacccaccacccaccagaggtaatggaaaagaaaggatatgggggaagtagacctatattacaaaggttctttggaacaactcctgtctgtgttgtttggaaatcagcagttcagttcacaggttagcaggcagcgagtgccagctccatccactcgcaaacacctcacatatacaccagcagtccagtttggtggtcgggttagcaacagtggttacatgacctagcagagagagccaggctcagcctcagctcgggtcagcaggagggactaataagaacaccaagagaaagtctctgctctgcctctctcagggaagtgaagatcaggaaagataagagtcacaagtgttgcacaggtaactgtaccagcaagccaagttctgtctccgtcactccatggagtcctatttataccctccaaacatcacgtgtcctccatatactttgcctcagcacttgcatctaatcagctaagtccttgaaagcagcagcaaactacagcacaccaccagaatttcttttggtgcatttctctctatggcatcccgacaaatgcacctcaactatgcagtgtatagcggaccaatacaaagaatttttcatcatgagtcctttcacattcttactttagtagaacatcctctctcctctgtctgcttcagtgaaacgttccttcaaaagtctgccttagtctttcacctgtgtgcaccttgacgaagtgttcctttacatgtttgccccagcaaaacaccatctaactgactttccaaagaacccttaggtttccactccaccatttctcagtgcttaaacttcagtttggctctttgtgaaaattaagaggccagtggctcagcccccttccccttccggagcctctcttgccttgacagtgagtgctggcaatggctggtgtggggctaagtgcaggagggaaaggcctgttcttagctcctggtatacacgacacattaaatacaggcctagtcttttcattaaccacagtataacatcatctgctcatatagaacaatgagcaacactgtagttcacgcacagcaacaacaagacagactgaggaggttggctgggttagagctactgagacttccttccttccttgacagcaaagtcaacagcccagcagatgaggctctgacataggagggagataacattcacaaacgctgcttttgagaaagagaatctgcatatgattatttattttctcctttttgttttgaaataccatcactcaataaagccagcctgggaagggagtaaatgttctaccagggtaaagctctgcaggtgaacacccctcagagctgcctcctgtgagctcctaataccagtgccacactggcctatcacagttcagtgctgacgaaatgctgcagtagctactgagtggacaaaggcaaatctggggtttagccagactttatcagctgagcacgtgtccatctaaggagcaatgaaaactggggctcaaagcactagactccacagaaagactctgggttcaagtcacagctttcctccttagtagctgtgtgactttaggcagataagggccagactgtccatactgcagacaacagcactgggaaccagtgaggtttagctttaaataacaggaaaatgccacaaggccaagcaagcttgcacaacttgtatttcacccatccaggacctactatctttgtacttcactctattccaagagttggaggtaccctatgcatttgtgcctggcccttgccaagactccaccccttctgtaattcctgtctttcatgcaggcaagattcagtgacagtcactggcctcccttccttggccagtctctcaccacacctcagtgtaatgcttctgactcggtgttgcatgcttcttctcaccaggaaccgcccggatgttttgacagtgaccccgtggaaggcgccgattgtgtgggaaggcacttatgacacagctctgctggaaaagtactacgccacacagaaactcactgtggggctgacagtgtttgctgtgggaaagtaagcaccactgacaaactcacccttgatgatttgttcttgttctagcatcaaaggatttgtgtggggctccagggccccacaaaggctggaatttgacagtagacttcccccttctttcttataatggctgagaaaaaacaatgatagtaggtgatgaggtatttctctgccagtgaatgagccaatccaagccagagtagattgtattaaatacaggtttattgggaagctgctctcaggtgaggtcactgaccccaaggactgaggccagagatgtcaccgtggggagtatggtggggaagggcagagaggtgggaggggagggagggagaggcaaagaaagagagagagaaagggcagaaggaagggagggaggactgggggaaagagagcgcaaatgtgtgcatgttaagattctgtctggactccacgcccacagttacctggcaacggccaggtatgctcctactcatagttacctgggaacagccaggtaggcctggcccacaataaaacgggctgcttgccccttctctctctctcttactcttgcctcttgctccccctctctccccattcccttccctcctctatcaccatggtcatggccggcctctacttctttactctctccttctctctgcctttctctgcctctagtactctttaactcccctcctcaggccctgaataaatgctattttatactataccgccatgtggctggtccctcagggggaaaggacaccttggcatgggtccattaaggcacccccctccccccatacctcaccacaccccatagaacatattcttatatttctttatctttttataatcacaagcaaagtgtctggattacaaaggcaagaacctctggggggaaggctggaaagttcaggcatgggggtaaggtatgtcaggtagggactgagggatgctgggaaaacctggaggccaggtctgctttgctatgtaaaataggcaccttggtcccttgttcctgggttccaaaccaaacaggaggtaagtccaccaattcccaccacacaagggagggagactctcttcaatgccactggtacccagaaccaagaccattcctgccttcagaacctttctagaaaggccccaaaagccagctgttgactggctgggatgtaagtgctcctcctttcttataaagcccagggccacggacagggtgtggatgtttgggtgtgtcagaagacaatttaggggtgttggctctctccttccactatatgggttctggggatccacctcaatgctcaggtctggcacccatacctactgaaaagtctttctggcttgtttctttttctgtccccaggcccttggtgttggtacttcttctgatttaaacacacacacacacacacacacacacacacacacacacacacacacatcaacaggaagttggctcgcctgccatagacaagaggagtagaaggagcaggttgaccttccattgagctttcacaggacaggacctaacagaagatgctggggtgatatccccggatcccctcccaggggccagcagtcctccttggctttgggaagtcctgacattgctcagtgtgctcattccctgagcctaatgccatcaagtgaaaagcagtgtctattgacatttcactagaggcatttgtattgtttagggattggagtcagggctcaactcagcaaagcctctgggcactgaagccacaagacagccacattgcacattgatttgatcctagtgtttccctaaaagaacagaaagttacccactgtcccacaatgctatcaatcatccaatcacaactctgcagaaaaacagaagccagaacaccacaagagccctgtgatccctcccacctcctgggggaaagctgtgctcccagatagacaagtctgccacagtgaatgccagagaaagtgcatctggaccttagggattggtagttgcctgtcttcaggctccatgcctggagccacctgtagcactttagcctcttaagctgactgttagacactgcggtgacactgccctccctgccctgctcctacggattctttcccaagcttcagggcacactgggtttccttagaggtccaagtacagaggtgtgtcctgacctctatccttgtggtcctgtcagaggctctcctggaccattcagacctatttgcccatctaaagagtcacacctacaagcctttgagctccctgatgccaaaaataaaaagtgcaatttgtttcaactccactggaaaaacccaagcattgagaaaaacaaaacagcaacaaaagaaacaaaaccaaagccaccttcattacattcagaacattgtgattggctacttgtgtgctcagcaaactgactgtggtccatgtctgtgtagggtttgcacaaggaccctctgacgtcaccctcatcctgcagtctccttggtatttctttttttttttttaaagatttattatttattatatgtaagtacactgtagctgtcttcagacactccagaagagggcgtcagatctcgttacggatggttgtgagccaccatgtggttgctgggatttgaactctggaccttcagaagagcagtcgggtgctcttacctgctgagccatctcaccagcccctccttggtatttcttgggaagacagtctatagcttgagcttgtaaaatgatcaatatggtgtcattagattgagcaaatattcaaattgacaagagatatttataaaaatgagaaaaataatactgatactataaaatgttggaaaatatgtgaagtaataggaaccatttttattgctagttgggaatacaaaatggtgcagccactgcagaagaaattgtggaagttgcttacacaacaaaacatgctctgatcataatataatcttctggtcagattccttggtgttcccccacatgagttgagacgtgtcttcacaacaacctatgtagatatttttagaaatgttctttgtaactgctaaaacttgggagcaaacaagtcaaatggaaagatgaacggatcaattcagacaataggataatatttcctgctgaaaagtgagctgtcgagccacagagaagaaggaggaggaagtttttgtcaattgttacttagtgcagaacacaagctggaaaggttccagtgctgaccagttttgtgtcagcttgacacaggctagagtcatctgaaaggaaggagcctccatggagaaactgcctccatcaaatgcagcctcaggcaagcctgtaggacacattcttagtgactgatgggggagggaccatcccactgtctgtggtcccattccagggctggtgggcctgggttctattagaaagcaggctgagtaagccatgatgagcaagccagtaagcagagcccatctatggcctctgcatcagctcctgcctccagccctgcttgagttcctgtcctgactttcttctaggatgaaaagtgatgtggaagtggaaaccaagtacctctttccttcccaacttgcttctggtcttgtgttctgtcagagcaatctgtccccaaataggacagatctctactgtccactttctgattctgattctggaagagccaagctatggtgtcagggaaaagaatggtgcctgaaagcagctggggtgagagaaaggcagaaaaagaggagcctgggagagtgagttctaatgcagtcagactcttgtgatatagcactggtgggttttgctgatgccatgcttttgcacacttcccaacatgaaccatagtataacatagaataaccttatgttaatgtgagtgccaactgtcacacacatgccaccaggagcactggtggccctagtagggaagtctattcacataccaggtaggtacatgggtacattcaacactttcagctcagttttgttcagaattcaaaattattctaaagcatgctaattttttttttacattatatctgttttttattttatgtgcaatggtgtcctgcctgcctgaggacgttggttctctggaactggagctacagacagttgtgagctgtcatgtgggtgcatgaaataggattctgggaattgaacccaggtcctctggaagagcaactattactcttaatgctgagccatctctccaaccccaaagaatgctatttttaaaaagataaaattgttaaaatataagcaaactatagtgtggtctgtagctcaggtggttggctgcatagtgggtatgacactctaggtttgatcccaggcaccttaaaaatagcagatgtcctgctggtaatcctagcaagactatgagaagttcaaggtcatccgagaccgcatagtaagtttgaggatagcctggtatacatgacccactgtctccccccccccccaataaataaataaataaataaataaataaataaataaataaataaataagatgcaatctgagattgttctagtatatgaatggaatcataacatggtttttgtctagatggtccactggtgtttggggtagcccgtgagaggtttgtagaatggacatgagtaaggaattagatgtccatcctatgaacatgcatcctctgtgtcacagaggaggctgacagtgctagtgtttggggttaacctaaccgagaaggtaaggttgagttttgaatgctcagaggattctgggaagaattttctttgtgtttggcttagcagatacactggcctcttctggatattcaagagctagctccttctctgacagccagcttctcaatcagagaacagagccttagcatgaaccttactgcaacgcagagtagttgagaacaccgagctctcagtgtggcaggcatcgaagagcatgcggtcggggctgtgcatccccagtttgcttaacaaagctggcagtgagataagtcatgccactttccccaaggacacaatgaccagctagtgtcgagtggtatgtggagaagccatcccctcctaacatacaatacagatcatctactgtaatgttaagtatggtattacatgtatatatgtacccatatataagtgtgatagcccgtggtggttcaatgtagccctctctatttcaggtacattgagcattacttagaagactttctggagtctgctgacatgtacttcatggttggccatcgggtcatattttacgtcatgatagacgacacctcccggatgcctgtcgtgcacctgaaccctctacattccttacaagtctttgagatcaggtctgagaagaggtggcaggatatcagcatgatgcgcatgaagaccattggggagcacatcctggcccacatccagcacgaggtcgacttcctcttctgcatggacgtggatcaagtctttcaagacaacttcggggtggaaactctgggccagctggtagcacagctccaggcctggtggtacaaggccagtcccgagaagttcacctatgagaggcgggaactgtcggccgcgtacattccattcggagagggggatttttactaccacgcggccatttttggaggaacgcctactcacattctcaacctcaccagggagtgctttaaggggatcctccaggacaagaaacatgacatagaagcccagtggcatgatgagagccacctcaacaaatacttccttttcaacaaacccactaaaatcctatctccagagtattgctgggactatcagataggcctgccttcagatattaaaagtgtcaaggtagcttggcagacaaaagagtataatttggttagaaataatgtctgacttcaaattgtgatggaaacttgacactattactctggctaattcctcaaacaagtagcaacacttgatttcaacttttaaaagaaacaatcaaaaccaaaacccactaccatggcaaacagatgatttctcctgacaccttgagcctgtaatatgtgagaaagagtctatggcaagtaatcaggtataaattctcaatgatttcttatatattctgggtcttgggaaaacttgattctagaaatcaaaattaatttgacaaaggaaaagcagatgccggaaacttcttcccagtctgtcatacaattcaccactggccaggtgctgagagaagcattagggaacagtgtgggttgtgtcagagttggacggctccatccctttggcttcattatcttcctcctcatggagattctaaagcaacccagagaggctttgcagccagagacctttaataaggatgccaatgtgaccatcagtctgtaaaagctgatggctccaggagccgctggcagtccaggccccactaggctattgtttctgtcctgggcataaaggaggcagagagtgccaataggtactttggtggcacatgttcagagtccaggaaaaatggcagggtgaccacttagagggacataggacttggggttggtgattgaactgagttacaaacacagacagctttcttcaggatgactaacagcaggaattgaatggaaagtgtgttcattttgttttgcccaaattgtattcatgctgttagctttgtgtgttgagccctgtggagagggtgtgactgtatcagggaaggagagtacctcagcggactgaggaccagcaccctattatatcagaagacaatctctcatcatcgggtcctacctacaacctgctctgaacctccgagttcctcagcccatcgtgttccagtgtgggggcctgtatggagcaggtgactgaagacaaagccccctgtcacatgacctcatttcccctgctctagtactatgcaagtgtgacagccagccagccagatgtactggacaacataggaactgactttatggcaatgggagccgcagtcactacaacggagctgctgaaggttctgttccccgctctgagagcctgcaggagcccctgtataggtggttctcaacctgtgggtcgcgacccctttgggggaagtgttaaatgaccttttcacaggtgtcccctaagacggttaaaaaacatagatatttccactctgactggtaacagtagcagaattacagttatgaaatagcaagggaaataattctggggttcgtgtcatccataccatgaggagctacattaggtcacatcattagggaagttgagaagcatagctctacttgggtatttaagcaaattattgcaaagggggttgtcgctctgtgtttctgtgtatgcatatatttatattttgcttgtcttccagtttaggtcatctgtttcttcctttaagcagtttatttaaaaggccattgcaccatcttggtgaacagcatgaggggtttcaataaaaaataggatcttacctttgtccacagggctctacctcttacttttcaattgtgaacaaaaaaggtcgcacacccagaggcaacaaaacccacagaattcctgaaccaatgggagatgccaatggaagcagagcttgcacatctgctaaaaattctgcctctctgtcactgtgctggatccgtctaaagtgggacagttcaatggtctgaaagtttcaaaaaggctggggaatttgaggggatttttttttaaaataaaattgatccaagtttaaatctctaatgagtaagcttaggattttattaaaggtaatttttagacattcttcaaaataagaattcttgtttataattgaataaattattttctcagtatattctggtctggtatggattatgcgttgtatcctgaagatgttcagaagtgtcagttgtgattgtccataatcataaaggattttacgataccttgaatgagcttcacaaagacaagattacaaagaacaggctttattctcaaattataaagtgtgctctctctcaatctctctctctctctctctctctctctctctctctctctctctctctctctctctgtgtgtgtgtgtgtgtgtgtgtgtgtacacatgtgtacatgtgtgagatcgcctggcagagccttcatgaaaagacagtctatgagagcactgtccagctgccctgtgttcacctaggacatgtggctctcttctcgccagcagtctggtttctggacaatctgatttctatgaaaatgagtgctgtatttgcagaggattatcttgtctggagtcattggtactgtccatctcgtaagagggaatgactgtctgagggatgacctgggcctaggtacttctgtcttaggatttgattgctgtgaagagacaccatggccaaggcacatcttataaaagaaaacatttaactggggctggcttacagtttcataggttcggtccattatcatcattgagttgcatgcaggcagacatgatgccagagaaggagctgagagttctacatcttggtctgaaggcagccaggacagactcccttctgcaggcagaccggagtagggtctggatcacaaaatactttagtatgaaacacctcttccacagtgacacacttcctccattaagaccacacccctaatagaggcacttcccttgtgcaaagcatattcaaactacacagtcccccaaacgtgaatttcaggtgctttactaaaacttaggttcttgtagttttgggaacggctagctgagggtgggcaacttcacgataaaacagtagggacagagggagggcaaggtcactgaggggaacaaatcctggggacaatcttgcctggctccagccttacctaaggtctttgctgcttctgggctttacaagcttatgaaaccagcaagtggagtgaggcttccttttgtaaggcagtcattctattggactgctctaggattgtgagttcctcaagatgctgtgtgcctttgcaccaaccgactcctctctgtcattcatctcacaggctctgtctcacagggatctactgaaagagtgggggaatgcagcaacatctattccatcatgcctcagaggacgtgtgtgtgtgtgtgtgtgtgtgtgtgtgtgtgtgtgtacatgaatgcacatgcagatgtgtgttttgcacgtttgtctttgtgcattgtggagtccaggagttgacatcagatgtctaactcaattgttctctaccctatcttttgagccagggtctcactacccctgaacggagctcactgactgtctagagtggttggcactgaacttgagtggagtttgctgattggatagactggctagcactgaacctgaatggagcttgccgattggctaggctaacaggcactgaacttgagtggagtttgctgattggatagactggctggactccaagctgcaggtcatggtctgcagtcttcacaacagcagccctggagttccagtggcatgccctcacacctagacagtttatgggcgttctctgggatcagattagtgttcacgtggcagacacattatcagctgagccatctttccagcctaggcatgctccccactccctcccagtgtaacagacatcgggcttgtctacaagggagttgctaggttgggtggacagaggtaacaaggctcattctaactggatggcaccagtcaatgtggggtcccagactgaatacaaaggagaaggcaggcagagcatcagcatctctctgcttctcgactggagatgggaccagctctctcacatccctgctactagcatttccatctgtggtccagcagacagaaccttttccctgtggttcacaagctgcgacctcggggtttcagcttgggttcaggttgaggctctatgccagtgccatggccaacagggttccgtgctgctcgcagggcagtaagtcctggcctccttgtctccccacagcagcacatcagcggctctcagctcacatctcccttccagccctcgcagccacttggcaatgacagtggctgcatttgcatttttttttttttttttttttttgcttgtcctaactggatcgtgagtgtgggtgctactggcatgtagtgggtggatacaagggcactgctaagtgattcacacttgcacagggtggcaaacttcaccccatctcaagaaatgtcattcgtggcaatcttggagcggctggaattacactctttcagagttcactaacagatttatctgtttgcctgtgtgggaaactctaaagctccacttcctccctagaaaccagagctaagacaaagcagttccctctcgtggacaccagggggcaggagttccaaagagaaccagtttctggagtgatgaaaacattctttttggtgctattaaaggcagcgtcatttgtataaatgctattgatccttcatataaatggaactagctctatagcttagtggtgctgtaggtgtactgtgcagtttatcaaataaacaggtagaaatcaaccctacatataccacagttaataaagaaggcataagggaagtaggagggaatcttaacgctgacttagaggagagacacattgcttatgtgcgccaagggtgctactgtttgtaggtgtggtatggttgagatgtggttctccccgtggagttcacactgaggtttggttccagtggatagtgctgtgttaggcattgactagggattaatgcttttctatgagtgagctgtcgctctggagatgggcttctgtgacatggttgttagcaagcctggcagctcccctccaccactcaaacccatgctccgctccacacagtgcctctggctgactgccacatggttttcaacagaaactgaatggattctgggatatctggagctggaggaacatttttttttctttttgtaaagcacccagcttcggtattttggtggtagcaacacaacacacaccaagaagtgatctggaattcagtggcccttgcttcaactgctctatcaaggggagctatagccttcaacaacctgtcccacccctctctgggctactcaactttataggtgacactggtcatcagcatccattgggtaagaaagcatcccagtagcggcgaccacttgacgacctcctccagggtttcttgggcagcttactgctttgtatatttatcaggtggacaggagacagtcggacactccctgtggtggaacaccgtctccagaatccacaggcagcccaacggagtttttgtctttcttagtggcaagggacacaacatttattcacaatttacaattggctgcatcttggaatttcctggattgagaatattcacatctggatcccatccaaagattgctgctgttcagttgtcttggtgtaggcttgacatcgggggttttaaaactttcctgtgggactgttagtcttgggaccttggaaatgactgccattagaacaatttgctttttgtgcatggcttttattttgatgttgtcttttttggtttgggttttgggttttttgttgttgttgttgttgttgtttctgtttctgttttgttttgttttggttttggtttggcatttgttaaagttcttaaatttctctattaatcattttcttctaaattgaatttggaaattttgggttaaatttgatttctgctccattttctgctttattaaatttgttatatcttatttgtgtggaggtcccctttagaggtcataggacaacttgagggaatcagttctgttgttttactatgtaggtctcagtgactgaactcaggtcctcagacttagcagcaagcaccctcactcactgagccatcttgctggcccattccactttatctatgaaaccagatatatacacatgataaacattttttaaaaagatttattcatttatgtatataagtgatgcatttgcatgtgtgtgtacatgacagagagaacatcagatcttattacaaatgtttgtgagacatcttgttgctgctggaattgaattcaggacctctggaagaacagctagtgtttcttaactgccgagccatctctccaatcccagctagacttctttttttttttaattcaactaattttttatgatattcaacacaatatatatttctataccaatcataagaatgatggacatgttattaaatgaacataaagtagataagtagatttttgtttgtttgtttgtttgtttgttttatttttagtagagctttaaaatcttggcttactgtggtacaaaccctaaataagaacaagttttaaacattggagttcattgtaataaggctgtacttcaatgtccctcacatcatcaaaggattttacctccatagtagctaagctaagagttgacagttctgctgcgccaaggaatgaattgtaggcacgattatttggatacagatttcctgctatgttcaaagctatttgatttgagtgattgtcatcattctcagcccacagggaacaggtcacattcatttaagaaatggtgtgtgtattaagatggtctatccacgaagccattcatcaactgtttcagtgagccatggttctgcttggagggtggcacagacatgaggtgagggtaaaatactgattcattggctgtgatgattttgaaaagtattcatctcagaaaaaagagtaacttataaggtcctcttcttcaaaattgatacaataattgtaaatatcaaggaaaacattcaatctcaccctttgttgttctcctacaagccacctcccaaattaattgcctctgtttcttttggctgtataaattattttcaaatatgtatgctgttctgaaaacaatagcatagtgtaaaaatatcaagtaaacaatcctcctaatagagaggctgagataggggaagctcgatttcaagaccattattcagtacacagcaagacactgtcacttacaaacaagcagaaaatgtatatgaattgtacaatattggacctatttctccaattaccaaattagagagaccactgcataacagcccacaaatttctaattcctcatatttttgaattttaatcaattaggatatgctggtaatattaattttcatattgagatattaaggaaaagtgatcgttacttccggttatttttgttgttagaggtgaaattatgtttgtgtgggtttgttgaaagattattcttgctttttgtagggtgtagtttcccttcttgtattgatgttttccatctattatcctttgtagggctggatttttggaaagatactgtgtaaatttggttttgttatggaatatcttggtttctccatctatggtaattgagagttttgctggatattgtagcctgggctggcatttgtgttctcttagggtctgtatgacatctgcccaggatcttctagctttcatagtctctgttgagaagtctggtgtaattctaataggtctgcctttatatgttacttgacttttttcccttactgcttttaatattctttctttttttttttaagtgcatttggtgttttcattattatatgataggaagaatttcttttctggtccagtctatttggagttctgtaggcttcttgtatgttcatgggcatctctttctttaggttagggaagttttcttctataattttgttgaggatatttactggccctttgagttggaaatctttgcccttttttatatctattatccttaagtttcatcttctcattgtgtcctggacttcttgggtgttttggggttaggagatttttgctttttacattttcgttgactgttgtgtcaatgttttctatggtatcttctgcatctgagattctcctatctcttatattctgttggtgattcttgcatctatgactcctgatctctttcctaggttttctaactccagggttgtctccctttgtcatttctttattgtttcaagttccatttttagatcctggatggttttgttcatttccttcacctgtttgattatgttttcctgtaactctttaaggaacttttgtgttttctctttaagggcttctagctgtttacctgtgttctcctgtagttctttaaggcagttatttatgtccttcttaaagtcctctatcattaccatgagaagtgattttagatccaaatgtaaaaagcaaaaatctcctaaccccaaaacacccaagaagtccaggacacaatgagaagatgaaacttaagtgctttctttgataagaattgccttgatcatagtgtctcttcaggcaatagaacagtgactaaggcagggtttgcgagaagagaaccaatggattacatacacacaatcctatcagttctgttccattagagtaccagaatatagcttccaatagtggaatagtgacacttttaccttaggggtaatttacagttgtctaattggacttaagacctgttcaataggagggagttctgctggctactcatgctgactccagaggcagggaaaggctttctctttgtaaactttgataactttgtaaaccctcaaggcaggaaagtggccaggcactggcctgaggagttccagcagctagacctctctgtcataacatatctagcctctgtgactgtcacaaaggtggttttcagcccctccagaggaccctccccagatttgttaattttagatgaaaagtctaaaccaaagagccaccaatccctgaacaggaaaacccatcaattcctgagctttccgattggtcccgatgagttcacttggtgggacttgaaatcccactggggatttccttccttagggttttactgttgtgaacagacaccagacaccatgaccaagacaagtcttataaaggacaacattcaattggggcagcttacaggttcagaggttcagttgattatcatcaaggcaggaatatggcagcatccaggcagacatggtgcaggaggagctgagagttctacattttcatctgaagttctgctagcagaatactggcttccaggcagctaggatgaggtattatagcccacacccacaagttcacacctactccaacaatgccacacctcccagcatgccactctctgggccaagcatatacaaaccatcacacccaccagtccataccctggaaatctctgcccttgaaatctccactccctaagaaatcctatatttgctcagttcatgctgtcatctcccaggtacagagtcagtaacctggattcatcattctccccctggacttgtccctctaacaaatctcttttatgagatttgctgcctggtgtgacactaacagagtcagtggaatttatgtacatatgtaaatatgtttatttattggtagaggaggttactataaacttgagagggagtgtggagggagacatagaaggagtaaatgggtggaaataatgtaaacaaaggagtcattgataaaattcttaaacaaatacatttaaataaaaacagttcaaaatggagtcttctggagagctgtccctgactctgctgcctgcagatcctgttcccttgcctctgctgccttgtctgccttaggtggagaggatgtgcctgtcctgcagggacttgatgtgtcaggatgggttctcaggggagaaggggaggaggagtgggggaggggctgtgtgaggaggggtttgggaggaggggggctgtaaatggcggcataaagtgaataagtaagtaaatgaatggaagacactaatcttctggttatgaaaaataaactccagcatgtgacttgttaagatcacagccacctggttcatcctcaagggacacagatgacatcatcatccacaaaagactggaatgatgaatcacaaaagtgtggattgacaacaaatctcacattgaactcattttcaaacatttatgctgccttctccaactgctcccccaggcgtggtgagggtctgtgatgacgcctgtgcggagttactttgtggtctgtgaaaacagtaggtgagaggttgttcttaatttcaaccaaactgactgatacccacctctcttcttgatgcacagacaatttcatttttgtggattaacataattttttttcctttttaaaaagactttgcactgggcataatgacacatgcctttaatcttagagctccatgaggcagagacaggaggatctctgtgagttcaaggctatcctggtgtacagagtgagctgctgccatccagtgcaacatagtgaagtgtgtgtgtgtgtgtgtgtgtgtgtgtgtgtgtgtgtgtgtgtgtgtacatatatatgtggaactactgggggttgaaatcaggaccaggggtctttgtttttgagctcagatctcactgtgggttccagtcagacctcgggcttgcactgataccctaacctctgcctctgtgaacccgggggtaaaagggaaaccttgcctgcttggctgggttttgtaaactgcatggctgaaaatccaaggttcttgtatggataacttacacgatagcgttgggcctccaggcagcacactgcactaatttcatagtcagttactctggagaaggagcataagcctcctgctgcccttctggctgtgatcatcacaataccacagcactggtaaattaaccatttcctttattactgtacaagtctttggagtcaaagttggaaagtctcagtacttggtttcaatgaggactgtgaggtaagagattaggaaacacaactcagtgaggactctgaagagagttcagacccactcagcaatgtaggggtgctcttctgtaggtttcaggggtcctacagcatgtagttgatgatgtgtagctcataatatgtaggtgtggtcagggtgatttctgggtataatgaagagtgaaaatttggtaatttggacctgtcattctgtatacagcaccgtagcccctgaaagctaatgacactcggtgaacttctctttataaagattctaaacaaacagtgatgggatttctgttatctcattcacagaagctgagagagtagaaagagaaagaagctgctgaaggtggacttggcccgagtagctcttagcccaaacctcagatagatatgagctctttgactcatatctcacaatgtgacttaagctgagaagtagaattttaatatccaaggagccacagtgccttacctgctagtcggagtcactaggatgaagtcacagagaagctcggccaagcttactctgtatgcacaagactttcccacagcatactctgtatacaaggcttcccacaggtcactctctgtacaccgggtttctcacagctcactctgaatgcacggggtttcctactgcttactctggagatattcaacttttatctttttcttttccctctaggaaaagaatgagatacaaaatattaatcctatcgctattggttctaatgtctctctatgcccagtatagagaataccctttcaggtaattgtgaaaacttaatgttatattcttgataagaatctggtgagttaacaggatttgtcccttaaggaaatcggccaaatgtgcagatccaaatatatgtgaattatactcgtgcctgtctctgtaaatagagccccctgtcccaatgctttgtttctaatgatatcagagatttaaaaaattctatagatgaccaggtgtagtggcacatgcctttaatcccagcacttgcaaggtagaggcaggcagatctc

SEQ ID NO: 702 - DNA, 3455 bp, Mus musculus
tgtcttaggaggctggagattctgggtggagccctagccctgccttttcttagctggctgacaccttcccttgtagactcttcttggaatgagaagtaccgattctgctgaagacctcgcgctctcaggctctgggagttggaaccctgtaccttcctttcctctgctgagccctgcctccttaggcaggccagagctcgacagaactcggttgctttgctgtttgctttggagggaacacagctgacgatgaggctgactttgaactcaagagatctgcttaccccagtctcctggaattaaaggcctgtactacatttgcctggacctaagattttcatgatcactatgcttcaagatctccatgtcaacaagatctccatgtcaagatccaagtcagaaacaagtcttccatcctcaagatctggatcacaggagaaaataatgaatgtcaagggaaaagtaatcctgttgatgctgattgtctcaaccgtggttgtcgtgttttgggaatatgtcaacagcccagaaggctctttcttgtggatatatcacacaaaaattccagaggttggtgagaacagatggcagaaggactggtggttcccaagctggtttaaaaatgggacccacagttatcaagaagacaacgtagaaggacggagagaaaagggtagaaatggagatcgcattgaagagcctcagctatgggactggttcaatccaaagaaccgcccggatgttttgacagtgaccccgtggaaggcgccgattgtgtgggaaggcacttatgacacagctctgctggaaaagtactacgccacacagaaactcactgtggggctgacagtgtttgctgtgggaaagtacattgagcattacttagaagactttctggagtctgctgacatgtacttcatggttggccatcgggtcatattttacgtcatgatagacgacacctcccggatgcctgtcgtgcacctgaaccctctacattccttacaagtctttgagatcaggtctgagaagaggtggcaggatatcagcatgatgcgcatgaagaccattggggagcacatcctggcccacatccagcacgaggtcgacttcctcttctgcatggacgtggatcaagtctttcaagacaacttcggggtggaaactctgggccagctggtagcacagctccaggcctggtggtacaaggccagtcccgagaagttcacctatgagaggcgggaactgtcggccgcgtacattccattcggagagggggatttttactaccacgcggccatttttggaggaacgcctactcacattctcaacctcaccagggagtgctttaaggggatcctccaggacaagaaacatgacatagaagcccagtggcatgatgagagccacctcaacaaatacttccttttcaacaaacccactaaaatcctatctccagagtattgctgggactatcagataggcctgccttcagatattaaaagtgtcaaggtagcttggcagacaaaagagtataatttggttagaaataatgtctgacttcaaattgtgatggaaacttgacactattactctggctaattcctcaaacaagtagcaacacttgatttcaacttttaaaagaaacaatcaaaaccaaaacccactaccatggcaaacagatgatttctcctgacaccttgagcctgtaatatgtgagaaagagtctatggcaagtaatcaggtataaattctcaatgatttcttatatattctgggtcttgggaaaacttgattctagaaatcaaaattaatttgacaaaggaaaagcagatgccggaaacttcttcccagtctgtcatacaattcaccactggccaggtgctgagagaagcattagggaacagtgtgggttgtgtcagagttggacggctccatccctttggcttcattatcttcctcctcatggagattctaaagcaacccagagaggctttgcagccagagacctttaataaggatgccaatgtgaccatcagtctgtaaaagctgatggctccaggagccgctggcagtccaggccccactaggctattgtttctgtcctgggcataaaggaggcagagagtgccaataggtactttggtggcacatgttcagagtccaggaaaaatggcagggtgaccacttagagggacataggacttggggttggtgattgaactgagttacaaacacagacagctttcttcaggatgactaacagcaggaattgaatggaaagtgtgttcattttgttttgcccaaattgtattcatgctgttagctttgtgtgttgagccctgtggagagggtgtgactgtatcagggaaggagagtacctcagcggactgaggaccagcaccctattatatcagaagacaatctctcatcatcgggtcctacctacaacctgctctgaacctccgagttcctcagcccatcgtgttccagtgtgggggcctgtatggagcaggtgactgaagacaaagccccctgtcacatgacctcatttcccctgctctagtactatgcaagtgtgacagccagccagccagatgtactggacaacataggaactgactttatggcaatgggagccgcagtcactacaacggagctgctgaaggttctgttccccgctctgagagcctgcaggagcccctgtataggtggttctcaacctgtgggtcgcgacccctttgggggaagtgttaaatgaccttttcacaggtgtcccctaagacggttaaaaaacatagatatttccactctgactggtaacagtagcagaattacagttatgaaatagcaagggaaataattctggggttcgtgtcatccataccatgaggagctacattaggtcacatcattagggaagttgagaagcatagctctacttgggtatttaagcaaattattgcaaagggggttgtcgctctgtgtttctgtgtatgcatatatttatattttgcttgtcttccagtttaggtcatctgtttcttcctttaagcagtttatttaaaaggccattgcaccatcttggtgaacagcatgaggggtttcaataaaaaataggatcttacctttgtccacagggctctacctcttacttttcaattgtgaacaaaaaaggtcgcacacccagaggcaacaaaacccacagaattcctgaaccaatgggagatgccaatggaagcagagcttgcacatctgctaaaaattctgcctctctgtcactgtgctggatccgtctaaagtgggacagttcaatggtctgaaagtttcaaaaaggctggggaatttgaggggatttttttttaaaataaaattgatccaagtttaaatctctaatgagtaagcttaggattttattaaaggtaatttttagacattcttcaaaataagaattc

SEQ ID NO: 703 - protein, 416 aa, Mus musculus
RPVLHLPGPKIFMITMLQDLHVNKISMSRSKSETSLPSSRSGSQEKIMNVKGKVILLMLIVSTVVVVFWEYVNSPEGSFLWIYHTKIPEVGENRWQKDWWFPSWFKNGTHSYQEDNVEGRREKGRNGDRIEEPQLWDWFNPKNRPDVLTVTPWKAPIVWEGTYDTALLEKYYATQKLTVGLTVFAVGKYIEHYLEDFLESADMYFMVGHRVIFYVMIDDTSRMPVVHLNPLHSLQVFEIRSEKRWQDISMMRMKTIGEHILAHIQHEVDFLFCMDVDQVFQDNFGVETLGQLVAQLQAWWYKDEKFTYERRELSAAYIPFGEGDFYYHAAIFGGTPTHILNLTRECFKGILQDKKHDIEAQWHDESHLNKYFLFNKPTKILSPEYCWDYQIGLPSDIKSVKVAWQTKEYNLVRNNV

SEQ ID NO: 704 - DNA, 73063 bp, Homo sapiens
  misc_feature (1)...(73063): n = A,T,C or G
caggagaatcgcttgaacccgggaggcggaggttgcagtgagctgagattgtaccatggcactccagcctaggcaatagagcgagactctgtttcaaaaaaaaaaaaaaaacacttgaccctgaacttcaatttctaattcctaaagtaagaataatcacacatatttcagcaagtcattgggaaactgaatgaggaaatgcatggaatgctctttggaagctatgaagcacgatatagttatagtaaccatggtaacaacaatgcgttagtgagatgtaaagttgcgcacaaagcaccagtaacaaattcccaatctctgaggaattctgtgtacttggcggcagttcctatggattgataaccactcatcctacagatatatttcacagtcaaatctatgccaggctccaagcttaggttggggatatctactaagaactgtggagagcataagattttaccctacatggtagctaacttgagtgctaacagaacacacaagattcctgggtcagagacaaaagattttattcctcacagcatgagaagcagcataagtatcaacatatttgcattagttcctcttacccccaagtcccacgggagtagggctgccagatttagaaaacaaaaatatagagcacccagttggatttgaattttagattaacaatgaatacatttttagcatgtcccaaatattgcatgggatgtgcatatactaaaaaagtattcctaaaaaaagtattctttatttatctgaaattcaaattgaaggggaagtcttgtattttaactggcaactcgacatgggtgacacagatgagttcagctgtatgagttcacccacagtgtgttgcattacaagagactgacactgatttgaagaacctaaatcttttataatcttttataagggcagtaagcatgcttgccctttaattcagagagccacaggctctgccttccaaggctatttgcatggaaaggtagtccagaacaaaaggcagtcagtggctctgcttgtaagacttgaaaaaccactggagaattggctcccaatgcaccctagtgaacaggtgctgggaaagggatttggctgtggcttcagtatcttgagataaatgcttgtcagtggggctggtttccatcatatccctcccctaattcccacccccactccactttcagtctgatttctttgcagggagagacaaggttgtagggtcacagaggagtaagtctgtcaaaaataagaaatggacgagaatacataccctcccatttccattcattcagcaaatgtctagtgcctaccatggtccagacactgtgctaagcactggggctgcaacagcagaggatacccagccagtccttgcccacatggcacttcagtctgatggatttgtgaagggacctggaagaaaaatgacagctccacggccgggcacagtggctcactcctgtaaccccagcattttgggaggccaaggcaggaggataacgaggtcaggagttcaagaccagcctggtcaacatagtgaaacccatctctactaaaaatacaaaaattagccggtcatggtggcatgtgcctgtagtcccagctacttgggaggctgaggcgggagaatcgcctgaacccaggaggtggagcttgcagtgagctgagaccacgccattgcactcctgcctgggtgacagagtaagcctccgtccccccagccaaaaaaaaaaaaaaaaaaaaaagaaagaaaagaaaaatgacagctcctttttgtaaagaaatagctccaattgggaagcccctgctcacttctctgccatggaggcttcagcggtaggctgaatcttcctgcgactcttcagtatgcctcctgtgtctccactgccccgactttgttccaactgtagctgctgcctagcaaggcctcccctctgtcccactttcctcctcctaatatcctgcttttccttggaaaattttagctcaaatcttgcccccatccaagaacccttcttagaatgactcttcctgtctttgtattcccactatagatttcaaccttacactgagcatggataacaacctgctttggatcagaagccccgggagagccgggtgcggtggtcgtgtctgtaatcccagcacttaggcgggaggatcacttgagagcaggagaccctgtctctaaaataataataacaattattattattatttaaagaagaagtagtggaagagacccagagcctgaaagctggggtcacactccctgggtttcaggtcaggctctgccactgtaaagctgaacaaccctgggaaaatcactctacctctctgggttccagctctgccatctgtctagtaggaccatagtgaggactgaatgaggtcatgcagataaaaaaggcccgcacagagcaacatgcttactccttaagtcataatgaggacaatgatgctaaactgcttgtatattccatttattttaattccccgcaacaaccctatctggcaaatgttataatcctcattttatggatgggaaaactgaggctcagagacaagaagtctctagcttctctgtacagagcatttttttttccctagatgaagtctcactctgtcgcccagggtggagtgcaatggttcaatcttggctcgctgtaacctccgcctcctgggttcaagtgattctcatgcatcaccttcccgagtagctaggattacaggtgtgcaccacaatgccccgctaatttttgtatttttagtacagactaaaaatttagtatttcactaaattaactaaatttaactaaatttggtacagactaaaaattttatatttcaccatgttggccaggatggtctcaaactcctgacctcaggtgatccacctgcctcagcctcccaaagtgctggaattacaggcgttagtcaatcggggcccagccttctctgtacagaactccagttggctcccctaacatcatggcttgctgttcctcatctccaatgtgggaaaaaatgggttttttgcacgataaacataatttgtggacatttgaacctcttgttgtcttggcaatgctaaagtcattttgagcctttgcagacgtgtgcagctcatttccttctgctcttgctcggcctctccctccctcctcccccatcagccttgctctagggccagacatgtgttttggggtccgagtcctgccctgaggcctcctgcttgcctaggtctggtttgttcctggatagtcgggtctctgaatttcccgagaggcctgagatgctgagagccagcagaagtggacagggcaaagagtgcctggttccagttggggaatgtaacctgctcctgatcccccaggtgttcaccagggactcatagccctctcttctaagttctgctgacaaatacaaaccctaaccctaacccttccactcactgggcagcaaatcatactccatctccattcttcaagttaaattaaaaccagctgctccaggaagtgctgtgtcgtcagggatgctggggatggatacaggcatcacagagagaagccgctgtttatgttttccctaccgccaatgccatgctgctagctgctgtgtggcactgcttgggtgacagtcttctgtatctatccactgtggctgcctcatatcacccagtttctggttcaggccaccgtgatccttctaagcatgggggctcagccagcaatttcatctctcagtgctgagctcagccactggtgccctgggggtttgcggtgcccactcactgccccttccccccaggggaaactctccttttcatcccccagaaacattaagcatgcattctgcccctttctctgacccaaggcttcagggcttatccggaaggttaggaacttagaaatgcaaagggcttgtatactctctttggtagggagggtgcttaagctccccgccgagggtgggatgtcttccattccttcctgagccaaataatctcccctttttgcaatactcagcagctcagattggctcagccaaggggtcttctttctacaacagcgggaaaacaaaacccaagctctctgtgggccagcacagcacccgcagccccttaatccagtccccgtggatccgcctgagagacagggtctatgaatccattttagagatagacgagctctttcatagtgagcaacaccgtcatcagaatggctgttgctggccgggcacggcggctcacgcctgtaatcccagcactttgggaggccgaggcgtggatcactagaggtcaggagttcaagaccagcctggccaacatggtgaaaccctgtctctactaaaagtacaaaaagattagccgggcgtggtggcacatgcctgtaattccagctacccgggaggctgaggcaggagaatcgctggaacccagaaggcagagactgcagtgagccgagatcgcaccatcacactccagcctgggcggcagagtgagactccatttcaaaacaaaataaaaagaccaacctgggcaacacaacgagaccnnnnnnnnnnnnnnnnnnnnnnnnnnnnnnnnnnnnnnnnnnnnnnnnnnnnnnnnnnnnnnnnnnnnnnnnnnnnnnnnnnnnnnnnnnnnnnnnnnnnnnnnnnnnnnnnnnnnnnnnnnnnnnnnnnnnnnnnnnnnnnnnnnnnnnnnnnnnnnnnnnnnnnnnnnnnnnnnnnnnnnnnnnnnnnnnnnnnnnnnnnnnnnnnnnnnnnnnnnnnnnnnnnnnnnnnnnnnnnnnnnnnnnnnnnnnnnnnnnnnnnnnnnnnnnnnnnnnnnnnnnnnnnnnnnnnnnnnnnnnnnnnnnnnnnnnnnnnnnnnnnnnnnnnnnnnnnnnnnnnaaggagctgggacaacatgcatgagccaccacatctagctaattttttgtatttttagtacagatgcagtttcaccatgttggcttggatggtctcgatctcttgacctcatgatccacctgcctcagcctcccaaagtgctaggattgcaggcgtgagccactgtgcctgacctgaccctgtctcttaaaaacgtaaaaaaagccaggtgtggtggcatgcacctgtcatcccaatactcaagaggctgaggtgggaggatcgcttgagtctgggaggttgaggctacagtgagccaaaatggcgccattgcactccagcctgggcaacagagatcctgtctcaaggaaaaaaaaaaaaaaagaatctgaagctaggtggattatctcaggcttgttctactacatacaaattttatttctaatgcccagaagataacatgcaaactctcgagaagacctggtacgttagcttttttaaatgtgtgttttaaaattgtttttatgtacttaattttaaaaatacataagacattctcatggaacaacaatctgaaagtgtaaaaaggtttacaggtcaggtgtggtggctcatgcctgtaatcccagcactttgggaggccgaggcaggcggatcacaaggtcaggagttcgagaccagcctggccaacatggtgaaaccctgtctctactaaaaatacaaaaattagccaggcatggtagtacctgttgtcccatctactcaggaggataaggcaggagaatcacttgaacccgggaggcagaggttgcagtgagctgagattgctccactgcactccagcctggaaggcagagtaagactccgtctcaagaaaaaaaaaaaaaaggaaaaaatataaaatgcaaacccctggtcttccccttccaagcctccctgctgtgactcctcagctggcctctctggcccaatgtcctcctgcagggatctcacggtccttctcccgtgccagggcacacatacttttccctgccccgcaccccttccaaatgctgtctgttcattccacttcctccaagactctactctcacgttcccttctgcttctccggaccaaccttaccactcctgggaatttctttaaaacacctccccccaggcccccaagacctaggagtttccccacctgcgtggggctgagaagcaagtgagagagctatgggaacaaatcctagctctgcaaatgccaagcttgtgattgtgaggaagtcactgccatctggatctcgtttcctcatctataaattgagggctgggactggccatctctcagggttcctgggctgtgtgtttttctagttctgtggaagttttgcacttcctttatctggtatttctgtgaaaaaggctcatcagactttggggaaatcgatcctccccctgcctcccagctcactgttactgacatttctcttccccaccaagatctcaaggagggcattttccctgccaagaacattctggaagtgcattccaaaccctgcctgccagaggccacctcaccttggtgtttctgacatggagaatctgaggaagaaaggggaggacagagggaggacagggtgagagaggatgggaagaggaaatgcaagaaatgcaagaggtggttatccaagtcactggggagggcctaccagtagtaggctccaggtgggcttaacagaagtgttaggccaggcgtggtggctcaagcctgtaatcacagcactgtgggaggtcaaggtggacagatcacctgaggtcaggagtttgagaccagcctggccaacatggcgaaaccccgtctctactaaaaatgcaaaaattagccaggcatggtggcatacaactataatcccagctactcaggaggctggggcaggagaatcacttgaacccgggaagtggaggttacagtgagctgagatcgagccagtgctctccagcctgggcaacaagagcgaaactccatatcaaaaaaaaaggaagtgttaccggtggagggtgtgtaggttcttggcattctgagcaaagaattggacaaaaatgcagaaacaaagcaaggaaaaaatgaagcaacaaaagcagagatgtaatgaaaatgaaaggcggaggttgcagtgagccaagatcatgccactgcactccagcctgggccatagagcgagactctgtcccaaaggaaaaaaaaaaaaaaagacaacctcagaactgaaatgtgatcctgggaaggctaccaaacatgtaaaaggtttacaaaaatttgcattgtcatgaattattataatcttttataagtcattcaaccagtttgcagagagagagaggggccagaagtccaactggtaggaaattcttaccctaggccagcgcggtggctcacacttgtaatcccagcactttgggaggccgaggtgggtggatcacgaggtcaggagttcaagaccagcctggccaagatggtgaaacccacctctactaaaaactacaaaaagtagccgggtgtggtggcaggtacctgtaatctcagctactccggaggctgaggcaggagaatcacttgaacctaggcggcagaggttgcagtgagccgagatcacaccattgcactccagcctgggtgacagggcgagactccatctcaaaaaaaaaaaaaaaagaaagaaattcttaccctattgttggcatgttaggtttctgggttctttctccttgagcggcccaaatgatgctgctcgactgtatgcaaacaaacacattgccatgaattaagaatattccagtggctcatgcctgtaatcccagcactttgggaggctgaggcaggcnnnnnnnnnnnnnnnnnnnnagtcatccgtgtcttatggttgcggaatagtcaccctatcgtggaatgcgggtgcatcaccctgctctactccgaaaataatatatatctagggcaaggggggaagggactgtatactccctcgatcctggagaggggtggccaggaatttccctagaacccgaatgggagaggtcagactggtcttgaaatcctgtcttcaagtgatctgcccacctcggcttcccaaagtgctgggattacaggcgtgagccactgtgcccggcctaaccatgtttttaatagccagtgagcatcaggtgctcacctaaacataaggaaggatatcaaagttaaatacatagctatttttgccaacaactcagaagatttagctaatagtattaaattaactctcatttgtcaaaaaaaaaaaaaaagcacgcaaaccaagatcattttgttttggctgggtttatagttttataaccttctatgccaaactctgacacctcaaagtatttagcagagacaaatataaagtccagacaaaaatgtatgctgacaattctgaaagcatttctattttaccaataattttaaaaccagcctgtttattaaagttatacttaagtcatatgaacttgaaaattgcttagacttatttagttaatttatgagcactcttttatttatatgccaatttggtaggcacaagatataacagtaagtgtacctacaaataaacacatctagacatgtatataccgacacaaacaaagatccaatagcttggaactgtagccatgagatagcaatacaagctcgctggttttactttgtttgccccaatagataatccaatgaaggctgtgaactaaaattttgggtaaagtagttttcatggcagtttgatttttttgtttgtttgtttgtctattcatttaagactgagtttcgctctgtcacccaggctgcagtgcagtggcgcaatctcggctcacttcaacctccacctcctgggttcaagtgattctcctgcctcaggctcccaagtagctgggattataggcgtgtgccaccatgcccagctaattttttgtatttttagtagagacagggttttaccatgttggccaggctactctcgaactcccgacctcaggtaatccacccatcttggcctcccaaactgctgggattacaagctagaaccacctcgcctggcctggcagtttgatttttatttgtatttattttttcttttttcttttctttctcagtctccagcctcccgagtagctgggattacaggtgcacgccaccaggcctggggaatttttctatattctgtagagacggggtttcgccacgttgcccaagctggtctggaaatcctgagctcaagcaatccgcccacctcggcctcccaaagtgctgggattacaggcgtgagccaccgcgcccggccgaattatttaagaagcgaatttcttagtctatgaaaatgacgttcaacggcaaatggcaaaatgaagttctgacttttccacctgtaaagtagattgatatgagcgggagtgagaagaccttgtcgctatcagtataagacaagagaactgagggcagccagttgtggccacagcaactctctgagtgaattgctgccacactgggcacagaagcgcacactctgaaatcgaatgtttggattcctttctacataattctactaaagagttattccacagcctaggggctgccttagagccccgtttgagacactctgggctcacagatcatgaagtcagtgcgcaaacgcgggcagaccctgaaccaggtgcccaacgcccagccctcacttccagagctcaggactctcgcaagagcgactccagccccggcctgccgctgtctacattcgcgctcttccttcctcgggaaacaaacggtggatcagatctccaaggctctgagtttcccagagtttggccgtgcgccagcgcagcgcagcccctcccagcagcacagcacagaccccaccccatcctccaacgcccggggttcctgctctatcacctacaccaccaccaccacgtgcaggcccgagaaggcaaaagaggcccagccactctcaccggggattttatccgcctccccggcacacacacactctcactcacgcactcgctcgccggccttccagctgtctgtgtccggggcggggaccggcttggcgcagcccgctgtcagcgctcgccggctcctcgcgcccctacccgctgcgctctgcccagagcagaagcccggccggccggcccacgggcgggaggacgcgcctccgctcgggcggaggcggcgcggtggctgatcagagcgcgtagggcttcgccggggccgggagctgggcgcggtcctgctcagcccagctcaccgcgcgccggccctcggcgccctggttctgcggatcaggtgggtcccgcggggagccgcccaggtccccggaggccacgagcaggacacggacggggggctccgcgcttgggagagggtggtgagggagtggaggcgggccgctgctccggcgctgcccggtgtctgccctgcctgtgtccctgcttttgttcttgtcgctacctcggtgccaaatcggacccagtttctgtccctctgtccccatcctgtggccgtccctccctctgtccagccttccaagactggagcctgaagagctgcaagctgaggttcccccacgggtccgcggggttggggtgggggaagagaggggagacgcaggggacacaggatgcgaccaagtaagtcgcagtgagtgaggggtctgtccttgcctgtggggcaggacagaggaatggctcttgcccaggacaagataggaagggcgcgcctctgggaaggggaatctgggagtggggggataaagtgagggtcgcaggaaccccaaggaggaagggaatagagagggagatgtcagagagcttcggagagccgaggactcagtcagacgcccagcatggggaaagtttccgacactaactttggcatccggggtgcctgcagcactggggcgatgggaggcgggagtttcctccaactcttcaaaccttgctcctactcgaaaaggacaccaccccgcgtttggaaatggcaggaaaacggctaaacacaatgattgcacaaactcttgaagaaagtaaaaaaaaaaaaaacagtaaaaagaagaagaaaaaaatgtcagcgcgcaaagagccagagaagcagagggatttgagattcctcgatcttcccgctgtggcggccgggagggactgggaggcgcggagggtgtgagagccgctcctccggcaggaaggaaccgagacccgaggcaggtgttttgaggctttgctcttcctttgcactccttcgggctcctgagcaggccgggctgcctccttcctttacctggaaacaggcgtgtctgaggaagcaggagatgtagggtgcagccctggcctgccgcttgctgccagtaaggaaccaccttcccagacagagcctcagtttccccgattgtgaaataaggatactactggagaccttccttccagtctctgagtaaggaaatgcaagtgcatggcgaaggagggctctgggagtggggggtgtggaggacagggttattctgctgcatttctgtgcttctttgactacatcaggcactttctacctctttcggagttacatctgggtgaattttgcctcctctaccagatgggggcagcatgtggatctaagttatctcatttacatgtaacaggtgctcaatgactgaataaggcagagctgaacgagtccctagggattgcccagtccagaagtttcaactctgtcctgtaaggcccggcatcctgcctcaagggccaccatggtaggggaggggaacctagaggacagggctctggccccttccctatcttatttcagacagaaccagttctgttcttcctttatctcctctatgtattgggaaactcctgagaacgtttttgatgtcagattgctcagatccaacctgatccagtttttggtggagtagctgaggtccagaagtgtgcaacgtgatttgggcaaacttctctagtggccacaccttaccaggagacctgtcccctaaatcataggctaggagctgcctttgtctggccatggtggctctgagcagccatttccccagctcttaccaccagctctcctacactccaactccagggccacagggctgccttctggcccttctgggagaagaagcctgtgaatctcatcctctgagcacttccagacctttagtgggaccatttatgtgagttggtctcacaggttgaggtaaaaaataatgaggttccctggcccaactgagtagactaggtacctgcctgtgtccctgcttttgttcttgttgctacttctatgtcagaacggactcagtctctgtccccattctgcgcccgtccctgccttcgtccagccttctaagactggagcctgaggggctgtgggctgagcagcccctcaggctaacccattttctagttgaggaaaggaaggctgagagagaccaagaaacatatgggcactcagcaactaaatggaagctaggatttgaatgcagttctggctctaaggttggtgctttttccattacatcacctctcatgatggctaaaaaatggctaatggacaaatgtcatggagacggggcagaggtgaggggagaacaaccgaaggagggggcagctttcagtaggggactggacattaatagaggtataaactcataaatataattttatctgaaatgaatgtactctttgccctgtactttccttttattttaggttggatatgtaaaacttattttctttcttttttttgagacagtctccctctgttgcccaggctggagtgcagtgatgctatcttgactcactgcaacctccacctcccagattaaagcaatcctcccacctcagcctcccaagtagctaggattacaggcgtgcaccaccatacccagctaattttttaatttttagtagagacagggtttcaccctgttggccaggctggtctcgaactcctgacctcaggtgatccacccacctccgcctcccaaagtggtaggattacaggtgtgagccaccatgcccagttgtaaaacctacaaatcttacgtgtttgatttgacaactcttttttttgtttgtttgagacagagtctcattctgtctcccaagctggaatggtgggatcttgaatcactgcaatctctgccccctaggttcattcaagcgattctctctctctttttttttttttttttttttttttttgagatggagccttgctctgtcactcaggctggagtgcagtggcatgatcttggctcactgcaacctttgcctcccgggttcaagcgattctcctgcctcagcctcctgagtagctgggattacaggcacctgccaccacactggctaattttcttttgtatttttagtagagttggggtttcaccatgttggccaggctggtctcaaactcctgaccttgtgatctgaccacctcagcctcccaaaatgatgggattgcaggtgtgagccaccacgcccggcctaccttctattttttacgattgaattttaagagtttttggagaaaataacatgagtcagggcagaatagggatatggtgatatggagatggtgatatggagaccattatgggccagggcttgggaaggaaagaaccaaatggtggttggaataatgacctcaggaatagggatttctgggcactaatatgttatgtgaaaaataaatagacttttgtggccaaaagctaagatttgggggttgtttgttatgcagcatggctgcagcaaaagctaactgatacacattatatagatgcaataagtgcagattgtgatgaaactttcatgccatgataaggagttgtgagcaatggggaatcaacagagaagtaaggaaaatcacataacaggttagtctctatgggtcaactgggatttaaagacctggtacttgtactctgtgggccaggcaaattcatccatgttcatggctttaaatgctacttctgtagcattcatcttatctcaaactttgggcatctaattcacatgtttaactgcccaatgggcatctttgttttgaatgtctcaaaggcactgcaaactcaacaagtccaagctagaattatcttatggtggctttccatcacgggtcactgtatgaatgatggtgccactagctgagagagtaagggagaatgaatgtttgggaaggggagagataatgagtttagttccatgctaaatggttcagagcagtccaggaagataaggattagaagttgcattgggtaattaggagattactggaacatactgagagcagttttgatggagtggagggtaggcaagctagattgctgataggtaaggaggacataatgaaaacaatgaggatagtcagctctttctctttttttgagatggagttttgctcttgttgcccaggctggagtgcagtggcatgatctcagctcactgcaacctccgcctcccgggttcaagtgattctcctgcctcaggttcccaagtagctgggattacaggcatccaccaccacgcccagctagttttttgtatttttagtagagatgggatttcaccgtgttgtccaggctggtctcgaactcctgacctcaagtgatccacctgcctnnnnnnnnnnnnnnnnnnnnttttatttttctctcctctttttttcttttttcttatctcacctcccagaactaagcacctcactctgacatgagaggatccccgtttacaggcatgagccaccatgcctggcccaggatagtcaactctttccagaagtttatttgaggtcaggagaggccaggtgtggtggctcacacctgtaatcccagaacttggggaggccaaggtgggcagatcacctgaggtcgggagttcgagaccagcttggccaacaaagtgaaaccccatctctactaaaaatacaaaaattagttgggtgtggtaatcctgtaatcccagctacttgggaggctgaggcatgagaattgcttgaacccgggaggtggagattgcagtgagctgagatggcaccactgcactccagcctgagtgacagagcaaggctctgtctcaaaaaaaaaaaaaaaaaaaaagaatgatgtagatttggtccatgcgctgaaggcaaaggggtcatcacgtagtatgctcaacccaggtttctttcttttctttctttcttcctttatttgtaaaagatgaagtcttgctttgttgcccaggctggggtacagtggctattcacagatgtgatctcattaccaatcagcacgggagttttatcctgctccatttccaacctaagtcagtttacccctccttaggcaacctggtggttccccactcccaggagatcaccatattgatgccaaacttagtgcagacacctgatctatctgcatagtacactgcagcccagaactcctgggctcaagtgatcctcccacctcagccccctgagtagctgggatggtaggtgtgagccaccatgcctggcaacccagaattacttctaaaagtcctttcagttctaaaaagaagaagtgaatatctgctgtctaaatctccagccaaagagctgattggctcagcttgtccaaatgtggcgaggagaccacagacctctgtcacgtgcaatcagacccggccatgagagtttccaaggcttgggctttagcagccattatgccagttttcattgccaaacagagtctcaggaggcagaggcagtgatggcagtggggtggagacccattgccttctgttcaaattttgtgccacagggcaaccccacacagacatccacaagagactttgggggtgtgcacgtgcttcctggggttcctctctgaaaccctgtgtggctgacagatatgaatggcagggaaaagcatgggtctaactcagagagtgagtggtctgagatggaggaggagattccagagagagtgagcctagcggctgggtgcggtggttcacgactgtaatcccaggatgctgggaggccaaggcgggcagatcacctgaggtcaggagttcgagaccagcctagtcaacatggcgaaaccccgtctctactgaaaatacaaaaattagctgggcgtggttgtgcgtgcctgtaatctcagctacttgggaggctgaggcagaagaatcacttgaactcgggaggtggaggttgcagtgagctaagattgtgccactgcactccagcctaggcaacaaaacaaggctctgtctcaaaaaaaaaaaaaaaaaaaaaaaaaagagagtgagtctaggaagctgaaggaggatggggtatccaggaggatgtggtcaagagggttgaatagtggagaggttgggtagaaaaaaatggatcctggaagacagcggctgacagagatcagaatgggttgacagtaagacccccgagggaaacaaaaataattataaaattattatgataagatttctctacactgatgcatagtttcagaagtaagaccatgtactcatctcacgtgagcctcacaaaagccctgaagttggcagaacagaaatgattttccccattttgcatgtggggaaactgaggcttagagttttaatgtcttgggcgaaaaacctcaaaaattaagtagcagaactgaggcatgaaagccgggtcctgaagccaaacatagggtggcttggagccctcggtgggcacaggtagggaatggaggtagttcacgaggtagcagctgcagtgaccttccctggggcatagcagggctccttcctggctttactcagactgaaatcagccagagagagtgaaaagcaggaaatggaagaggctgggcagagagaggccagatcctgtcctgcaatcagttccttttttttttttctttggagacagagtctcgttccgtcacccaggctggagtgaagtggcgtgattttggctcactgcaacctccacctcccaggttcaagcgattctcctatctcagcctcccaagtacaggcacacgccaccacacccagctaatttttgtatttttagtagagacggggtttccccatgttggccaggctggtctcaaactcgtgacctcaagtgatctgcctgcttcggcctcctaaagtgctgggattacaggtacaagccaccacccggcctcaagattagttcttaataagaatttttcaagccacctctgtctcagtgctctcatcttcaggggggcctgctttaaaagccctgaactcgaccgggcgcggtggctcatgcctgtaatcccagcactttgggaggccgaggcgggcggatcacctgaggtagggagttcaagaccagcctgaccaacatggagaaatccccgtctctactaaaaatataaaattagccaggcgtagtggcccatgcctgtaatcccagctatgagggaggctgaggcaggagaatcacttgaacccgggacgtggaggttgtagtaagccaagatcgtgccattgcactccagcctgggtaacaagagcgaaactccgtctcaaaaataaaataaataaaataaaataaaataaaatacctgaactcggctccccttaggggtgaggcactgaaaagagctctgggctgaatgtgaggtggtcacgtcctaccccgtgctggtgctgctagctatgggtactgtgggaccgtttccccatcagccaaatggtacaaggcccaagtctagccagcttctctctgagcaacgcctgcgatgaaacaaaagcaggaaaaaaaaactctaaacacacaggaaatggatgctccaaccaaaaacctgcaagggaaatgcagctgtttttcccaaagaaatcccaacttgggggcctctcttgccaatttggacaccaggaactgaggcgctagaagaggtacctgttccagagactcatattgtgaatcagatactcattcagcattcactgagctaccacaaatccattcattcatttataaattcacccagaatttactgagcacctactaggtcctgggctagatacctgagatgtcaccatgaacaagatagacacaattcctgcccacatggaggccatagcttagcttgggagacagttgcacatggctgagcatggtggctcacacttgtaatcccactttggaaggcagaggcacgcagatcacttgaggtcaggggttcgagaccaccctggccaacatggtgaaaccccatctctactaaaaatacaaaaattagctagacttggtggtgggagcctgtaatcccagctactcaggaggctgaggcatgagaatcacttgaacccaagaggcagaggttgcagtgagctgagatggcaccactacactctagcctgggtgacagagctagacgccatctcaaaaaaagaaaacaagaaaaaaaaaaaaactaattgcacagtgacagccacaaagaagtgcagagcgtgtataacaggggcctgatcctggccagggaggtggccaggggaaatgacctttccactgagcccttcaggagttatagggggaaccgggtagagagtttcaggcagagggaagaagcaaggagaatcaatcgtcctgctcttcctccagctgttctggaatctagacagccctggtggctggaggggcacagagaaaggagcaagcctagggcgaagggtgatgttggggctggcaacatctgtgagcagagaagcagctgcctgaccttctcctgccccagggaaaccatgagtcctcaagtggcaggccagctgtcctctggaggaattctcctggcatctgtgggaaaagccaagacactttcaaaattaggagtggggtagcttttaaggaggcctggctccccgagagcaaggactgggccggggtttgcttgtggttgcctaaatctctggctgcttatagattggtgtttgatgtagcaaactctgtctgatattggtgtttgatgtagcaaactctgtctgcctatattcaccagagccatgcagagaaagggataattaatatttctatgtgcacatttaatcaagtgcttaggaattcattccagggcatgaaaattcaacataggaagtgctcagaaaatgtttggggcagctacattgagtagcaaatgagaaggcatataggccagaggtcacggttgtatgcaacagagggagatttcagctcactgaggcagaagacacctgtcttggaagggatgttttgttgctgacaacatctttcagaaggctagaaaacaaagctggccagaaccagtaaaggccaggcaataaacacaaggtcttgtataggagctaattctagctcttgctgctgtgagtaacgttgctctagcacctgcctccatgcggcttccttaggttgcagagccactaactggccaggcctaggtcagtcctgcattccaggtgtaagtgaatggacttggggaggatccggcccgttgtgctctggtggtgagtgaggggttgctgatgctaaactgggcagccacaagaccactgatgccaccagagatggggaaccttgtagtgccacagaattctgctggcctaaggagggtcacagggccacagctgagggagggcaaaagccttctggggaggtttcagatgagatcgggtgcattcagagtggtatggccatagactttctggggagctttcagaacagcagcctgacattgagcactttagtgaaactcaaaatccacctgtgtaaaataggttggtttttagagctaagtgtctattgcctggcatgcggtactattgaatggctgtgctgttatcattattattagtagaagtactagtaattccacccagctgttaccacagcagttatgtcctcgagggaaagagaaccaacgcaagaaaatctagagaaattcagcagtaaccacacacattgatacatagaaattcttcgcaagttcctttaaatgtttgcctcctcagtatactgaaacggggatttgatttaccaaaaataatcaaatacgtgaatgagtcaccatcttacagacccttgatacctactgttaaagaaagtagttcttttgcaggagcagacagagcttcttagagatcccagacttccttcactaaggaaggcttagcagaggaagaagaaagttcacactcctgtgactgggggcaaccccaccccacccccaacaaacacacacacatccccaggagagttgggcttcaccaccatactcttccctgccacccgaagaatgcagcttcccacaaacacagaacgcctgctggcagtgttgtgctaggaagtgtttcatgaccagttctttgaaaaatggaagctctggtatgtggtctttgccaatttctatagtgtcaatatttccaccaaggccaatttcaagttaccaccacttgaggagctgggagtaggtgcacagtagcacattgatgtatagtattttccactctgactagatacaatagatgtaagtaacttcaagagtatcaaatgaggctggccacagtggctcacacctgtaatcccagcactttgggaggggatggtttgtgtacgggagtttgagaccagactgggcaacatagtaagacctcacctctaaagaaaataaaggattagctgggcatggtaatgtgcacctgtagtcccagctactggggaggctaaggtgggaggatcgcttgagctcaggagacagaggctgcagtgagcagtgatcatgccactgccctcagcctaggcaacagagtgagaccctgtctcaaaaaaatatatataaaatataataaagtaattaggaagtgatgagtttttatgattacctttgttcctaatacagttcatttaattgtaagtttacataattaaattttttaataaggcctatgtttaacaactgggttaccaaattcttgaaaatttaacatgcaagccagcatgaaccaactccatcacactgctggcttgggggatcccagaaagaggtcagcacaaagaggtcatccctaaatagtgacccctacccctccttatcactttcaagatgtcaacatccttgttttgttttgttttgagacagactctggctctgttgcccaggctgcagtgcagtggtatgatctcagctcactgcaacctctgcctcctgggttcaagcgattctcctgcctcagcctccccagtagctgagattacaggcatgcaccaccatgcctggctaatttttttgctttttgagacagaggctaatttttttgctttttgagacggagtttcactcttgttgcccaggctggaatgcaatggagagaccttggctcactgcaacttccgcctcccgggttcaagcgattctcctgcctcagcctcccaagtagctgggattacaggtgtccaccaccacctggctaattttttgtatttatatgagccaagacagggtttcaccatgttgggcaggctggtctcgaactcctgacctcaggtgatccacctaccttggcctcccaaagtgctgggattacaggtgtgagccaccatgcccaggcccaatatcctttatttgtcttataacccttgcgtttggttcagagctgaatccccagggtttagaacggtgctagcctgcatgtagtaggccctcaatgaacatgaattgattaaatgaagagaggcagaacatggagacttcaagagttcacatcctaacaggctaaggcgggaggattgcttgaggccaggagcttgagactacagtgtgctatgatcatgtctgaatagccactgcactccagcctgagcaatgcagtgagaccctgcctctaaaagaaaactttaaacacacacacacacacatgcacgcacacacgcacacacacacacatccacaacctgcctctggttgagcctgtttctgcatctgtaaaattaggttcccttcagctataaaaagtctatacctggtaggcctggcgcggtggctcacgcctgtaatcccagcactttgggaggctgaggcaggcggatcatctgaggtcaggagttcaagaccagcctcgccaacatggtgaaacaccatctctgctaaaaatacaaaaattagctgggcgtggtggcacgcacctgtaatcccagctacgtgggaggctgaggcaggagaatcgctttaacccaggatgtggaggttgtagtgagctgggatcatgccactgcactccagcctgggtgacagaacgagattccacctcaaaaaaagaaaaaagtctataccttgtaaagacatcctttctgcacagcacggccaaacagagatcctcagtggagcattttcaagggtgggcgctagtgcgctggttcttaggactgtaggtttgattctttagctttttttttttttttttttttttgagacagagtctcactctgtcgccaggctggagtgcagtggcgcgatctcgggtcactgcaacctctgcctcccgggttcaaacgattctcctgactcagcctcctgagtagctgggattacaggtgcgcaccaccaagcccggctaatttttgtatttttagtaaagacaaggtttcatcatgttggtcaggctggtctcgaactcctgacctcatgatctgcccacctcggcctcccaaagtgctgggattaaggtgtgagtcaccgcgcgcagcctgagcctcatctttaactcgtgaggctcaggggcagaggtgggaacagagatcaacccaggacaaacatcttctcctgcatctcactgctgtcctctctgaaaagtcgtcccctctggggcaaactgggaatgggctgaggactcttcctttgctagtgaatctgggtgcagctggtggccttctctgtgtgcccgacaacctggggcaagagccaacccccaaatccatctgctttggggcagcatcgaggatttcctgtctcttcccccagagttttctttcctggctgtgggtggctcaggctggtcttcagattcgttttctgagacgtgtggtgtggacctggtccgaagagcaaataggggtacctgagttctgctcacctcttctgcagatgggcaaaccgggaaaggaaagtcatccagacaccagattaaacaaataatgagacaattatagctcatgtgtactggccatttgtttttactcatgctggacatattctagccactttataaaagccctgccttttatgcagctagaaaagccaggtggtagggattgttatctttctagttttacaagggaggaaactgaggcacaaaaagattaagacatttgtagggccacatggtatgggagagacttgggactgagacacaggcaatgagatggtgcccttcatcacagcagcgtgccacccgcacaaaacaacctcacagagagcagggagccagccccctgtgcagccccctcacccaacagatgggaaaccctggcccagagggttgtggggccttccctaggctcactgggtccagactggagcccaggagtcctgactgctgtcttagtgctctctgcacaccacctggggtccaccatccccaatcaccaggggacctcctgagactgggaacctgttcattgtgcactgcggacctcctacgaatagacccacgtgggcgtggtgtaggtggtccagccagatagcaacagtgtcctcctcccacactgagaaaggtcttggggcatggagttctggcttcagctgtaaagttcaaaaacactgttctcctgtcagatagcccttgcagcagagaaatgggccactcatcagcctctgtcacatttcctgtttgtgagcctggactcaagtggagttttaggtgaagggcaaagggcatggaagcagagccttccttactggaatacaattatcagaggggaaaagagcctagaagtttccacctaaacctttgttttgtggatgtggaaaccgaggcctagagaatgcaagaatctatcctagttcatggtgtgcgcaggaatcacaaatgggtttttggtggtggtggtgttgttgttttgagattatataatcttagaatgggtgagctagcagaaacccaagctgttcctcagtccacttccccatgttccacagatgtgatctgaggaagtgggtgtatgtgggtgcagaggggaggggaccttccccacttccctccttctttgagcctctgtatcttcatgtgtaaaataaagcccaaggccctgctctgctgatcccatacagacatccaccaaaggtctttgtgtgtgctaatcagcgtggatgctagcactgagcgggagtgggctgctggttgtctcccatttttctccagagcccggcctgagtcccaggtttggggaaccttgtcttcaccccactgctttcctatacaccgccatccactcagcactgactacattttggcaactccctctatcccatcaactcaggaagacacgtatttcaaaggaatataatgctagacactttacacgtgacaacacttaaccttcacaacaaccttgcaaaatcctgttcgttcactagttaggacgggatactgaagttctgaaggaggctgcctggggactctgtcacatagccagtggggtgggggactctcgggggattgtcccagctcctcacggttttcctggaggctccattctgtctgcctgccttgtagccagcactgagcagagggcaagggagccagagaaggtaggcccatgtggcctgggaccaaggacaccctggcaggcagacccgttggctgcccttcgaactcgtattcttttaagatttgttcagcatttatctggggtgggaaaatggatttgcaatgaatacaaatcatgagcctcttccagattccaaattccattctacaccggactattttccagaagcagaaggaacagaaattcacagacagagtcactttcccaggggcagtgagttaatgtcctggagaaacactggctgttccttgcttttctgtagctctctgtttctctttagtttgtgtttgagcttttccaagccagacggcttctggggaggctcattagagggtttattttggttctggttttgttttaagttgccttaaatatagacaagaacagctagtcttagagaggaggatcactctgcgtgtcatttattttgactgagcagcttggtgtgtacttcagttggcatccttgaacttagttccttgtattaaataaggaaagtatcgctcacatttacataatagcaacaatgaattatttcagactgtcagtgtcagagaaccaccagatttatttacttaaataactttctgtctggttacaaaagtaatatgttctcattgtagaacatttgaaaaatgtagacagcggcgggacctataatcccagtactttgggaggctgaggcaggtggatcacctgaggtcaggagttcgagaccagcctgaccaacatggtgaaaccccgtctctactaaaaatacaaaaattagctgggcatggtagtgggcacctgtaatcccagctacttcagcctgggcgacagagcgagactccatctcaaaaaaaaaagaaaaatgcagaggtagaagagaaaaacagatgactctcccacaatctccttgcctggtgttcaccactgttgccatgtgaatctagttctggccagaatgttttctttttttaattgtcataaaatatacataacatgaaatttactattttaaccctttttacaattttttaatagattcagtgggtacaaatgcagttttgttacatggatatactgcatagtggtgaggtctgggcttttagtgtatccgtcacccaaatagtgaacattgcacccaataggcacaatgagcccaagtctatgctcataaccaccacgttctgcagcccctcaaccaccctgagaggtggggattatgattatcccctttacacagatcaggaagccaaccaaattgctctcttatttgcaagcatcgtcaagtaggactttttctacctctctaaacatgtttaggattaaatgaatagcaacaacttgcaacctttgtgtctgtagcattctttgccaagaacacttaatcctcacacctccacagaggtaagcaggttggagatcgtgaccttcaagtttcccagcaggaagtgacctgggacatgaagccagggctctttacatttggtctgcagctgcctctacaacagtgaggccctataattctccaactcaggatgtggaagatggacagatactgaatgctggctgttatctgatagatccatgggctgttcgggctgtaatgatgagattaatcaactcggggctggacacggtaccaagctcttacctgggcagcctctggacagctttgatcagcaggactccagcccgaggctcatttgctacggttctctggctttcaattaaggaatgaccctaaatgtgtgctcctttgttttgagagtttgaggatgaaagtgtgtcagggaaggaggagggccgtgtttgaattttctagaaattgaattgtctgccttccaggtttgcacactctctgccaagctgtggctgaccagccaggagccttattcatctgatcagtagtgttccctggaggcgcctgggtaggaagaacagcattggctccaacgaaaagaggtcccagctggtgacctcgaatgagtcactgagactctcagagcctctgtatgttgacctttgaaaatagtgaagggccctgtcctaccacttcacaggtgattgtgatgatccattgagataaaagagagaggctgctctgtaaactgtaaagtgggaggcacatgagaccggggatcactgcttgctcatggagaggaccactttatctcatcctagctctttaggtttcgaaatcaattttccttcccttccccactgaccatacataggtccatgaatggcttttaaaattatttttcttttcttttttttgagatagaatctcgctctgtcacccatgctggagtgcagtggagcgatcttggctcactgcaacctcctccccgcctcccggattccaatgattctcctgcctcagcctccagaataactgggactacaacacgtgccaccacacccagctaattttgtaatttttttaaatttatttttttgagatggagttttgctctattgcccgggctggagtgcagtggcacaatcttggctcaccgcaaactccacctcccaggttcaagcaattctcctgcctcagcctcctgagtagctgggattgcaggcgcccactaccatgccctgctaatttttatatttttagtagagacaaagtttcaccatgttggccaggctggtcttgaactcccaacctcaggagatccacccgcctcagcctctcaaagtgctgggattacagacatgagccactgtgcccagccgattttttaattatttttttgagacagggtctcattctgtctcccaggccggagtgcaatggtgcaatattgattccctgcaacctccgcctcctggtctcaagtgatcctctcacctcagtcttctgagtagctggactacaggcacatgccactatgcccagctcatttttacattttttgtggagatgggctgtcactgtattgcctagactggtctccatctcctgggctcaagggatccttctgcctcagcctcccaaagtgctgggattacaggtgtgagccactgtgcctggcctcctagattgttttagcacaacagattgtccctgagcccctcctgaggtgtttgtggtgcctgggattggggaggcagggcccatccaggtcctgtggccctagcggggaaagacagtgcccaggagagctcagctcccagcaggaagatttctgatttctgttactttttattcttttttttttttttgagacagagttccgcttttgttgcccaggctggagtgcaatggcatgatctcggctcactgcaacctctgcctcccaggttcaaggaactctcctgcctcagcctcctgagtagctgggattacaggcatgcaccaccacgcccagctaattttgtatttttagtagagacggggtttctccatgttggtcaggctggtctcgaactcctgacctcaggtgatccacccgcctcagcctcccaaagtgctgggattacaagtgtgagccaccgtgcctggccactttttattcttttttttttttttttttttttgagacagagtctcactctatctccaggctggagagcagtggcgcaatcttggctcactgcaacctccacctctaggttaaagcaattctcctgtctcagcctcctgagtagctgggattacaagcacatgccaccacacccagctaatttttgtatttttagtagagacggcgtttcaccatgttaggctggtctcaaactgctgacttcaggtgatccacctgcctcagcctcccaaagtgctgggattacaggcatgagccaccgccccctgccagtttggcctatttttgaactttaaataaatggaatcatccagtgtgtaccttttatgctgggtttctttcactcagtgctgtgtgtgtgagattttccttgacgtgagtagctgtagctcgctcattctcattgctctaggtagaatcccattgtgggactaggtgataatttacctgttctgatgatacgccttgggagagcatctagtttggggtgtgctatgaattttttttttttttttttttttttgagatggtgtcttgctctgtcgcccaggctggagtgcagtggcgcgatctcggctcactgcaagctccgcctcctgggttcaagtgattctcctgcctcagcctcccgagttgctgggactacaggtgcctgccaccacacctggctaattttctgtatttttagtagagatgggatttcaccgtgttagccaggatgatctcgatctcctgacctcatggtccacccgcctcggcctcccaaagtgctgggattacaggcctgagccactgcacccggccaactatgaatattctaatgcctgtgtcttggtgaacatccacacactttcgtttgggtgtggaactgggagcagaacaataggataggcaggtgggcatctgtttggcttaaatagttagccacaggaaggatttaagcaaggtattaggaagacttctggaccctaaaggttgtggccaaataactcatccccttaagaggcggaagctgtgaaatttccttctggggaacgggaggaagaggctggattaggcactactgagcgaccggggggccagtccttgattccttcctgtctggctttggtcccctgtctttagtctggggtttccagactgtactccctggagatgtctcagccacgtgggaggatgaggaaggggctttgagcatcatttccctgctttagccaaaggactccgtgtgctctgtttcaggtcgtggggattctgagaatgattttgtttgctttttgaaaaagttttagctgtttcgacattggaaaatctactgcccaccgggcatggtggctcacacctgtaatcccagcactttgggaggctgaggcgggcggatcacgaggtcaagagatcgagaccatcctggccaacgtggtgaaaccctatctctactaaaaatacaaaaaaatcagctgggcgtggtggcatgtgcctgtagtcccagctactcgggaggctgaggcaggagaatcacttgaacccgggaggcggagcttgcagtgagccgagatcacgccactgtactccgccctgggcgacagagtgagactccatctcaaaaaaaaaaaagaaaagaaaagaaaaaaagaaagaaagaaaatccactgcccctaggtcccttccagctgcaagattctattttgggagcaggaggtgggtatgggaagggttaagcattattcagccaaagagcggagttgagccttggtgaccttttaaagttcttgtagtgtgctttgtgctgtgggagatcccgtaacattctataaaaatgtagtgttcaaaccaaacagcgacttctgaagcctaaaagatgtagaggaaggacttaactttgaggaacatttaggtagaatttccaccagtcttgaggactctcaagatagccctttgtccactcctctgtggtgtgtgtgtgtttgtgtgtgtgttttaacgtctccattggctggtggctggtcctaggagcagtcacttgaagttgtttgggtccagaatggtttccatttttatccagtagtgtgtgatgtgggcccccttggtgtccctctcaagggtgggtggtggcctttcctcctcccatactaggcccagtttggaccatggttttgcttggcaaggaggctgggccgctcatggatccagagaggaacatttctgccttggcacacagctctgagtcaacaggcctgataaacagctcgtttcccaaaggcctgcaaggaacaaagcccctggctgctgagggctctgtctactccccatctcctgaaacagctgtttattctttcgacaggagttgaaaccagcaccttccctttctctgagtcctgcctccttctgcagaagggagctcaaaagaactttgttgttttgccttttactctggggtgaaagcggcaggaggtatgtgagatggtgaaatgatttgcttctgccatgctggggtcacgggtggatcgccctaaactctcggtggccccctcagtagttttggaagaggaccaagtccttgtctctccagcagtggacctggaagaaggatgccggctcagggacttcactgtaagttcagctttattttgctcccctggtaggacctcacagggctgcagccaagctgcagcctggagtttttcctgaaggatttaagttgttaatgcaggagcagggggcaagtcttggggctcagggtgaagttatggatggaggcagagccctctcagaattgtgtagcatctttcatttatcttactttggttctctgggaaaaacccttgcagtgatttccagaccaggcagcatggaaaagctggctggattcagcctttagatttcccaaaggggattcgagagaaagcactgtaagatatacttcagagaacaggtcgttccatttgagatggctggagcgacagtgggccatgtattcagtctgagacctgtctcttattttcttgtgtctgtttactctgacccttataatgaaaaacaaaactggagacaaccttccatgcacttcccctgcttccccgtgaattgtatcgtggaagcatttccttgtaagacccaccagctcactgaggttttaggataataaggcactcttcctccttacacccagcaccatccctatgccaagggctgggcctgggaggcaggcattttaaatctggcaccaagacttctgggcatgcccagtgatctctggcaagctatgcccctttgctaaagctcagtttcctcagctaaaaaagccacactaaggccaccgcactgaccattgtgaggaataaacaagatgctgtgagtgaggacaccccacaacacgcacacagaaggtgcctggaaatgctaggagagttgagctgatgctcaccagctggtccaaggaagagctggccccacagcaattaacccatgcagaagacttcatgttttctagagcaacagagtggttaaaagagagggcactagagcctggctccctggatttgaaccccaactccaccaccttatgctatgtgacactaggcaagttacttcacctttctgagcctctgttttcatatctgtgaaatggggataataatagagtaacttcactgggttgtcatggggcttaactaagagactcctgaaaaggggtttagcccagggtctggcctggcctggcttgactggggaaaatacaggtgttgcagggtttgaagctgattccatttggggagccctctttaagaagaagaatgggctggccgtggtggttcatgcctgtaaatcccagcactttgggaggctgaggcgagcagatcacgaggtcaggaaatcgagaccatcatggccaacatggtgaaaccccgtctctactaaaaattaaaaaaaaaattagctgggcgtggtggcgggtgcctgtagtcccagctactcgggtggctgaggcaggagaatggcatgaacctgggaggcggagcttgcagtgagctgggattgtgccactgcactccagcctgggtgacagagcaagactccgtctcaaaaaaaaaaaaaaaaaaaaagcaaggttgcaaatgcaatgttaggtatgaaagtaagtatctggaatatgagaagtgatatcacaacaaataacaaagactgacaaacattccaaatataacaaaatccagaaaacaacgacataagaaaatgatgtaaaactaatacaaaaatgattagtattacttaactgtctgatacacctgtcatgtttgggctacatactctttgactgccacattatctgacaacagttttctagaatcatttccaataaaagagaaaagacagataaatcagttttgcctgtggcatggttaatcaatgggtgctttttattactgagagtttagagcaatttattttagcttcccaatttgttattggcgatgccacttctctaagtcatttgacagtttctcaggtggctccagccagatcatgagaaaactcagccctggatccttgctaggcacagtgaggcagacgaacctgggtggagcacgaggtggctgtgagacctggatcatagtgacccctgagcagggagcagagagagtagtgtgtagttcatctccttcttcttgaggccaaaggaggaggggcccaggtgctcaacaaggtccacctgggaccggttgtttctgggacctaggtgggtgtgcaggtaatgggtcagcaccccagctcagcctgcagcccctggacaggcactgaggctagagagtgactctcccaggcaaggcaacactctacctctgggaagcatttggggctttctcatgctcaccctaatgggaaatcaggcccagtcttgcaaaggggcttgtgcacatgaggaccctgacacctaagcgtcattagctcctggtaagtcagcctctgcattcagcgcatattggttggtggttcctatgcatgatctgagccaaaaggctgagaagtgatagttgatgaatcctatcatttgatcatcacaccaaggggcccgtgtaggtcactgcagcagggtgagctctatgtggctaaaagaactgccctcaaaaaatgaggtttacatccctgaggctgatttctcatgcacatcctgggttcatcagagaagaactggggattactggggaatcttagctccaaaggacttgtttctgggccaaggagtctgaggccagagaaactcgtgacgccagtttagaaagctggcactgtgttggtgctggggctgacctgcaggactatgacaaggctggggacagggtgaggcaggggtggagcaaggaggtggggtggggtgcaaatggaggtgcagctggtctggtcagagccgtgttcctgggatagagcagggcatggagctgactttatcacaacatgcagttggcgtgtggactcgctcctgactgttctgagagatgctgcccatcaagattcccctctcagatgaactcacagccctgctttcacaccaagctctgagccatgcatttctgaatttctcccattaaaaagcatcatcattattataggtactgtgtggggggcattaacagaccatgggcacagtatgctttcaagaaccctttgaggagggtgttagaatctccattttgtatatgtaaatagaggctcagagtgttaaagtaactggcctaaggtgtacatctaggactctgctgatttaagagtctttgctcttagcctaatttttacctggaatgctggagctgaacactctcctttataatcaaggatctggaggactaaagactagagtcttgtccaaggtcagtaatacccagttaattactgcacccttccccattcccttacctgttttccttctctttgttcactgtcactacctgacattatatatcctgttgagtctcttgactcccattggaacagaagctctatgataatcttgttcagtaaagcatctccagttccaaaaaccatctggagcacagtagcctagtccatgtttgttaatgaatccatggcagagcagaactggagtgcctcagaactctccttactcatttgttcaccccaaacacttgtgttacaggaagggggtctggatccagaccccaagagagggttcttggatttcactcaagaaagaattgagggtgaatctgtaaagtgaaagcaagtttattaggagagtagaggaataaaagaatggctgctccataggcagagcagccctgaggactgctggttgcccatttttatggttatttcttgatgacatgctaaacaaggggtggattattcatggctcccctttttagaccatatagggtaacttcctgacattgccatggtatttgtaaactgtcatggtgctggtgggagtgtagcagtgaggaggaccagaggtcactctcatcgccatcttggtttggtgggtttcagccggcttctttaccgcaaactgttttaccagcaaggtctttatgacatgtatcttgtgctggtttccggtttcatcctgtgacttagaatgccttaaccatctgggaatgcagcccagtgggtctcagccttattttacccagctcccattcaagatggagttgctgtggttcaaacggctctgacacttgggatgctcctactgggagccagggcctgtgccagtctggacccatcacaatagcctgaaagtgattaaggctcaagcggaggacgggtgggctctaggggcctgatgtaggaatctcaggctgggaggagaattctttagcctgcagagaggtggagcctgcggagaaggcttggtttctcctgccaccactttcaccctgccggattcctgctctctgagataatggcttttccatggcatctgagtgcatggcattcagctgagaggttcaccttttcccctggcacgagatggagaagataggatctgctagaattcctttcagagtggaattctgtttggaacgaattaccttgacttcgccctgttggggtggaactgtgagattctcagagggtgtgtgtgttgttctgtgtgagaaggattggaggtgggtggtagggaagaattcacttataggccatatggaaaagtctgtctgacactacaaggaaacagaagcggaaaaggaggagggtgagggtagagtgaggaaggtggagaaatgacaggctgtacaatgtgaccctgccttgcaaaatgcctctatatttttagcataatctgcacacgttccaggaatgggggtgagagtgcttgcatttgggaagcagtgcaggcgctgagttctggttaactgagttctacaaatggtctggggccataggatggattcagagagaaagtataagagtattaaggcagagggtctgagagatggcaggagggctctggaccattgcaggctgtgcaactggggctggccaagttcacccagtcctctgaggggtgggacccaggggacatcagggttccactctcccacttaagacagggtgttaatacttggaaggtcctaattctgtgctccaccccttgaaaggagaattttagaactttcttttcttttctttctttctttcctttcttttctttctttccttgtttctttctttctttcttttctctctctctctctctccctccctccctccctctctctctctctctctccttctctctttctctctttctttcttgcaggatctcactctgtcgcccaggctgcagtgcagtggcttgatcacggctcactgcagcctggaccttcccaagctctagtgatcctcctacctcagcttccccaatagctgggactacaggtatgcaccatcacacccagctactttttgtagagagggggtttccccatgttgcccaggctggtctcgaactcctgggctcaagcaatctgcccatcttggcctcccaaagtgctgggattacaagcatgagctactgtgcctggcccaaacccatgtttcttactggtgggtaggacagtgaaccaccagtcttcagaattacacagttgaaaattcagagagacaaacacacaagggaagaacttttagaccacaatggctgccaaatgcctcatttttttgtccagagagaaaaataaaaatgttttaaaagacccattggccaccctgccaacctttcctccctggaggcttggattccagattccaggaagcatgtcaccgcctatttgtagtgctttgctgaaggatgcaaaattggctcgttcggacggcttccaattctaagtcttttttttttttttttttgagatggagtcttgctctgtcacctaggccggagtgcagtggcatgatctttgctcactgcagcctctgcctcccgggttcaagtgattctcctgcctcagcctcccaagtagccggtattacaggcatgtgccgcaacacccagctaatttttgtatttttagtagagaaggggttttgccatgttggccaggctggtctcgaactcctgacctcaagtgatccgcccacctcagcctcccaaagtgctgagattacaggtttgcacccggtcatccaattgtaagtcttaaacaagagtaacgattgaccacagcaaaaaagcaggcagattcaagccatagataagctccagaaagaagtgggcttcaagagttgcttctgatgctaatttttggaataaaaaaaaatcataaacatctctgtatttggagcggggatttggaggtatgtctgattcgggctatccctgatgtaagcgctaatgtttccaaccgtgagagttttcacctttctctgcctaacgttccttacaatttgcatttgatcctcagcaggtggggttggcaaggcttgggacacacagccagcctctctgttgcctcctcggcacacatagggggttgtagcagcgcctgaggcttgatcaaagagaatcaaagtcacatcccacttctgaggcatccttaatcaggctatgacacagaacagatgggtaaacctttagagtccttcatttgcatttatttgcacttcattgtataacatgttcttattccaaatccctcctttctttccttcaaatctgttttgagcacttgctaaataccaggcactgtgctatctcattgcatcctcccaacagcctgttttatggctatcagtaataagaactagtggacttttttttttcttctgcatttatacgatgccaggcacagtgctaagtattttatgggcaacattatctcttgtaatcatcactattaatttaatgtgatccagtagaggtccacaatcccttatctgaaaccctggggccagatgtgttggaattcagaattttttggacatggattatgtatcatatataacattcctggtgcagcagcaccacataataaaatacatcaatatttatgcatagaaatgtttaaacagcctcactcagtgggataaagattataaatggcctcatgtcagttagggccttgatgccaattgaattacaaaaaggtgttgggttttcagagctttctggagttgttgatgagggccactgctcagggttacccagcttcatttgtcaaagttgagactcacatccccacatcactccaaagcctgtggctaccaccatccccacttctctggaagtgaggacatcggcacagagaggtggccacagccttaggtttttgcacccgaaactaagacttttccagcactcaatgctggtgcttcggatgcagactctagtgacttttctcagcagtgggggatgagttgcctgcagccatctgccttttctgactttgccacgggtctggggctgtatgtgctggctcatatggtatttagagggaagaggcctgagactatctttacccagcaaactcgtcatctcagggtctgtggaatactgcccatcacagttgtgtggaaagctggaagttgggttataacattgaattcagcccagcttttttgtttccaaacagagctcactttctgaagatcccactctttctcttctttaactggatttcataataaagggtttgtaagatatgagatctgagtctggaatcatctaagaaatctctttgaaaagaattggaaaatgacctgtgtccagagaacaaatttaagtatcattcttatttgatttcattcactcagcaaacattaatggagtgcctcgtgtactctatgtgaggcactggggattcagggttgaataaaacacacctcctgcactcaggaagctcacagactaactgataccggaggcagagccacctccaaaaacaacatgtacagcaacgtgaatagacagggggagcccaagaagagaagggggactcagctgctgggtgggcaggggtgggatgtggtttcacaaagcaatgacatttggtgtgtggctggccactgtctcctcttagcttccagaggtccacagtcttggttttcttcctccctcccgggtttcttctcaatcctacttcaaaatgttgacattttcaggcttcagcccagggccggcttctttccttttcctctctctacattctctcacaaggtaaccttgtaaccgcccaaggggttcaccttgcccgctgcctagacagagctgatttatcaagacaggggaattgcaaaggagaaaagagtaattcacacagagcccgctatgcgggagactgaagttttattattactcaaatcagtctccctgaaaatcttatgacctccagaataatggctggtaatatttagaattccagcccctctcattctaacttggtggctggtggccttcattcattttacaagaacagtttagcttttgggaagggctattatttaaactataaactaaattccttcccaaggctaattaagcctacacccaggaatggatgacaggttagaggttaggagcaagatggaattggttaggtctgatgtctttcactgtcataatttatttagttataattttgcaaagacagttacagcctcattcatttccttcacattaactaccttccatatgtgaacaactcttccaactgcatgtctagcccatatctctgttgaacttcagacttgaatgtctgtttgcctcttgtcatctccatttaggagtgtgtagacacctcaaaattaacatattcaagtgggaactcatgattcttacccctcaaaccaattcctcttccatccaacacatctcagaaaattttacaattgtccacctgactgcttagacagaaaccttgtttctttcttctcccttgtccctgacacctacatgaccagccaaatcctatcaattctcttgccaaggtatattttgattaatctaccactttccatctctctacctactttttaacacaggccactgttatgtattcttttatgtgatggtcagtccagtgtgatcacaagaggagacacaggaaaagctcaggaaaaaacaatgtttattatgctcacgggtcccaaagacaggaggcatagcacaccatatgggaccacatgggaccacatgggaaagacacaagggtggtcaggagacagaagacaggcagcaaggggaagactgaggccagagcccttattgaggtttccatgggaaagacagtgcagggtgaacagtttaggatggactagtttgagtaatttcagagggctttaggctgtagggatggcccctagttgtcccgtacctggccctgatgggatgcttaaggccaagtcatattgcctcctggggtgtgcagggcaggtgaagatctacagctcaggattggttcatttgtatatcaaaggcatgcttctagctgagccctggctatctctaagaactggctagtcatagaagaggacattatctcctcagccagagaggtttttgaagatgtgaaaacatcataacatatagccaagaaaaaaacatgtatgcaatacagccaccccttcgttttggccatcagagtagtctgccacctcattctccacgctgctgtcagctctgatctaccctccacaccccagcacacaggcaggcatctctgcatgaagttaaatctggttattctctggcttccaaggtgcttgtggctccctttcctccctcccatgcctttcatcgtctatttgccctgtccgccatcctgttgccaactagcacccctccttggatccagccatgctgaggtgacagtatttttcttctttaatgctgtctgtttaaatacaagaagttttttcacctgtcagcctgttacatatgctgctcccaaaatagtctcattccttcttatggtgcttttcatccttttccatccctctttatcccttgggactcgactttacttttacctacacagtgagccttccctgatcacccacattaaagtacttcctggcctgttattcttcacacagcacccctgcttttttaagcagtttcacgcagcgatcagggaatatctatgcacctgctgtgtaccattttttttgcttgcctgtgagtgtgatgaggctacgctgggggtagctgggaagtggatggggcctagcttgtaaacccagggtcattttctcctctgagcaagggaatgtgttatcactataccaagggcatggaggttggggatggggtggctcctcacagtcacgagataaaaggtggggcgatcagacttgggaggcaactggagtccctgggaaccatgtacagctacttccattgtctcctacatccatggcagatagggatacctcccctctgagccccagtgtggccttagcacccttgccaatggaggcagcctcctctattaaccaaattggcatgatctgccactgcaggtctatgcaatttaaggtagaacagactcctcagctctagttagatcatcctaaatgtatccttttagaaagaattaggtgggcatgtaaattagttcaaccattgtggaagacagtgtggcgattcctcagggatctagaaccagaaataccagttgacttagcaatcctattactgggtatatacctaaaggattataaatcattctattataaagatacatgcacacatgtgtttattgcagcactattcactatagcaaagacttgaaatcaacccaaatgcccatcaatgatagactggataaagaaaatgtggcacatatacaccatagaatactatgcagccataaaaaaggatgagttcatgtcctttgctgggacatggatgaagctggaaaccatcattctcagcaaactaacacaggaacagaaaaccaaacaccgcatgttctcactcgtaagtgggaggtgaactatgagaacacctggacacagggaggggaacatcgcacaccggggcctgtcaggggatggggggctaggggagggatatcattaggagaaatacctaatgtagatgatgggttgctgggtgcaccaccatggcacgtgtatacctatgtaacaaacctgcacgttctgcacatgtatcccagaacttaaagtatagtagtaattttaaaaaagaacggggtaaaagcattttttaaaaactgcctcttgaagttcattgatttaatctgttctctttttttctcccctcttcttttttcctaggagaaaataatgaatgtcaaaggaaaagtaattctgtcaatgctggttgtctcaactgtgatcattgtgttttgggaatttatcaacaggtaattatgaaacatgatgaagtgatgtggatgaaaatactgctttgattctatcctactagtatcatccaagttgccaggctgaattgaaattaggattaactaaaaccataaataagggattccacccttcctgaattcctaagccctggactgtctttaaaatcattagctctcccaagtgacttctggctaactacttatcttccttcctgccttgttcctaatatcataatttttgtaacagtaggctagatccagagaaaatgagatcaaactaggcccaatgtaattttaaataacttggataatcaaatatggaaattaccttaagaaatttcagacaggaattccatgagaaatccaccctgaattttgaaatcctgaaatatttgcagagtttaaaggagcaacttaagttgttgaattttgctgcaaaatacatactgaattgctagtgattcatttgtgcctggctaaaatctttgagagagagagagagtgtgtgtgggtgtgtgtgtgtgtttaactttgaaaagcaaaatgaattaagcatttctaagttttcaaattcatctatggattcaccccaaatatatgagctacctctgtgccttttgaaactacaatgcctggccattccagctggagaggcttctgactgaagtcttcacaagcagccacagaaatgcctgatgcctttgactcaaaagactggaaaagctcagccttaaggttcaaaaaatctactgtacaattgagttgtacagagctattttggtaccattaatattttcatagcggagtgtttcagtggcccccaagttcaagatggtagcctggattaacattcgaatatctcttttgattcttttttttttttttttttgagacagagtctctctcttgtcacctaggctggaacacagtggcatgatctcgactcactgcaacatctgccttccaggttcaagcaattctcctgcctcagcctcctgagtagctgtgattacaggcgtgtattaccacgcccagctaatttttgtatttttagtggagacagggtttcaccatgttggccaggctggtcttgaactcctgacctcaaatgatccacctgcctcggcctcccaaagtgctgggattacaggcgtgagccaccatgcccggcctcttttgattcttaaattctaagatttgatgatctaggaggactgtcttggttactaaaaatggaaccgtgcctttaggtgcatcagtagcagaagaactctccgaatgctggagccattagtccctgtggtgctgcacagatgtaaccatttctggaatgttgctttgtttcattctgcacaactcattttaagaaaaacatgacaaactagagtgtgaccaagttaaaagggtctggaaactaggtcttttgaattgagaaaactgaggggatttagttcaaagaagagatgactcagagttttgtgtggggaccctggaactctcttaggcaactgagggctgaggacgtttcccactcagactctagagctaggctgctccttgggcaagttgctcagccactctgttcttgtttagtttccctatctttaaaaattggggataataggctgggcatggtggctcacacctgtaatcccaacactttgggaggccaaggaggacagattgcttgaacccaggagttcaagaccagccctggcaaaatcgcaagaccctgtctctacaaaagtaaaattaaaaagttagccaggcatggtggtgcgcacctgtagtctcagctacttacgacgctgaggtgggaggatcacttgagcctgagaggttgaggctgcagtgagctgtggtcctgccactgcactccagcctgggtgacagagtaaggcactgtctcaaaaaaaaagttgggggagggattataatagtacctgcctcatagggttgttgggagaattaaataagttattgtgtataaagcactgggaagcaatgcctagggcttaataaacaataaatgctagctgtcatcctcctcctcctcttcctcatcatcattttagttcaggccactataacaaagtaccacaaggtggtttaagcaacaggaatttaattctttcagttctagaggctggggagtccaagatccccagtgagggctcttcctggctggcagatggccacctcctccctgtatccacacgtgatggagagcaagtaagctactgcctcttcctcttcttgtaaggacactaattccttcatgggggtcctactcccacgacctcatctaaacctaattacgtcccaaaagccccacctccaaatatcatcgcactgagggcagggcctccacatacgaattttgaagagatacaacattcacttcgtaacagtcatcatcatcatgatctgctccagagggcagaacaagaaagattttggtaaatagaagagctctagcagttggaagagtccaacagaagaacaagtaccctttggggttcctgcctggagtcggaatgtctgcttggataaccttcaagctctgagtttgaacacttgatcagataactttggtgtttggaattgtagccagagttgtacgtgcataactgagccaaaggctgaaacgtgcatgtatataccagcctctctgggcacactctctctgcatggtagccagagcaggttctggctgctcttcaggctaatcgtctggcacctggactctggccacaacatcctctgatgtgcagaatccacttgaacatctgcaaaaaacttcaaggggaggagttgttttttgtttttttgtttttgtttgttttgtttttttgccactttacgaattggccacatgataggttgaggtgagccgaggacacaaaccttacacaggtaggcagcactaagctaaaatggattaaaaataactaactcaagcatgtcaaccaattagtaaatagaagaattgtcagtaaagcgtattgaaagaatatcatctaggatagcatttgatttcaggctggatgaaaaaataatcttcgaattttagagaattagaggaagccttcaaaattatgatgaaatattcatgatagtggtgatcatgatgggaactacaagttattgagggcatgtgccaggacccttgctatgcattacctccgattctttttgttttgttttgtttttgtttttgtttttgttttgagatggagtctcagtactttggaaggctgatgcaggcacatcacttgaggtcaggagttcgagatcagcctgaccaacgtggtgaaaccccgtctctactaaaaatacaaaaattagccaggcatggtggtgtgtgcctgtagccccagctactcaggaggcttaggcaggagaattgcttgaacccaggaggcagaggttgctgtgagccaagatcgtgccactgcactttagcctgggcaacagagcaagactccatctcaaaaaaaaaaaaaaaaaaaaaacctcaaggaggcaaaaattatgtttggcttggaggaggatccattgttctgcatccattcacaaatatttattgagtatccactatgtaccaggcactgtgctaggatcatatcaagcaaggcattgaaaaggtggcatttgagtggaggcttaaagcatgaatacatgtttaaaagccactgcaatgtggatattgctgtgaccattgtgctgttgaaggattctggagaggagggtaaggagaagggttgttgaggagatatgaaaagttggtgaacctgaatctataaatccatggcctgagtgccaggtagggttatgcgtgctaggctgcagcacttgtaggggcttaagagtctcactgccttcattagttaaagaaatgcttttgggggctgttctatagaaggctctgagttggccatggcattaggctctgcagttgatgctttttttttctggaggaagataaatcctgggggaaggatgtctgggccacggcatttccgtcctttcagggccttcgtcatcaccaggcacctgagtaggtggcaggagaggacccatctctgcaatggagagctgtcttctttttaaaagagcaaacaaacaaacaaaaacaaaacagaatttgaggccaggagtgatgactcacacctgtaatcccagcactttgggaggccaacgggggtggatctcttgactcaggagtttgagaccagcctgggcaacgtgacaaaaccccgtctctacaatacacacacacaaacacacaatttgagattttgcagaaaactgtttccccttgagatcctgaagtggaaatttccatcctcctgatgtcattggttatgtctcaaaggaaggtagaaaccaggaagcagctaaaacccaggctcttagctcagccccgggctcagtgataatggttacaaaatcgcctttctcagaattaaaagtaacatgatatgtttttatttcttttttgcttttagcacagaaggctctttcttgtggatatatcactcaaagtaagtgctttgaattctagatttctaggggatgtttcccacagccactctggcaccccctacagtccattcttcacacggcagccagccatggtgttcggccaaagtcggaggggtgggtgggtggattcctggggatctggaatgttatttctgcagcttccgtagacttatctgtatagaaccatggcttgtatcttgccctcagttctcctcaaagttctcttaagcagtgtcatttggggaacattcctgtcttgctgataaaaagtatccggggagatattgtctattattctgccctttaaatgttatataaagacccatataagaaattgctctaagaataaaaatcaggaaaaaaatttgagcctcttgagaaactagtgtgtatcattaaaattttctttttgtattttttgaaaagaaaatgagagccatgtaaacctttatatttccaatggttgggttggttgtcagaaagctcagaacaaagtattgcacttaactgcttgtacttaccccagccttcatttctgatatactttatcccctggtgtgaaatcccggcttttgtgcccacatgtcatgtgcccttggaaatttgctgaaatccacccagccagtatctcagctctgaaatgaaagtaaaggtgaaacttttctttgggatgactgaggtcatgtgaaaatatatacctgggtgacgaaatcaatgtatctctttctgttctctcttgtgttttttattcttgtgttgtttttctgtttattgtacctacgtattggaagccatctcaaacacttccaagagttaataggctttaaaacagatttcataatattatgcctgttcatgagttagctcaccaccgtatttgtccatcggactttcctctttccccatcctccagaaggcacccaccttttcttttctttcttttctttttatttttttttaattttctgagacggagtcttgctctgttgcccaggctggagtgcagtggtgccatcttggctcacggcaacctccttctcctgggttcaagcaatcctcccgcctcagcctcttgagtagctgggattataggcacctgccaccacgcccggctaattttttgtgtttttggtagagatggggtttcactgtgttggccaggctggtcttgaacgcctgacctcaggtgaccagctggcctttgcctcccaaagtattgggattacaggcgtgagccaccgtgcccgaccccccaccttgaagagactttcacaatgaatgagtgtggaaactttctcaaatgggtggctacagtggcttctaagtagtttcctgaacttcttgctcagtgaccctcagatttcctgaggctgttactgctaacctttgggcaacccaaatttttctctagacttttacaacaatctgaattctgctggttttagctaaagaaacatggaaacatgcatcggtttttcatgaagcgtataacttgttacagtcattttcaactcataaagctcttatatgtatgctatttcattcagtcttcaaaattaccttcatggtaggtctgttattagtactattaactatactttttggaggagaaagtcaaaattcagagagggaaaatgtcctatcacagtcacacagctagtaagtggcagatctagaactcaggtttatgcattaataccacccccactccagcccccttttcccttctcttcctctagggcccccaggatgagctgagggctgggggctacccaagggaggagagattgagggagtctcaggtctgttctctctcattcagctagagtgtctcatttctgtctgttttataaattggcattttaaggttttttatttttttaaagtaatctcggctatagaaagaatttggaaaccctaagtttggggacaccacattttctaaaaatatttgtaaactttttcatttcttagaaacccagaagttgatgacagcagtgctcagaagggctggtggtttctgagctggtttaacaatgggtaaggcgatcagacagcagtcggtgtttgcccacccgcctggtgcttgcagagggtccacacacaatggtttcatgttcatgaccttctcagtcactcatctttcttgcttattgaaattatatgaagaatattttgtgagtgggactaggacatttgagggttggttttgtttttgagacagggtctcactgtcactcaggctggagtgcagtggtgcaaacatagctcactgcagcttcaaactcttgggctcaagtgatcctcctgcctcagcctcacgagtagctagactacagacatgcactaccacatccagataaataagtcttttgttttgttttgtttcagttaacttgggggctgaggcttgggctgaagtttatttatttatttttatttttttgagatgcagttttgctcttattgcccaggctggagtgcagtggcgtggtctcggctcactacaacctccacctccttggttcaagtgatcctcctgcctcagcctcccaagtagctgggattacaggcgcccgccaccacactcggctaatttttgtatttttagtagagacagggtttcaccacgttggccaggctggtctctaactcctgacaggtgatctgcccaccttggcctcccaaattgctgagattataggcgtgatccaccatgcctggcctgggctaaagtttagattgcaggaaagacaatcataaactaaaatgttcttagaagaattgtcttatcaagtttccctcaccccccctgaaataacctgagggttgctgggtcattaaattgttaactgtggtgacttggaagggtaatgagttgagtactgcatcttttcatcaaaaatatgtctttatgaataaacgcttagtgcctagagcctttttctggtcagttcacttagtgcatgcataatctgccttggaacacatttccacaagatattcaccagttctctgaccaccgcaatcaccttccctgccttacctggtttactttccctttgtacttaggatccacaattatcaacaaggggaagaagacatagacaaagaaaaaggaagagaggagaccaaaggaaggaaaatgacacaacagagcttcggctatgggactggtttaatccaaagtaagaaaagcggcgtcactccctgtgcagcaaatccatggccctgcagggggtggtgtggcagtggaggcaacagtgccattgagaacattcctgatttaggagaaagagccttagcatattagacctttaacagtagacatatgtatatgtgcatctatttgattgtgatgtaaagtatatttctcactgtgagttatggtcaaaaacactgtgctaggcattgtgttagggagaggagacaggagaaatcaatcaacatggttgtatttgagaagttcatggtctcacaggggtcgttactgtgaaactattatttgcctagattggtaggaggcaggatcaactggaaggatgtggttctgggagtgaggagatgggagctgtccagggtgactttgagacctgagagactggtgggtgatggtgccattggccagaaaggggactggaggaggagacacaggcctcagagctgggggaggtggggacctccattaggaatgcatgtggatgcaggtgcttatgggacatctggacagagtcacagggtgctcctgagcttagcagatggtatgtgctggagatgtgcaatgaggtatcatcagagtaatcaggagagaatggaatccttttttttcatttgatttttaatttttattcattttgagacaggatcttgctctgtcacccaggctggagcgcagtggtgcaatcgtggctcactgcagccttgacctcccaggcttagcctcctgagtaaggaggcttggtgtgcgccaccacggccagctaatttttaattcttttgtagagacagggtcttactatgttgtccaggttgctcttgaactcctgggcttaagtgatcctcccaccttggcctcccaaagtgctgggattacaggtgtgagccaccatgcccagcctgaaaatagcatctatcccattgtgaaggagcttgggctctggaaagactgaatatgttctggcaacttctcttattgtttggggataagggatccatgccagtgtggagggatgggaattttggcttcccatatgtcatttgatgatctgcacaacagggtaggcatctctgaaatgctaaaccactcatagaaatgtgagaagatggaagcattgttgctttgataaagccccttagatggggcaatgagactccgccagggacaggctagatgggccagagatggtccccaaagtcccttctaaggagaatggggcaattttactgtggtacttgttctttgctgagcaggacttgggaggtggggctggggctgaatgactgggggcagagaggagggacagaccatagtcaccagctttcaccctcttcactcttccccttgcatggcttcatctccaaatgagtagggagcagatatttatttttaatttatcttatcttatcctttatttatttatttatttatttatttatttatttatttgagacagggtctcattctgccaccaggctggagggcagtggcacaatcatggctcactgtagcctccacctcccaggctcaagtgatcctcccgcctcagcctcccaagcagctgggactacaggcatgcgccaccacgcctggctaatttttgtattttttgtagaaacggggtcttgccatgttgcccaggctggtcttgaactcctggtttcaagtgatcccctgcctcggcctcccaaagtgctaggattacaggcatgagccactgcttctggacacaagcagattatttaaagaatgttggtttgaagtggcaccaaatttaagtcttctcagggcatctaagtctatttcttgcataaatgaatgattggatgaaggaatggatgagcaaataaacatactttgtataaatgtatcctttttggctcacgcctgtaatcctagcactttgggaggccgagacaggtggattgcctgagctcaggagttcaagaacagcctgggcaacatggtgaaaccccgtctctactgcaaaacaaaaaatcagctgggagtggttgtgggtgcctgtaatctcagctactcaggaggctgaggtatgagaattgcttgaacccaggaggcagaggttgcagtgagccaagatcatgccactgcactccagcctgggcaacaaagcgaaactctgtctcaaaaaaaaaaaaaaaagtatccttttctgtaaactacctaaaaccacagtatattgtgcatatttccatatcaaggtcgctttgcttccatgacaccacatcctcatttgtgaccgtctcccgagaggggcagctccctcttcccagctgtcagggattagagtttatgggagctaagtccagcaacctcttctctgttctttatatactgttttttttttttttttaagatggattctcgctttgttgcccaggctggagtgcagtggcgcaatctcggctcactgcaagctctgcctcccgggttcatgccattctcctgcctcagcctcccgagtagctgggactacaggcgcccgccactgcacccggctaatttttttgtatttttattagagacggggtttcatcgtgttagccagggtggtctcaatctcctgacctggtgatccacctgcctcagcctcccaaagtgctgggattacgggcgtgagccaccacgcccggcttatacaccattttccaatgtgctctcatccattttcatggcattaggtaccattagtgagattagataccatcctacatttaaatctttagcccagattttgcctttgagctgtgacttgtgtctacctgtctgcctgacatctctgcatgtctcacatggccagaatggatttctcaattccaccccacccttgttctcctcatttcccatcccagtaaatggctcaagacacacagtctgggagaccttttcctctgtctacctcatggtctaatgcattagcatgttctgtcaattcctcctccgaaatcctttctacttcatccccttctctccactcgacagccgctatgccatccctgttcatgttgccatcagcttttctctgtgtccttgtttagccaacctactcctgcttagagggaattcagtcaataatgagttgtgttggacgcagtggctcatgcctgtaattccagcactttgggaggctgaggcaggaggattgcttgtgtccagaagttcaagactagcctgggcaacttagtgaaaccctgtctcttcaaaaaaataaaaaattagctagatgcagtggcgcatgtctgtagtcccagctactcaggaggctaaggtgggaggatcacctatattccacatctttttttaacctactccatgattcatagaattttaatgcttccggctgggcatggtagctcacgcctgtaatcccagcactttgggaggccaaggtgggtggatcacctgaggtcgggagttcgagaccagcctgaccaacgtgccaaacccagtctttactaaaaatacaaaattagccaggtgtggtgacccatgcctgtaatcccagctactcaggaggctgaggcaggagaatcacttgaacccaggaggcagaggttgcagtaagccaagatctcaccattgcactccagctgggcaacaagagccaaactccgtctgaaaaaaaaaaagaattttaactcttcttctacccaccccttgggtaccaaaatgtgccataaataaatatataaaatttaaaagctgccaataacctaggaaggtgtgtgctttggttagggggcccttttattttgggggaagcttttgtggaacttctcacactggcatcacaccattgcatgtcctacgtggaaggaaagcatctgagcagctctttcctggcactttttcctttctttttagtgccccatctttgtgatcttggacttctctggcagttgacattatcaaagactagcttttcacatgtgtgagctgccctccgtcacttcttttttggggggttttgtgggttttgatgactaagactccttgatgcagcggttcatccaggaagctgatcttgatctcattctccctccgcccccatctccccagctgcctgcattttcaggctgttgtgtggctttgtagtcagggtcactgacctgttggaattgtcagtggaatcaaataattaacagctgggaaatagaatattttaatttttaattcaacataaatttttaatgttgctattttttcttccagcttgaaggaatccgaataactaaactggactctggttttctgactcagtccttctagaagacctggactgagagatcatgcggttaaggagtgtgtaacaggcggaccacctgttgggactgcgagattctcaaggggaaggactgggtctcatttctcccatctcagcgcttagcaggatgacctggtatagagcagggaactgggaaatgtgggtcaggggatcagacactccagttgggtcttttatataaattaaatggcaaaaggctccatacccttctccttctttcctaccctccactttatctgcaaaatgggaatgatgataacacccacttcatagaatggtcatgaagatcaaatgagagaataaaagtcaagcacttagcctctggtgcacaataagtattaaataagtatacctattcctccttttccttttttaaaaataatattaccaaatgtccagcttatacacatttacaagacttagctagtgggctatgttagagctactaaaagatctttgacaagctaaaactaagatgcaatgaatgaggtgtaacgaacaagagagttttaagttcagaaatggttacagaagtataagacagctgtgtgggtgttttttggtttttggtttctggtttacaatctcgtcattcaacaaagatgggagttttatagaactaaaagcaccatgtaagctactaaaaacaacaacaaaaaaggctcatcatttctcagtctgaattgacaaaaatgccaatgcaaataaaaatgattactttttattttatattgtttgtttatttatttatttcgagatggagtttcactcttgttgccctggctggagtgcagtggcgcgatcttggctcactgcaacctccgcctcctgggttcaagcaattctcctgcctcagcctcccaagtagctgggattacaggtgtgcaccaccacgcctggctaattttgtatttttttagtagagacagggtttcaccatgttggctaggctggtcttgaactcctgatctcaaatgatccacccgccttggcctcctaaaatgctgggattgcaggcatgagccaccgcgcccggcttattttttaagtggaaatagggttacctttagatctggacaaacctgggttttaaccccaacttcatcagcagaggaatgaaaaggcatataagaaatagtgtacgtggtagctcagctcagagcatggactccagagtcagcagatcttgtttaaatcccagctttaacccctaccagctgtgcaacctcaggcaagttgtttgacttatctgtgctagtttcttcattgataaaatgggaatcaaaatagcacctacctcagaagggtgagtgagccctttgcacagtgcgtggtcccaaaggaattgctcagtgtgtgttagcttgcatcattagtgaccaggtgtttggccttggacaagataataagctgctctgagacttggttttcttacctggaccatggacatgatacattgcagggctgttgcagagactaaatgagaaagtgtacgtggtgggtgcctggcacaggttggtgcagagtgcacagtagcttctttcatgattgaaggaaaccaagggcaactgtgtcctccatgcagcaggcgtacctggggtgctgagggcagagctaagtcttagagtttgagactccagacaagatgtggtgaaccaggagagcaccctgaaagtgtttcccctgtctgccatctggacaaacctggagcaatttcagcattgggggtgaaatgtaggaagcaggccagttccagctgtggtggaatctgggaagcagaccagatgtcatgcctgcggctggggtgggagggcagagtcagctcaagaactacagggtgcagcgtttggggacaagggacgggaggcccgagaggagagtctactgaggccccttttccactctgaggctgggatgaggcaggggatgacccagctgtactatcagcctcgctgtgggaaaaacccaactttgctgatgggtagggcggttctgtgaaaacccaggcctccactggccatgctggcccgacgtatttgctaacgtctccttgacagcctcaccaggaccacggcagtgcagccagtagggatcaccaggactttgccccaatcacttgccttcctggggttgaactaagatgctgcccacagtgaatccagtaaagtacaagcaaatgccaagcagggtgccaggcccatactggggtttgaatctaaatgacctgtgccagtctctgcttcccaacggggaaaatgcagccacctcctgagccaatagggagtcagagcctccccctgcctggagctttcaccctcatgctggggcccctgcggctctgtgctttctgcatttacccttcaggacttcagggttttgtgctttgttatagcttcctgttttgctttggccttgccaagtcccattccagctctctgagcacagcacagagccctccctctcaccccttttgtgttcctagtaaagatgctcctggtctaaggagaaggtccttgccagagccctaggctccagtcttggccttgctgggcctccatcaaatgccttcctttctggcgcctttgtctcctggtttgtaaagtaagcagtaacatcagaatccctttaatctggggccctttttgtccaatgaccaggttcccacccagatatctcttctagcaaaaggcaaatggaaacagctttttctctttctaatctaatgtcactctctcatccgcctttatcaaggcttaggatctccttaggctcagatgacatccacagggataaataacacccaaaggtgctactagtagcttaggaaggggctgggaaagtagggaaagggatttagaagtaggaagagaaaaaataaagtagaagaggtaagaaggtatgagatgtagagataagagcctcataagggccccccaaaatagccctgagagggctaggcccagtggctcacgcctgtaatcctggcactttggtaggctgaagctggcggatcacctgaggtcaggagttcaagagcagcctggccaacatggtgaaaccccatctctactaaaattacaaaaattagccaggagtggtggggcacgcttataatcccagctacttgagaggctgaggcaggaggatcacttgaacctgggaggcagagactacagtgagccaagatcctgccactgcactccagcctgggtgacagagcgagatctgtcttaaaaaaaaataaaaaataaaaataaaaaaaaaagatagccctcagaggcacctgagccaaagcctcatcttccttacccagaagatgctacccctgcaaatggcatacctcccagccaagtgtttggcgttaagctacagtcaggattcaaggacagtccctgcagatcatagctgaccccccttatccttggacagtctctgccccacaatggcaaagctgccctgactcagggaactctacgttttatcaccaggaaacacccagaggttgtgacagtgaccagatggaaggcgccggttgtgtgggaaggcactttcaacaaagccatcctaggaaattattatgccaaacagaaaattaccgtgcggttgatggtttttgctattggaaggtagatgtcactgataaaactgtccttgactgtctcttgttccactgtcaaaacatttgtgtggagactcctgaactgatggaagccagtcatgattttttgatttattagataggagaatgttttcatggaactggttcagtctcctttctgctgaggccctaaaatgctgagaacaaaataatagtaggtaagtccactcattcctacctcaaaatgagggacttgggttgcaggaaaacatgtctgttccacccaccaagcccagggtcaacagcatacccacaaccacctcctccctgaccaccatggcttcctttagaaattccacaagtgctagctgctagacagcccagagtgcatcattctttttcctatgctctacggcccaggaccaactacagagagatttatagcaagttctaggtgctgagtgacctaagcacagtggctttccacactggaacacagctgaccactcttccatgggttcctcagatcacttctactttttctctcatggaggatttggccctagaagatttgctggtcagagcttgctcttccaaaggttggataggttccagtttcaactcccttgttcagaacatatgacgcagaaaaactacgatcattcttacttgaaagttctagctctaggccaggtgcggtggctcacatctgtaatcccagcactttgggaggccgaggtgggtggatcacgaggtcaggagatcgagaccatcctagctaacacagtgaaaccccgtctctatgaaaaatacaaaaaattagctgggcgtggtggcacatgcctgtagtctcagctacttgggaggctgaggcaggagaatctcttgaacctgggaggcggaggttgcagtgagctgagatcacgcccctgggtgacagagcagactctgtctcaaaacaaaaagaagaaaagaaaagaaagaaagttctagctctaatgttagttattaaagataatccattttgctttttttggagaattttcctttttttttcaaaataaaactaaaagtccaattttcctatttttttttctgccctctgggcctttccctctatatctcttctgaagaagcttcatggaaagtcgattcctttgccttgtataaagagacttgaaggctcaggttgatctgagctttgccaaggtggggcttaaaagagagctctgtaaagatctgatagttctccaaagataaccttccccaacccagagcccagcagctattactgttccgtcattaacaataccaatcaagttctaatgtcactgaatgtgctgatcctagggacctatgtggtctctctaacagagaaaggtgactgtggagttttgacatgtttaccagaagaatctctactcatataggttgggagccacctaattagattaggtgaaccacccagctcacctaatcctttggcacaaaaggggataacccagccacgttgcagattgatttgatcctggtgtttccaaaaagaacaaaacgttgcccaatgccccacaatggcttcagccatccagttccaactctgcacaactaaactgtaaattgcacatcctggtgaaagcattctgccctcagctctgagacaagggaggactgtttgtactcagcagcaataaatctttacaagtggatttggacttttaggaggtgtaatgtttggtttgttttcaagcaacaatgcatggagccaactgcagtgctttaatctctaaacaatgtgaaacctcaaaatgaatctctcctgtactaaaccacccccccgccaccccaccccagtattgtttcccaagcttcagggcacaatagatttttctcgaagtcccagaatactgaaggatttcctggccactagccacagagccacactgaagtccctttttatattcctcagatatattctcttcatttaaagaatcaatactataaacccttggattaccacatgccaacattaaaagcacactttattttggtaacaaataaagggaatccaagcagcaacaaaaagcgaaaagaagtgccattcactttactcacaaaacaccatgattggccagtagtgtgatcagcacattaaattcagtccacgtgtgtttagggtttggtcaagttgtattaagccaactggcttattcttcctcttcctggtaatctccatagcatagcttcacaaatagtctatagcttaggcttacagaagacaccaataaaatgtttttcttttcttcttcttcttcttttttttttttttttttttgagatggagtcttgctctgtcacccaggctggagtgcagtggcaccatctcagctcactgcaacttctgcctcccaggttccggcaattctcctgccttagcctcccaagcagctgggactacaagtgtaagccaccacacccagctaatttttgtatttttagtagagatggggtttcatcatattggccaggctggtctcaaactcctgaccttgtgatccacccgcctcggcctcccaaagtgctgggattacaggcgtgagccaccgtgcccggcaatgggagacggcgtgcaatgcttttcaaatgaatagatgaatagttaaaataccactaaatacctactagaatggccaaaattcaaaacactgacaacaccaaatgctgacaaggatgtggagcaacaggaacacttattcattgctggtaggaatgcaaaatggtacagccactttggaagacaatttggcagtttcttacaaaactaaatatattcttaccacacgatccagcaatcgtactccttggtattcacccaaatgagttaaaaacttatgtctacaaaaaaacctgcacatggatatttacagaagctttatttcataattgccaaaacttgagagcaaccacaatgtcctttggtaggtgaatagaaaaatgaactaagtcacattcagacaatggactattattccatgctaaaaataaatgagctatcaagtcatgaaaagatatgttactaagtaaaagaagccacactgaaaaggctacatgctgtgtgcttatatgacattctggaaaaggtaaaactatggagacagtaaaaaggtcagtgattgttcagggttgttcagggaggcagggattaatgagcaaagctcagagaatttttagggcagtgatgctattttgtatgatactataatggtggatacatgtcattatacttttgttaaacccttagaatgtaccacaccaagagtgaaccctaatgtaaactatggatgttgggtgatagtgatatgtcagtgtagcttcatcgattgtaacaaatgtatcactctggtgcagggatgttgatagtggaggggtggggctgtgcaaatgtgggagcaggaggtatatgagaactctgtacttttggcgcaatttttctgtgaacataaaacttctctaaaaaaatagtccttatttttccttttttaaatttcttttaatttttttatcttctcttttcatctacatttactcagccaccgaatgtggcttactgctaacatagtcctttttttaagataaagtagttaaaataaggttaaatcagaagttgctcattctagtattcggatggactagtattttggatgatggtgtgtggacaatggattggtgttttaagtgactagtgggaggctcataggatgactatgtaacatgaaggcagatctagatctcataactcattctctgtatcacagaggacaagagagtgctgctgtttgggcttaatgcatccccagtggatccaagggtcacatcacccttgtatctggtctggcagtagcaacattggggtttatgttagggcttttgaatggagatcaagaactagtaccccctttgactgtccaaaatctgaaccaattggtaaattggacaaaggggtaaggaaggcagagggtggtaaatattactttcattatagttaaagctgatattggagaatgtggcttatatctgcaaaccctgggcctcctaaatatgtaacccccagagttagaaagacttaagcatccaggcacctacaggcctctggatgtgagaatagatcctgtactaagcttcctgtaaaacccagagcagttgagaacacatgctctcttggactggctggctcctaagagccagaggagaggaaggatagggtagtgcatatctagttctagttgctcttccaaaattggcagtgagataagtcattccagctccccacggactgagtgactgaatggtggagagtagccggggtattacactaacatgaaaacacacctggggtaggagaaatcattctcctactaaccataaaatatagacaagatgattttacatcacgtggtttctttcaggaatcccagcatgtggtttctttcaggaaacccacatgtgggttttttcagcttgtggtttctttcaggaatcccagaggataaatgttttgcttttcttctttgtttcagatataatgatcattacttggaggagttcataacatctgctaataggtacttcatggttggccacaaagtcatattttacatcatggtggatgatgtctccaagctgccgtttatagagctgggtcctctgcattccttcaaaatgtttgaggtcaagccagagaagaggtggcaagacatcagcatgatgcgtatgaagatcactggggagcacatcttggcccacatccaacacgaggtcgacttcctcttctgcatggatgtggaccaggtcttccaagaccattttggggtggagaccctaggccagtcagtggctcagctacaggctggcggtacaaggcagatccctatgactttacctaggagaggtggaaagagtcagcaggatacattccatttggccaggggatttttattaccatgcagccatttctggaggaacacccattcaggttctcaacatcacccaggagtgctttaagggaatcctcctggacaagaaaaatgacatagaagccaagtggcatgatgaaagccacctaaacaagtatttccttctcaataaaccctctaaaatcttatccctaaaatactgctgggattatcatataggcctgccttcagatattaaaactgtcaagtgatcgtggcagacaaaagagtataatttggttagaaataatgtctgacttcaaattgtgccagtagatttctgaatttaagagagaaatattctggctacttcctcagaaaagtaacacttaattttaacttcaaaaaatactaatgaaacaccaacagggcaaaaacataccattcctccttgtaacttggggctttgtaatgtggaagaatgaatctagggcaatcagatataaattcccagtgatttcttatctattctgggtttgggggaaatactatcaactgaaccaaaaataacttgtcataggcagagataaagccagaaacactctacacatgccagatgacatctggagaaaagggtgctaagggaagcgtttggcagcaagatatgattgtaaggggttgtcccttgagttcaatgtctgcctatttctgatgggtctaaagcaacatggagttactgtgcagcagaactctcagtaaagacaccatttgccttggcaatcctcaaaaagcttcaatagcagattgcttcagaccatctgtagtccgtccttttctcatctggatgttgtttggcttctgtgcgaaagattggtggagtgtcccagtagatatcatggtggtgtgtgatcagagtcccaaggaacctgaatgagccaaggtgcccagcatgaagtcaaaacaaagccttgacatgagtttgccatgaaatagcgaagagagagtggaagagaggagccaatcactgtggggcagtgccaccctgagggcacttagggtatggggttggtgcttaaatacatcacagatccaggtactgaatgggaggaagtgtgggtgatttccaatctcattgaccctatgttcagggacttgaacggaagatgtttcttgtgttgcctaagtggtattcagtctaccagactctgcaacttgcatcttcaaatccttggtaaagagatgtggatggtgtcagagaaggcaaaggcctgcagtggattgaagaggcttgcaagcagttctgtttctaggatgtgggcttcatcagaagacactcggtcaccacttagctagtctaaacctcagggttcctcagcccatcataccccaacttggaggactgacatcaaggagtagactggagaaacagccctcccatcaagtaacctcttgttctctcctgctccatctgcactatagaagtgtaataattagacatacttggcaaaatggctaattgatttggtaacagaagcatgagccataacaatggaagatctagttatcatgactgaacagcttaacattcaattcccttctctaagagaagctgtgaaatcctacatattatttaaagttaaccaaatcaatgtaaagggagttaggagacagtgtgtacctatgcacgtatatttatgttttgcttgtgttccagtctcggtcatttgtttccattttcaagcaatttatttgaagagccattgcactagcctgatgtatactgcaatgagcttctttgataaaatgaaacttagatttttctcgaccatttcaccgtgcctcctacttcattttttgccagaaaatctcacatccaacaaaacaaaacaaaaaccctgaattagtgggctttgaaaaggaaaaagcagggctttgaaaaagtagatcacacatcagttaagactcctgcttctctattagtcaggttgtcttggattcagtctggagtaggcagagcttaagggtttttaagtcctgacccaaagaaatgatctagcctgaaagtttagagcaaaggactaatgtttacttttaaaggaatttcttgatttttttaaaaaacttcattaaagtttaaatccccaatggacaaattcataatcttgttaatcgttattactaaactttttaaaaaatgtcccaatttacaattaaataaattactttctcagtatattctggtctggtcatggattgtgcatttcctcccaaagatattcaaaattgtcaattagagaattttaggttttcagactcagaaaagtcctcacgcccttctgaaaatgtgtccactattacagaaatagaacagacttgggattcccaaatttttgtttgtttttgagacagagtctcactctgtcacccatgctggagttcagtggtgtgatcatggttcactgcagccccgacctcctgggctcaagtgatcctctcacctcagcctcctgaatagctgggactacaggcaccaccacgccccactaattaagaaaaaaacgtttttatagaaatgtggtctcactatgttgcctaggctggtctcaaactcctgggcttaagtgatcctcctgccttggcctcccaaaacgctgggattacaggcgtgagccaccatgcccgtccaagggattccccaacttttaagcaacaaatacttatatagagctttccacagcaatgcgctgaaataatgaactgccagtgaaagaatcattagggaaaggcttgcccctgaagctcagggtggggcatcagggcagaggaagaaaacaatgccatcaccatatctggggattattagtcctgacctctggggaatatatctggtcaagtgggaaagtctggatttccagcaggtgtacttatactaaaaaatttaaagatgaccaggctaatttagtgagatgcactgaatatgcaacagggcatgattacctcatagtggagaattagtctcatttcataaaagaggaagatgaggtccagaaagcttttagactcgggaaagtcctcatgcccttctgaaaatgtgtccactattacaaaaatagaacagacttgggattcccaaatttttgtttgtttttgagacagggtctcactctgtcgcccacgccggagtgtggtggtgtaattatggctcatgtggccgcaacctcgaactcggctcaagtggtaagtggtaggtgactgatgtgggcttcatcagaggacagtcggtcatcagctggtcccactgcttagctagtgtaaacctcagcgttcctcagcccatcataccccaacttggagggttgacatcaaggagtagactggagaaatagctctcccatcaagtaactttttgtaagtggtaagtgactgaactgaggctcaaagcagggaaactcacaggacagatgtgttgacagtgcattcagagggccatgtttcatatcatggaaagcacaactatatatcttcccaggcctctaccatctcccactttttatgcatgaaacctgccccaaatgcattaagtaagtttaaaagcaccatgttaaaaaaaatcggttaggcacggtggcttaacccccataatcccaacacattgggaggccaaggcaggtggatcatttgactccaggagtttgagatcagccttggcaacagggcgaaaccccgtctctataaaaaatacaaaaattagccaggtgtggtggtgtgtgcctgtagtcttagctactcaggaggttgaagtgggaagatcacttgaacccaggaggtggaggttacgtgagccgagatcgtgccactgcactccagcctgggcaacagagaccctgtttcaaaaaataaaacattgttatcattcttatctttacattgtgcatggagggctgatgtaagcaccatggccgtgcactgagcggttatatcagggcggggcttcaggaggtgtgatcaggcagaggagtaggtggaaggaacaaaccatacttgctccttccactccacctcaaatctgggaaccacattcagccaaaaggggaaaaatgtgttcaaggcctgaaggatttctctttgtccctctttgctctctcttagccaaagccaccactatcaggaacctcaactatggcagtacttacaagcacttattttaatgtactgtttgttaaatgtgcctaacataaacaaataacactggcatgattgcatattaacaagcgtgaaaagtcatagaaagtgaatgtgtaacacactatacataccttttaaggaaagaaaagagtcaagtagggatccactggtgaatgtctgagatctgaaagagtgctgatccaggatttaaacccaggactgtctgcctatagattatcttactataaatcctgtgctctttccacagctccacacttctttctcacactgttttacacacacacacacacacacacacactttaaccatcttattgttgaaattggagataccaaagaaatcaacatcaatgctctcaatgcttttgttaggcattaaagagaggggatttaggagaccccaaactctttaaaggcaaaatgtaagtctaaaattggagaaagaggaacatgaaacctgaccaggtatgaggcataggtagtaccagggctaagggagtatgaaagaaggatggctcagggaggtggaagaagcctcagataatctgactctgaactgagctttgaaaggagagaaagggtcactgtgaagagtggatggaatgaggtttcagagaggcaagcagcaggtgtgaagcccaaagtgctacaataagaccttcatggaaatccacaggaatggtgctttgggaccggatgaaatcacctggcagagcctgtgtgaaaagagctggctgaccaccccatattcacccagcatttctggtgctctctctcccttctcagcaatccctgatctccttcagggaatttatgtgatttctatggaaactggtgccatgcttgaagcaagtacccttggctaaatcaatccatcaggactttccatttctctggtgacaactattgattcaagggtgggcaggtgacctaaagtagtcaaagtgaatttcaagtcttctactagaaataaggacacgtgtaaaaataggggctgctggaaaagggaagtccaccttaggataaaattgacaataggaaaggaggagcagagacactggaggaaacccaggccctggtgacaactttgagccattggatccagccttacctaaggtctgcactgtctgtgggcttttcaaatgcatgggccagtaaagtcccatgattgtttaagccagctggaattggactctctcttacttataactgacagtatctccattgaacccctctaggatgattagctccttaaaggcagggccatagtctgacattgcatcagctctagcacctactgcatcacgtatttcagaagtactccttaacaaatatttactgaacaaatgaatgaatgcaccaacatccattccgatcatgccttgatatgttttgctttagttggaaggttttacatttttgattatagactgtgtgtcctattaaaaagcaagtgtttggatatctggcacctggaacttttcctcctgtagtatacagtatgggaactcaggagttacagcctgggctgtaggcttaagctccaacttggtgccataagctggtggattcagtgctacttcaaggtcagcaatgtgtaaaataaatttgcttcatcagcataaagcagtggttctcagcctgggaatcactctcctctccatcccacgggacatttggcaatggcaatgtctggaggtatttttggttgtcacagttggtggaggggtgggtgctatctacatactgggtagaggccaggaatgttgctaaacatcctgggcaacatggcaaaaccctgtctctacacaaattacaaaaagaaaaagaaaaaaattagccaggcatggtggcgtgtgcctgtagtcccaggtactcgggaggctgaggtgagaggatcacctgaccccaggggttcaaagctgcagtgagctatgattgtaccactgctctcccacgtggacaacaagtgagaccctgtcttaaaaacagaacaaaacaaaaccagccaggcacaatggctcctgcctgtaatcacagcactttgggaggccaaggcaggtgcaccacttgaggtcaggagttcaagaccagcctggccatcatggtgagaccctgtctctactaaaaaatacaaaaattagccaggtgtggtggtgggcacctgtaatcccagctactcaggaggctgaggcaggagaatcgcttgaaccaaggaggcagaggttgcagtgagctgagattttgccactgcactcactccagcctgggcgacagagcgagactctgtctccaaaatcaaaacaaaatgaaacaaaaaaacaaaaaaccatcctacaacaaagaattatctagctcaacatgtcattagtaccgagtttcttggacttcagtaataaacaaacattgggaactaatatgcattacactcgcccgtctataccctgggaatagtcccctgttgccatcaagagcctctaactcacctcctggttgtccgctaacattcacagccttagagaacacaaaagtagttctctatactggacacgagagggcaggaatttccaaagataaccctgttatcctaagcgactgcagtgattaaaaatattcttttccggagctggtgaagactctgcacatttatagaaatagatgttaattttgcatacaaatgaaaatggcaattaatatttaaaggatgtggctataaaaaaacagccttattagttaaaataaatgagtttaacaattagttaaaataagccttagctatataaaccccaaaaggagtttactgggagactattggagaattctgtgaatagaagggagaattgacaggggagcaggggtgtgctgaagccagcttatactggcttgtgagagtctattataggcaatacttcccagctccctgttcagtgacatcactgtgataataggccgtggtgggagtatttaaaccatgggagtcaacacacactagaaaccagggctctttttcctttccttaatttccttctttctttctttttttaaagtgtcagttgttaaaaatttaccagtatatcactgcaaccaggccatgagtaagaaccaggaaagcttaggggcctctgcaactgaaaattgtggactctccctagaggtctgccattaatatgactcagttccaactatctccagtctcagggtttcttccttcaaaattctaaattcctaggaaagaaaactcaaaagtcacaacaccactcctgctcccagcagctgtgtcctggagtttgtttactggagaatgattacactatgggcagttctcagagaagcacatattgttgtgagctgggtatctaccctctaaaagtatctaccactttccacttatggctgtctggctgtcaatcacttcttcccatacattcaaaatattcccttctaccatgatccaaaaatgttatatactactccagcacagccccttctcccaacagaccactgaatccacagataatgtcagaggccaggctactcagagtctacttctccagatagtgatcatttctcctttgatcctttagacagcttgtatgactgttctgcaatctgtgacataaacggcaagtttagctcatatccaaacacactacagtgagagacaaggaagaaagagaagggaaaattgtagtaactcctatttaaagaggaaaatgatggtttcttgctctggaattcagtgggactgtgctgtaagtttccaatcacagctagccacattcttcaaccaccattccagtctacttcagacccattgaactatgtaaagtatgactggtcttaagggctgtggcagcctggaccaggtaaacagcttgtccagggtcccactaaaagctcacttattttacctttatcaggtaaatggcaagcagctggacacccacatgtgtgggacattgcttgcaggagttaatgcctctttctcagagataggggacatgaaatgctggttgtcaaacttggctgtaccctagaattacttggagagctaatattgatgtctggggccccacccagagattccaagtcaggtggcacagggtgaaggctggacactgggatttttacaagcttcccaggtgattctataatagtatgcagcaaagtgtgagaaccattgtcacaaaatacagcaatttgccttgtggtttcctacgtgtggtttctttagtgtttttatttctcgggggatttgctaaacttcttggatctgtaagtttataattttattttaaatcaaatttggaaagtttatggctataatttcttttttttgcagatgatatgactttatatttgaaaaaatctaaaaactccatcaaagaatgattagaactgataaattcagtaaagttgcagcatacaaaatcaacgtacaaaaactagtagcatttccacatgccaacagtgaagaatctgaaaaaaagtaatcccacttacaatacccacacatagaattaaatacttagaaattaacaaaagaagtgaaagagctctataataaaaactatgaaacattgatgagaaaaattgaagggaacacaaaaaaattgaaagatattccatattaatggagtggaaggatcgatattgttaaaatgtccatactccccaaagcaatcaacagattcaatgtaattccctattaaaacgctaataaaattcttcacagaaatagaaaaacagtccgaaaatttatttatttatttattttatgttattacataattttattatataaggattaaaaacaggtgagtatgagtttctagtcagtataacatttcccctgaagaactggaactgaacttaaaaggagcctaaggtaaaatgaatgttccatatgttcatctaggcgttgtgcaatcacatgtacgtgtttgtcaaatctcattcaagcaaatacataagatctgtgcttttctttatatgtattttacctccatttcaaagaaggaataataaaaacttgttttattattattacttccaaaaaatgtctgttcatgttctttacctgcttttctatgggtttttttttctcataaagttgttaaagtttcttataaatactaaatattaggcttttctcagatgtacagtttgcagaagatttcttccatcctataggttgtctgtttactctattgatattttatttttgtgtggagaaaatatcttcagtttaattagatcccatttgttaatttttgctcttgctgcaattccttttggcatctttgtgagatctttgcccatgcctatgttctgcatggtattgcctaggttgtctttcagggttcttgtagttttaggttttatatttaagtctttaatcccttgagttggttcttgtatatggtacaaggattgcggcccagttttattttattttatttttttattattatactttaagttctagggtacatgtgcacaatgtgcaggtttgttacataggtatacatgtgccatgttggtgtgctgcatccattaactcgtcatttacattaggtatatctcctaatgctatccctcccccctccccccaccccacgacaggccccggtgtgtgattttcccgtcctgtgtccaagtgttctcattgttcaattcccacctgtgagtgagaacatgcagtgtgtggttttctgtccttgtgatagtttgcacagaatgatggtttccaacttcttccatgtccttaaaaagacatgaactcatccttttttgtggctgcatagtattccatggtgtatatgtgccatattttcttaatccagtctatcattgatgggcatttgggttggttccaagtctttgctattgtgaatagtgctgcaataaacatatgtgtgcatgtgtctttatagcagcatgatttataaccctttgggtatatacccggtaatgggatggctgggtcaaatagtatttctagttctagatccttgaggaatcgccacactgtcttccacaatggttgaactagtttacactcccaccaacagtgtaaaagtgttcctatttctccacatcctcccag

SEQ ID NO: 705 - DNA, 1298 bp, Homo sapiens
cagcgctcgccggctcctcgcgcccctacccgctgcgctctgcccagagcagaagcccggccggccggcccacgggcgggaggacgcgcctccgctcgggcggaggcggcgcggtggctgatcagagcgcgtagggcttcgccggggccgggagctgggcgcggtcctgctcagcccagctcaccgcgcgccggccctcggcgccctggttctgcggatcaggagaaaataatgaatgtcaaaggaaaagtaattctgtcaatgctggttgtctcaactgtgatcattgtgttttgggaatttatcaacagcacagaaggctctttcttgtggatatatcactcaaaaaacccagaagttgatgacagcagtgctcagaagggctggtggtttctgagctggtttaacaatgggatccacaattatcaacaaggggaagaagacatagacaaagaaaaaggaagagaggaggaaacacccagaggttgtgacagtgaccagatggaaggcgccggttgtgtgggaaggcactttcaacaaagccatcctaggaaattattatgccaaacagaaaattaccgtgcggttgatggtttttgctattggaagatataatgatcattacttggaggagttcataacatctgctaataggtacttcatggttggccacaaagtcatattttacatcatggtggatgatgtctccaagctgccgtttatagagctgggtcctctgcattccttcaaaatgtttgaggtcaagccagagaagaggtggcaagacatcagcatgatgcgtatgaagatcactggggagcacatcttggcccacatccaacacgaggtcgacttcctcttctgcatggatgtggaccaggtcttccaagaccattttggggtggagaccctaggccagtcagtggctcagctacaggctggcggtacaaggcagatccctatgactttacctaggagaggtggaaagagtcagcaggatacattccatttggccaggggatttttattaccatgcagccatttctggaggaacacccattcaggttctcaacatcacccaggagtgctttaagggaatcctcctggacaagaaaaatgacatagaagccaagtggcatgatgaaagccacctaaacaagtatttccttctcaataaaccctctaaaatcttatccctaaaatactgctgggattatcatataggcctgccttcagatattaaaactgtcaagtgatcgtggcagacaaaagagtataatttggttagaaataatgtc

SEQ ID NO: 706 - protein, 212 aa, Homo sapiens
TKKKEERRKHPEVVTVTRWKAPVVWEGTFNKAILGNYYAKQKITVRLMVFAIGRYNDHYLEEFITSANRYFMVGHKVIFYIMVDDVSKLPFIELGPLHSFKMFEVKPEKRWQDISMMRMKITGEHILAHIQHEVDFLFCMDVDQVFQDHFGVETLGQSVAQLQAGGTRQIPMTLPRRGGKSQQDTFHLRFLLPCSHFWRNTHSGSQHHPGVL

SEQ ID NO: 707 - DNA, 159434 bp, Mus musculus
  misc_feature (1)...(159434): n = A,T,C or G
agagactttgacactcaggaatgggatggttgtatcagcaatgggatggttctattaggaatgggatggttgtttcaatccctccctctcagggctcagaagtctccttggaagaggatgcaggaagactgtaagagacaaaggtggtgagtgacttcaagagaatagcatctttcagacacaacagggctgatgcacatatgagtcacagactgagactggaacaaattcaagccagacaaattcccagcacagagaagaggaactgggcacgatgccccacccttagccaagacgctatttgcaactgacatctgctggggaaggggaaaatcagttttgtctaatgcagtgtcaccgagatagcaacctcactcgggggaagaccccaagcttggccaattcaaaacagactttatactttggtgtgcgtgtgccttattgatttgttgttattgttgttatagttttgagggggggttgtttgcttccttggttgttttgtttgcttgcttgtttttgttttgctttgctttgggttgtcttagtgttctattgctgtgaagagaatggggtcataaccacggcatcataaccgagacagcttgtaaagcacagtattgaattaacttgacctgcagtcatggcacatgaaagcaccgtcttccctccactccttgttctcattggctcatggctatctcacaagcaaatgcattcaatctacctttaaaagtcctcacagtaaaagtgcagagtctaagactcaggcaatcctttaactgtacaatcctgtataaccaaaaatagattatatacttctaaacacaacggctgtcttagggcttctattgccatgataaaaatgccatgacaaaaggcaacttgggtatgaaagagtttatttttcttacattttcatatcgaagtcagggcagggactcaggacagcatcctggaaacaggaactgaggcagaagctatagatgaatgctactttactggtttccccttcttcatgggctttctcagccagttttcttatataccccaggaccatttgcccacaggtaacaccacccacattagtgaacccttccacaccgcccactaatgactaaaatgacccacagtctcacctacagactaatcttactgaggcattttcttaactggttatctcttctaggacaaatttagcttctgttaaggtaataaaaaacaaaataaaacaaagaaattaacaggacaatgatctaccattcctaagaggaactgtggggccaggggatcaatggagctgtgtggaggaagcctaaagcaagagtggggttgaggtgtgtccaaacccagaaaacctcatcctgagattggcaggagtgggatcgctccccctctgccctagtgcacatagatttgtgcccccatcttttgccccaccagaggaggtcacatagcttgtagccaggttaaaacttccattccccttataaggtcatgtccagcagcatgtatggaattcctccttaagcaaatggggcgttcccagcaccctggcccctgctaatgatgtatgtacactcaccactatagcccctattcatctctgaaaggtttaaatatcccttgtctctccccacccccaccccccaattaaatgagttgtctcactgaagcctgtctcccgagagtctaatcttcattcagaatccatcagttgtgacctttggccgatcaccccatcaggggtctggggacaacagagaatgggagtcatagcatcggaagattgaacaaaaccaaaacaaccccagcaagacagatgctaaatccaacagcctcacgccagccacctggggcttgtgatgaaatcgtctgggttacaaaggggttggctccactcctctggttctgctgcttgcaccacacatagcttctcccgttggccagctccacttgatgcgtgcagctcttctcagaatccatcccacggtactggcatctccaaaatcccatgtatccactgcaacttaggtttgccctcatagtttcacagggtggcttctcaaggtctcctttcaagtacttcagtactgccacagactgaactcggtggcttactgtcagacccactgtcaaacatgaactctttattcttgggtttattatatctgtagaaccagcactacacagacaatactagagctgacatcttcaggggtagcctgtcccttagattatcattgcagtagcctctttcttgtataagtagttggttttgttttgttctaaacagagaaccccttcaatggcactatcagctccattttccccctagcaaatgaatttgcatttccttaaattgggcacctttcctagtatctccgtgaaggtttctctttaatagtgactatctctttaactgttacagatgctttgcctatatattcttgtctacaattttaaacttgctcatatacctttccctagtaaattttttcttatctttttcctctctctctctctctgctgaagaggagcagtgagcagtagccacgccatagcctaaatgttacatagttttgaaatttcttctgccgaagaaattagtctattattttgaattcagnnnnnnnnnnnnnnnnnnnnnnnnnnnnnnnnnnnnnnnnnnnnnnnnnnnnnnnnnnnnnnnnnnnnnnnnnnnnnnnnnnnnnnnnnnnnnnnnnnnnnnnnnnnnnnnnnnnnnnnnnnnnnnnnnnnnnnnnnnnnnnnnnnnnnnnnnnnnnnnnnnnnnnnnnnnnnnnnnnnnnnnnnnnnnnnnnnnnnnnnnnnnnnnnnnnnnnnnnnnnnnnnnnnnnnnnnnnnnnnnnnnnnnnnnnnnnnnnnnnnnnnnnnnnnnnnnnnnnnnnnnnnnnnnnnnnnnnnnnnnnnnnnnnnnnnnnnnnnnnnnnnnnnnnnnnnnnnnnnnnnnnnnnnnnnnnnnnnnnnnnnnnnnnnnnnnnnnnnnnnnnnnnnnnnnnnnnnnnnnnnnnnnnnnnnnnnnnnnnnnnnnnnnnnnnnnnnnnnnnnnnnnnnnnnnnnnnnncggctcacattcaagtgggctgtctcccctcagttaacctaattaaacccccctcacattcatgtccagcagattgtgggcatctaagtgactctagatcctgtcaagttggcaatcaaaattaaccatcaggcacaccctggggaagaggatcatgacttctataggctaccctgggatggggataagcaggtgaagggggaaggcaaaggtctgagagacatcttgcactctgaggcctgtggagcccccatgttattaaaaatcattaaaaaaagatttattcctatttagctgtatatggaacaaagtacaaaagggaaaaaacctagacatgaaactctgaacagaaactcttgtatctatctatctacctacctatctatctatctatctatctatctatctatctatctatctatctagtcatatcacatcacaattacttttttaaagaataacttcttgcccagcagtggtgatgaatcccagcacaagaaaggcagaggcaggtggctttctgagttcaaagccatcctgaactacagagtaagttccaggacagccagagctatacagagaaaccttgtcttgaaaaaccaaaacccaccaccgccaataacaacaacaacaacaaaaaccaacaaaagccagtccaacctaatccaaaccaaacaagaaaaataacttcttgcccctccccatccccagctcctggcaactaacactattctaggtattcacagaaataaagtcatacagcattattgctccttcttgtatccatgatgtctctgtctgtatgtctgtctagctacaatgggaaaacactcaagaactgtgtgcattaatctgtgtagagttttccttccttttgtttgctaaataatacagtctttcaactatttgtgtagtgtttatgttgaagtagacattggcagtaacctagagggctccagtgaggagcaaacctgagatgaccaccagtctggagccatagggtaccaggaaggagcaagcataaagcaaccattagtccagggcctagaaagccaggcaagatggacctccatatctacatggcttgggtgggacatagcactcctgacaccattcctgagatgacctcagatacccagagaccctcggcaccaataagatgagcaaggaaaaacaaaaaaaataacaagaatattaaaaaaaaaaaaagatgagcaaggaagtggtggagaaatggaagagaaagagaagcagaaggatgtgggcacaatgaagagaggcagaaccggggactcgagggtagtgaggaacaaactgatgtgaatatctggtgatgcctcctaaggctgtggtgagatgctggctctgctggctctgaggggcatgtctaggtctgtggctctgcagtagggagtgtctgttaccaccaaaggtcaggagggcatttctggtctggggtgcttcctagagccatgttgatgtctgagggcagtgcagaactggccctacccctcacttgggcattgtggaagagctggccctgagggcatgagagcaggagagctgtccctgccccttacctgctggagtacatgggaaagttcagcctgtacctcacctgggcagcaaagtaaagctagccctgctggtgagggtgattcagccccaagggcaagagagtgggatagcttcctctgcccctttctggctgcggcattgaatgagctagcaggggctgtgctggagagctcaccctggtggtatggtgggagagacggtaggctgaccagttcagatgcttcccaggtccagatacaaggctctgagctagtccattctaatatataccccatctatgaactgctggaatgcaggaagggtctggtcctacagatccaaagctgcaggatttccatgagacagggctacaggatatccgaggggagtctctgtgaggatccagtattgataatgtcacagaagccagaggcctagaaccagaccaatgactcattgcaaaggacatttataaacaaagaagtgtggacaaaagggtatagtgtgggacacactgatacactaaagcttccacaatgagatttcttttttcttcgtgaggggagagattttaaggggagaggttgggaatgagggggtgaggagatgagtgagatggcggtgtacggtgtgaaatgcatagggaaccaataaaaagttaaaaaaaagagcaacctagagatgaattaaagtacacagaaagatgcatataggtggtatttgaaaatgatgccattttctataagaaatttcagcttccttttggtatcttcagggaggggacccaggaacgccgagtggcctgttatcttgtcactggttatcctacttaacacagaatcttcaaggcctattcatgttgcatcatgtgtcaggattttcttgcttttaaagacaacaacaggctgggcatggtggcacacacctttaatcccagcacttgggaggcagaggcaggcagatttctgagttcgaggccagcctgtctacagagtgagttccaggacagccagggctacacaaagaaactctgtctcgaaaaccaaaccaaaccaaaccaaaccaaaccaaaacaaaacaaaacaaaacaaaagacaacaacatttcactttatgtttatacatttgtcagggatgaacactgggttgttttcatcttttggtgagtcacgttgctttgagcactgttgtacaaattcctgactatgagctgactggggaacatgaccttagaaatggaacccctgggctgcatggtaattctatgcttatatttttgaggggttgatgctgttcttcacaatagttctaccttttttttttcttccccaaaaaccgtgcacaggagattagatttcttcatcttcatcttgtgaatgctttctttctccttcctcctccctgtctccctgtctgtcgccctgtttctcctctctcttcctttctcctgcggtataatgatcctaatcggctttaagggatgactcttagagctttaattggctgtttcctttctaatgatgtgtgatgattatctttcatgcgcttgttggtcttttgtacatcctcagagagagtctattccattcctttggcaacttaaaaacaaacttgtttggttttggttgtaaattgcaggagttctttttatatactgtatatatgataacccatatcatatatcatttaaaaattcttttgttctgcattttttttgtggttgctgttgttatcattcttcaatgcataaaggttgtaagttatgtttaatttctttactttgtctatgcatgttttgtgtgtgtgtgtgtgtgtgtgtgtgtgtgagtgtgtgtgagtgtgtgtgagtgtgtgtgtgagtgtgtgtgtgagtgtgtgtgagtgtgtgagtgtgtgagtgtgtgtgtgtgtgagtgtgtgagtgtgtgtgtgaacatgtgtgtgtgtgagtgtgtgtgtgtgtgagtgtgtgagtgtgtgtgtgtgaacatgtgtgtgtttgagtgtgtgtgagtgtgtgtgtgtgtgtgtgtgtgtgtgtgtgtgtgtgtgtgtgccagctatgatgcccctgtggaggtctatgaatgactctcaggagtcagttctctccttccaccactgtgagtgaaaggggttgcactcgggtcattagggtgacagctggtccttaccctctgagccatctctccaggctccaaagtttacatttttatgtagttaagcttattaaattttctcattactctggtggccttcatattttttcttgaatcctacttggcccattttctcagacacactgtatcttgtgacctcttaaataggattcatatgataacctccttgatatgggttcagtttatacatcttagcaattgggaagtaacaaacaaggttatttgcttgaatagaataggttgaagatatgaaataatgagcaacgagggagcccgttggcccatgggtggatctctacgcagcctgtgttattcacagttcaggcactctcaaagaaatgagtgtatatggagttctgcacatcccctagtgggcccaaggaaatcattagactgttatcaccggtatactgagttttagttttgtttttgttgctgtaagcatctgtgggcgaggtcacacagtgaatgagagagagagaaccagaaagagagcagaggaagttgaatgtggttagtagtgaacactcccatggtaactaatctagtattgtgagagcaagggcttacttctgtgactcctctgaaccccttctaatgactaaaccacctcttaaacaccccactgtctctcaagcaggttttgacacagatttcccaaagaacaaagggtctgcaggccagagcctgagacttgcttagtgcaatgcagatgagaaagcagccccagagacttcttttcctgtacatcagctgtgccaaggagagaaaatcaaatcggtattgcttacaatggtttagaacattcacttccgtggctctgtcttttcgggtaggcaggaaacttggactcttgagtacaactagatgtatgcaataggtctatttctaaaattaaagaagttgttatttacaaccatttattcagtacccagtaagaataacactacctaagatctggcttataatacacacacacacacacacacacacacacacacgcatgcacgcactaaatgctttaccatactaaacacattacaagtaatactgctcttaatttgttaaaaaaaataatctgcaaggcaatattgctattctaatgccagagaataggaaacagggtctgaaggaaagcaaatatctggccacagtggcagaggaaggacccatgctcagcggagttccccactcagtgtgcttcctactctgcactctgtcttcagatggagcaaaggcaaggaggaattcactgtctagatgtagtgatacagaaaggaccctggaacaataagtaaggacaaccagctgcaggccatctgggaaatccttctctagaaagtcttaggattgaaagttagtgttgacaaagtccaaatggacacagctatggaccaatgcattctcccgggaggtgggaatacatcaggtttctttcaggaaacttcgtaccacgaggttccttcatagagttacaaagctttagactctaggttattgtgccagaggtagatgctaggctaaccccagttcatggcatagacctaccctaataggtttcaaactctttgaaaacccatacacccttatctaaattggagaatgtcatccacagactgttggcacttagtttgctgataggtgggaatggatcttgagtaagaacagagtcagtacaaagaccattgttcctaaggcagtcctagcatctacctgttctctggcttggcagtttagtagcttcttgaatatagcaaagcaagttgtgctcttctaagctcttcatttgtttcagtggctttggccatgttcctattatcttccatagggcccccgagatacttactgattgatggatgggaatgaaccagttcggcagggcaaatggccctgagccaatatcagaaacaaagcaggacaagtggaatagaagaagtcacaagcagttagaatctgttagattgtaagcatggatgttataggagaggagggagcctacagtaagaagagagacctgtatgagaacctaggcttgtcttagatttgatcttctatacaatctgttcatttctgcaggattctaaacatcattagaaattgatctatgattgcttataacagagctcctgttttctttccccctttttcttgtttttgttttctttttccttttttcttgtttttgattttgggatttttttgtcccaagttgccttctgaacgctgggattccaagcatgcaccgccacgcgacactgaaatgttcctgacttaggactcaaaaaaccgacttcaaccctcaagctctaaagtagcatgctaaatacgtgggtgtgtgaatttgttttctgacttagcgttgcagtgataaaatccttgattttgatcggatgtgaacaattttgaattacctatgttcaagcatttcctttataactggcttccatgcaaatctcatttccttcctgctttccctaggactcttgcaaaaactctacaacacagggaaacgctctgtggctgttcagttgtacactgtgctgataagtatttttcctttcaggaaaagatgtgacctggttttttatagagtttagctgggaatattaactatgacttccattctgttcttggcttgtggagccccatcagtcctgcagttcccgggggtcctcacaagctaatccaagccttgccctcccacctgcaggtagagtggcgactacaagtcccgggatgcgccgcgcttacacccagggtgaggcggatctctgcagtgacgtcaccgtgccgaggcggggcagaggggcgggcctggaggtgccggagcacggtggtgctgatgcaggatggctgagcgcgaccgagcccgggaggtctgagccgggcggggattgctccctgagcatcgcctagtccgcccgcctcgtggttgcgggcaggtgggccgggggcgcaggaccgggctggaggtcagcagcagggcggcccacctgatacgctgctctccttcccggcggcggagctgcggggcgtccagcgcaggcttgagatgacctgctgagaagctgcgggaggcggcctagcagcgggcagcggttggttcgcggcctcctcggtggcgctgcccagccgggccccccaccccatccctgtgccccctcctgctgcggcccgagatggcggatccagccgaatgcagcatcaaagtgatgtgccggttccggcccctcaacgaagcggagatcctccgcggggacaaattcatccccaaattcaaaggcgaggagacggtggtgatcggggtaagtggccttggtgtcttgcccctcctccggctttgcaccatagcctgagtggggatcttccggacgctacctccgacatcccagcggggctgggttcgcgggtggatcgtaaaagagcccttgcctggtgactcccccgcggcggtggtggcgcggggcggcgggggagtgcgaggtccgccattgttcgcgggtgggggctcgggtgggcctattgttcccactctagccgccgcgtgggcagtgtttaggcttgccagcaagtagggatgcccaggtcttggtcaaaagtgtcagctccacaacccacagatgcatccaggcattccagggttcgatttgtctcaagaccttagtcaaaaaggtatggaggaaaggtgcaagaaaaacaaaatctcctgggccctccataggcggtttcaccttgctctcttgtggaaggtgaggagtgctcttggtgtctctgggaggtctcttatgtttcctgcttcctatcatcccaattgtcctggatttgtgctttctgtggactacccccacccccaccaggtcctttctccctagtgtctgcagatagactcatatgcttcgttctagatggagagcagattctcgaatctgctaagagagggagttcccaaataaccctctgtatcaagagcagaagttacttaagcaaatccagagtctcccttttgatcacctttccccacctttcctcccacagtgttttccccaacttagctccttctctgcagcctggctacggggaaagggagggaatactcccttacagttcttaagggagtacaccaaaggaaataaactagttttgtccgcgccccctttcttaacctgctctccctagagtgtgtgtctcatggtgccctctttgtattcgagccgcgtggagagggactgagttaatgcgagcctctaggtccccactgatacgttcctggcatcccgctccaggctgctgatgcagccttcccgtctccagcattgattaagtgatgtcatctccatcactgagcatgctcggactaccccctcccccccattcccccagtgactgttgtatttaggtcaagtgattgacaggtgacagctttctgggtgtatagctagaggacacctagcctttttcaagagcgaaccctgcggttcttcacttagtctgtccccaacatctttggcaaggttgtctgctgcagtcgctgcaaaggtcttggaccagcagatgctagtcatattttccaccatcctggattagaggccaagccctggcctgggggcttcgtcttgtattatgtttaagaaggctcctcccactccctgcagactatgatctttttccttcccgttttcagttataggaaaacgcagacctctgaatactctggatgagcaaccacttattctgatatctgacctatggggaagggcagggatttcctcctctgtgcttagggttaacctgcagaaaagctgtacactacaattattgatgagggaattctatacttaatggcatatatgggttagtgagatagccatggcagcctggagctagggttacaagtagactgagatcccatcattgtctgatctgctgtttcctcagtgaggtgtggttcaattaggagtggcagttgctagggacttctagtccctccctcttggcttgtaacaatttttacagtactgattgctcagtgcctgaaaatgttcgggtgaccttgtgttttgtgttttgttttctctctccatgctttaaagggcctgaagtgtttctcaaagctagctctgcttccctctcctttttctgccttctcctctcccaccttcctcatcttctacaaggatcagtgaagtagagtaataaatcccctgtgcaaagcagagattcttagctttattactattaatcactctattactgtaagtattccaggcttaagtgtatacaaataatactaagttaaaacaaacatacacaaacactttaacaaaaagttatggatgtgaatatacatactgcatttcaactgtaaggtgttttttttttttttttttttctcatcctactactttaatttagcgaaataaagcatcatagaaaagcattaactattagcctgatgagttttcaaagaaacaggcattttcaggtcttagagctttcttcagtgtaatcttcagaccccaacaccccagggcgtcaatattctgatttctgaatctatacattcattagttttgcttgtttttctcagcataaaaccctacagtaggttgtctgttatgtttctggcaatgcttgtcacattggtcttgtttgtagtagtatttcaccatatgaatatgcctaaaatttacttattccttagatgtttttgaagagggtctagctttgttgtccaggctggctttgacctcatgaccctcctgctttagctctcacagtaccgggagtacaggtgtgagccaccaagcccagtaagtagctgttgagagacaattaattgccctgcatccatttggggctcttctggatggtgctgctatgaacctcactgtttgcatcttttggttcatgagtatatagtacagaccactctgagacagtaagtgttaagatttgtgttggcgtggccttgggacccttcccctcactaattatcaatgtagatgagaatatagcctggcagtatgtatggttcttaaacatcatgcggaatgtccccaagttgacagcagcatgtatgactcaattataggtagagttgatctcagtggcaaggctatcccaagaacgtggaacttagaactgcccggaaatctcactttcactctctgcagacacaagtgaaggaggacgtttggtggagttagctgttagttcaggtcattcttagttttgaagcagagatctttttttcctcccctttaaagtcctgtttagttcttgtggagttgtacatcaagatcgtcaggcggaatttctgagtttccctttaaggaaatgtacagtcttggaagagtctcctcaccatccgcacactctgtttggagcttccgtgcaaatccttccccgctgctgttcctccgccctgacttttccatccacaaccctgtctgtctctttactttgaacgagcgatattgtggtcattactttccccgttgctgtgatagaaagccatgactgaaaactttctgttagagtttatttgggcccctggttccagagggagagtccataatgtcaggggagagacaggagagctgacagctagagcaggaagctgagcgagcacctcctcacacagactcaggcagagcaagccagagtgagggtgaggctctaaccgtccctcaaagccagtcctcagtcactactttgtccagcaaggccgcatctcctaaaagttccataacctctccaacatccctaccaaccagagaccagatattcaaatacgtgagccttataggggacatttcttattcaaaccattacagctatgtttgttttgtctataacctcacttgttttaccttatattgttagtagtttgattacctatctagtgatattgttagctactgtagagataaggcccatccgggttttgctctagggccttatccataagaagtattgcagcatttattgatttctttgttagcctgggaacctttaatatatttttattatattttacacacacacacacacacacacacacacacacacacacacacacacacacagagccagaggcatcttcctcagttgttttccatcttaatttttgaggcagggtctctcactgaacctggagtttgcccagctggcaggacaggctgaccacagagacaagtgcccgctgttacacctgccgacttatgtgggtaccaggggtttaagttaggtcttaacgtttgtgtagtagacactttcctgactaaactatccctccagtcttgactttgttagagtaacttaccttaccgacttaattttataaacaggaggtggaaaatagttaaagcaaacaaatactctgagaacattaattatacttaaatgactataaaaattggaggaaaaatgccatgttcagcttgttgaaaattaggagagctactgactctggtgctgagccagagtgggaggggaaggctcatgactagaaaagggcccttttcttgtatcgaattaattcttcagagaaaattactggagttagaggatttctcagaggacaccttcattatctgctaaaatcctggtgagtcacttattactgggggctctgcctctcggttgcgaagcgcctgtactgatgaaaggtctctgggttggccagttcttactggttctttaatacgacctttcccacctcagtttcttcttgttgggtacttctgtttgcggtcctgagaacgtagaccttgctccacacggctactttctcctgagacagtgtcatctctgagagtctccgagtcagtcacaaacccagaactgaccatgggtgaggagaatggccttaggacccagtcgcttgcattagctttccacagttgatggccagaacaggaagggacctgacagagcctggagattgaggtgtgaagagatgggacagtacttgagaatttttcttttggtccactctatttattgatctttcaaagtaggaatttaaaatactattcagcactagaacgttgttaagagtatagttctaattgaaaatagtgtttgatgaatcttcctttaggtttgtattgctttagtagcaagttgccgtaactttagggacttagcataacccagattaattttgtcagtttacacaagtcagaaacccagtaggttggcggttttctccattttgagtctctaagagtccaaacctaactgctggtggggcagtgctctggctggagggaggtagaagctatagctttgctcactcaaaattggtgggagaagtcagtggtttgtaggcccacttcatcatcgtctaaggttttcttatcatgttgttagatgactagtgtactggctggttttgtgtatcaacttgatgtaagctggaattgtcacagacaaaggaggctcccttgaggaaatgcctccatgagatccagctgtaaggcattttctcaattagtgatcactgccttgatcactaattgagcaagctgagcaagccaggggaagcagtccagtaagcagcactcttccatggcctctgcatcagctcctgcctctaagttcctgccctgtgtgagttcctgtcctgacttcctttggtgatgaacagcaatgtggaagtgtaagctgaataaaccctttcctccacaacttgcttcatggtcataatgttttatacataaatacaaaccatgactaagacagttagcaaacttaattctacaaagtctcatttatcatataacatataatgggactagggagtatgggcatctttgaggaacattaatctgcctaccatacaacaccatactaagatataaagtattttcatcaaaacaacaacaacaacagcacagagagagagagagagagagagagagagagagagaatgaaactattcacccttgtatctgccactcattatttttcctctctgtaattttcctttgccaggttgtcataaaatgttaactatctttttgggtttgggtttatttcatttagcaactctttgtggtttgcttctgttgtatatatccatatataaatgacttgttgttgttttgcacaataactttttattgtgtatatggatataccgtagtgcttagccatttgtcttttgaaggacatttggattttttccaatttgtgtgattatgaagaaagccactataagcttttgcatatagattttgtgtgagcatacatttttgtttctcttggttgaatgcccagaagtgggattgctgtatcatttggtaactatatgtttaattctgtaagaaactgccaaattctttttcaaagtggttggaccattttgcattcctgtctaaaagtggtaacattataagccaaagttttaaatagcctagtcagtcactttaagtgcatgctaaactagtagagtctcaatgtatcagcccttcatcccctgtgctctaaattcagagatgtttttagttcccgaaaatagattagtaattttctataaaaatggcatgtaagatcggagtgcgcgaactcaggggcatagttataagctggcatacactcctcagggggactccctgttcccagggaggaatacagttcttcataatgaagaaccaagtagaggcagctggaaagtcaggcaaaactgagtacagacactgtggtgatttgaataggtttggctcccatagactgatgtgtttgaatgtttgatccattgggagtgtcaccattaggaggcgtgatcttattggaggaagtgtgtcactgtggggttggctttgaggtctcctacgctcaagccatgtctagtatcacacatagtctccttccgatgcctgtggatcaagatgtagaactctcagcttcttctcatgccaccatgtttcctactatgatgataatggactgaacctgtaaaactaaagccagtcccaattaaatgttgtcctttataagagttgccttggtcacagcaatagaaacctaactattagaaactaagacagataacctagctagtggtggcacttttgccaggtggccttaatttttctgggccttagtgttctcatatttaaagtagagagacttgtgtcacagggtaatgtggctcaaagaaaatgcccagtattagtcatctcccaggtttcctatcccctgtataaatcccctcctttccagagttagatttgttcccgcaggctcttctcgtactttggactcctctgaacacccttcttgcatcgtaggcacctgctcacccgcttcttctgcttgagtagccagtcttcgtcttacaagttccatgtggttacaggcgtcactagctgcttcttcatctgaggcgatcattctcaggactgcgtgcgtgtgcgtgcgtgtgtgtgcgtgcgtgcgtgcgtgcgtgcgtgcgtgcgtgtgtgtgtgcgtgtgtgtgtgtgtgtgtgtgtgtgtatcttcccctgccgcattataagttccctgggcagaggttgttgcttgtttgtgtatttatgtatttgattatttaagtgattttgtctgctgtactgtagtttgcatcgtcactttgtaaatgtattctgactgaagttgttctttctcccggcttggcagcaagtctgcataatgctgatttctgtgtttctttaaataacgtgggaatcacgatattcctctgtctacctgcattcatatggcccaactctgcatattaagaataatgttccactctccatcccccctatttaaagtttgaacactcctctatattttcccactggtccttggctcatgtttcacctgtgttttattgaaaaaaaaaaaaagaaggaaagaaagaaagaaagaaagaaagaaagaaagagaaaaaggcctgctcccaaatggtttctcttgagataaaggattttttttttaccagatggatccaattccatcttatttcttgctttttttaaataattaaaaaatatcttatttctgtggctgagaaagcacactccttttccacttattccacatcgactaaatttcttttagtagaaattgttacacacatttgtgatcatttgtaaatatggagagactgggagtgaacagatgaaatccattcgagcgtctctagccccaaacatatgtggtcagcctgggagggatgcccagatctgccatttcttagtgtggaaattggctggcctgtattgagttccggcttcctcacttggaagacaaagacgggagcagttcccttcaggggcagcatggtgtgaggcacttaatccacagacccagaaactggtattgaataagcatccagaaatcattccctgtatgggccaactagtggctgcttctctgtactcctgtgggacggactcaccgtgggagaccacaggtctttcagagctacttggtgtctgcaggagaaacccagatgcttctgtgagttaactcaccggcccagcctctcccctccctccagtgggtcccaatcttcctaaagctatggccctggccctttaatacagttcctcatgtagtggtgaccctcaagtataacattgttttcattgctactcataactctaattttgctactgttgtgacttgtgatgtgaatgtctttgttttccgatggtcccttgggctatgacccacaggttgaaaacctcctctccatccatgttccagctgtgctgtatcctggctcagtgactcccctcccctccttcctttctcacaccttcacgccccagagactacctccattgcttccctgcaagcatctaatcccatttgcttctgctccttcagggcggcctcaggtactccgaccaatccccctttcctctccctgtcagcaaggaagggttaggtagccctttccctatattttccccatcaggcacaatatccacttgtctcccattggactgaaagccctatgaatgccaaggaaacatgcttattcatcctgttctcaggacatggaagggtgccagggacagagatgcttagtgagatgtctgtgcaaacacagcccctcttgccagcccgagcctgcgcttgtttgcttgagacacactcctgactcctctggctttggaaacatgcctttcctgccttagctacattcatggttttgatattatcacttgtgatgactagcttttctctgacctggatgtggtggtacccatgtgcaatcccagaaccttggagactgaggcaggaacatctccagcctgggctgtgtagtgagattctattccagaaaggaaaaaaaaaacagtttttaatagtttttgaggatgctttttaaaatatatgctcactgaaaaaagtcagatcatgaaaatcatgaaggcagcaaaaatagctcattgtcaactgagcaggaaataccagttaacacttccctgtggacacctctccttcctgtatacttggttttaaaacacatcctgtcttatagcgagtgttctagaacccagcttactaagtggcaaacttccgagatttccattttgaagactgcttatgatttctgtgttttctaatcaattaactgcttccttctgaggggttttctccgttttccacccattataaatggatgttatccaccttagcccaccagccttctttgtgactttgcccagttatttttgtaaagtgtatttctggagttgagattgtggcataaaggttagctctgacctgaggtgtatcctccgtctgtggagggagcagctcggggatggagaatcttgtcctgtgtcttacagtctcgcttccctgcttgccctgtggaattgctgccggtttgtctcatcaggtagtcctgtcagtgctaaattaaattcttaccagagcgtgtcttcgtcatgcactgttaacccctagatccagagcgccgcactgtctgtcttcggactttcagtgtgaaccattgcggtttgtaggaggtctaccatcattttcagtatcccagaggatgctgtttctttccggtgatcaaaagctaaatcttcctcttgaggtcgacagagatagaggccaagtttgtagtcttacagagaaataggatggtgtgcgtggccttcttgtgctgacattggctggctggtgatagctctgggaagtggggcattgagtggggatcaaacacacctctcagagaggcctcaggaagaggacattactctctttttccttggtcactactactattaaagaagaagaaaaaaaaaacagtgaaatttcaaacgtacatccgagaggaaaggatgatcaggcccactcctaggtgctcctggaccaggttaaccatcatcaccaaatagccaactccacctgaccccctcctaacctttctcatattttctaaattcctttacagtagaaatctcgaattttatgtacgctaatccccaaacttcattccatatctctaaaaagtcaggagcctataatgtaatgcggaaacacattgtaactaaaatcctaccagcgattccctgctgacgagcacccgttgcctcataaattcttctcgaaagtgtgcttgggttggattggcaggtactgttgattccactggagagagagaaatgttcttcccatcctcaccttgaaacaagtgggggctctgcaaggatccaagcctttgtggaggctcgaccatgcacccagcgatgagggctaatcaagcttccagagccaactctgccaaccttatcctttctaatcaagcaaagcaaggctggtggtgcctttccgcaaggcacctgaaaaagcgccatactctatgaccttgccttgctgctgcatacacttcctggcttgagtcagcttgtggaatcgccagggccaggcacatgcacgctgtttgtcttccagccatggtcctcggcctggtctgaccagggatttggagaggctcatccaggtgtgtttgagagattttcatcttatcttttcatccttggtttgagttggatattgggaaacacattttcaaggggtgaagtgggtatttgagaacaaaatttggtgcagcacataaagaaaatagttcagctgtttctgttttctcattcaaagacgagaagaatggagaaaaccacattcaggtaatgtatgttttgacacttttcagggtaacgttcttaggagctgcagaccagtaatattattttagaagcattttctatgaagctcttggttccacaacaccagactgacaagcctcagggacctgtcccaggttccgtacctggctttgctccagtccttgtttgcccttggcctctggaggagcccggagctgtctgcttaattctctgggggaggttgttctgtagttttcctcaaaacctgtctggaaccttgctcctcagaggttattgatttccacctgggaactggggcaaaaaactgctgtctctgacatcagaaacttgggagagtcgccgggggagggactttgtttctgcagctgccacgtattgcaaagagaggaacagttgcccgtctgattgactggtgtctagacctctcttagacttgatttctgaagggctaaggttctgaatcaatactttctctatttgactttctgtgggaaactgaggtaaactgacctctacagggtctagctttttgggctgtttctctctccttgttaactggctgtcagagtagctcacaaattccaggcccagtcaagttcatgtaggcttggacaccaggggagtagggtggtgggatgagaaaaggagggtttagtccttatcagctgaccttgagttttatgtctgtgttgggatggcgggtgcaggggtcctacctaggccatgacacataccacgtgtgtcatgggatccccatggaagggtgaagtaaggagcggctgaattttaaaggggattgtggtgttcctggatcgccgttgctatcattatgatccattgaattcatgataccatccaataagttcatatttacagtatatgcgagattagctacagctacattagctttagaagaaaaaatgtgtagctctttcgaaagttctaaacaaaacagtaccagccattatctgtgtagacaggtaggcagcagcatcctgcgtactcttgaagacaaacggaagctacttgtacatgcgctgagtgtctgtgctacacatggctcctggcaaaggtttccttcaagatttactttacacatttttctgagatctagatatttgtccaaaaatacctgcaaaggggaaaatagatccctgtttgtcacttcctagccctggtggcgagcagggaaaggtgagctctgattctctttggctggctgatctagaaacctgtgactcagttaaaaggctgtctcagaagctgggcagtggtagcgctcgcctttaatctcagcacttgggaggcagaggcaggtggatttctgacttcgaggccagcctggtctacagactgagttccaggatagccagggctactcagagaaaccctgtcttgaaaaccaaaaaaaccaaaaaccaaaccaaaacaacaacagcagcaacaacaacaacaacaatataaatcagagagagagagggagagggagggagagagagagagagagagagagagagagagagagaaagagagccccaaaggaagacatcctgagatgatctctggctttggcacacacaagtgattttgtgcacctgtcccccaactccaaagtctatataaaccaaatataaagtagtaccaagtaggttatggggaatttgatgttaaatacattcattgtcactcaaaaatgtttccatttttaaagaggtgttttgtgcattgcccagtctggtggccactggtcacatccagtctattgaacaacttggaatactgctcatccatgtagggatgtttggtagttgcaaaatatataccagacactgaagacagtattaaacaaaaccacaataaaacagcacttccctcaaccaaaccaactaaaaacccgcagtaaaagacgttgttaacatggatgagacacattacaccctgcagaggtatttggggtagaatgtgttagactttatttttgctttatgaagatgtgactaatacgaaatttaagattgcatctgggcctatcattagttctcttggataacactgccccagcgtttaggcacagtgttctgactttgcaatcataggatttcgttcctctctggtgtattgagggcctattgtatactcagctcagttaagcattgtgagccctgccatcaacaggaaggaaaaatgaaccttgtaaatacctgtccagagaagccttgctgagagagagagagagagaacacttggttctctgttggggacagcaggctgagggaccaacactttgcccctccctcatctggaggaatccactctgcaagtgtaaacttggctctagttgctttgcagtctctgtaaccattttctacattccagtttgtaatcatcagtgtcccttcccatcccataatgctgggtcacttttgagaagtcctgggagcagcagcccaacggtgcccctattaaggataagatttctggggactggtgactaacaatgaaagagagcacaaaaatgtgcctggatcccatgggtcctaggaaatgccaccatactgccttgcttcctggctctgtggtcagccctgcattagccttgcagccagtgtttggcaggaactccaggcctaggtccttgcctgtgcctgtacagctctggaagcttagagtacttggggttgcctccctgggagacttgctgcaatttccaggcgagaagcaccannnnnnnnnnnnnnnnnnnnnnnnnnnnnnnnnnnnnnnnnttccaggcgagaagcaccacagtgactggaatctgcgatgtaccctcctgtcccggtcctgtcgctggtgtaggaatgatgagaccttttgtcctgggaatgcattttccattagcatggtgacttctaatgaggtcgctctgccgagtgggataaaagcgtccattaggatgtgggggtcgcagagctggactgtggtgggaagccaaggaaaccctttgtcactctctggtgccttttctttgtgtgtgcatcggttggaagagcttgccttgacagtgaagaaggctgcatagctttttgcaggaatctgattaagtgttgaaaatttactcccctccccgcaggcccctggtatctggatcagtgcaggattgatcgatcctctttgtaaatggtggaaaaccacaaaaagggcaatgcaggcaccgcaaaaatcatcgcaaatttgccgtttaatattcctatcctcccttctcctgttggtttgttattgttaaaaaatgtacaccaaccctggatatacaagttacccatgttacttgtatatgtggtataatatcttcacaatgctacttttcagtgattgcttaatgtctactgggctgccatagcagtgtgctcactgtctgtgtattgtggcatggaattcttcatcttgcacttatttcagatcatacttgctgagcggctctatgcgtggggctattttcagtagctcagttatttctacagaattcattaactagaagcagatttcctgggtccagtgcggcgagtacataaatccgatcctattaactatcagcctattgttttccgcaaaggctctactgattcctacagccttcagggatgtatgactggccagtctggcagcaaatccatgtctgaagtaaaggaactgaatcatttgagagggtgattggtatggcactggtctagtgaaaatccatagggatttcctctcctggtctttgctggtgtgtatgtgtgagttcccatcctggcaatataaaaggactgatttggggcatcactgtgccatatccccagtatccaatggctgacagaacagagtggagatggccacttatatttggaatgacctcaaggcttttctcacaaatcctcagatgtggttgtttctcccattgcactggataagcattagcttgtatctagcagcacccatgggagcactttactagatgacctggtgtgtgccatgctgaccgaggtgggaattcatgttgctggagggtggagtcacactacacaacaccaaagagattactccacattttgaaggttatatgtcatgtagggaccagaccggcactctagtcctagaagagagcatatactagtcccaccttnnnnnnnnnnnnnnnnnnnnatccaagatttttaatgaagaatacaaacttaaatggtgtcgaaggagataaagagaaaagaaggatgcagtcagcatttcccagagaaggaaagaagggcagctgaccactccatgtccaaaggacagcggaagctgccgatggccaggcctgggaagccgatgtggaggaagcagtaagagaccagacagcaaggtcttcaaagtggccttgaggaaatgaaatttgtctaggccagcttgttttattgctgtgccttgtgcctgggttaggaataacttccacaagatatttcttcagtgctgcctctctcggcctctcaggttcccaggaaggaggatacaattcatatttgctttccatagttttatggctgatggcataatatagaacatcaatttcccatcagtcccaagtgactttcacctgttggatgcctttgacttcatgtcaaaaggatgagcaaatctcatgtaatccaagtagctgagggatccagttgttctttttactggcaactgtatatagatcaccatggtcccagaaccatgcgcaacagtgtatatgtaactgagacacattccacacaatgctttgctcatggtatacatgtccctgggaggttcttgcattgtggctgagacttgtccagtttggtatctggcatatgccatgactcctctacaatagcttcaaactatgtctgttggccttttttattattgctaataactggagattggactccacaccttgttcattttagataaatgctttcccaccgagctaccttccccacattttgaaggaagcagagtttcttctttttcttttttttgcgggcatgtgcacacgcatgatacatgtgtgcttccctgttataggacccacctggaaatacagatactcctcaaggaatatagtccattttctccactctacagtttgcttctagattgttctagaaaagcttgtgggttaaggagtatttcccagtgttggctttgtgggagatggtagaagcagtaagaggtgggacttaactggaagatcataggtcactggagtgtgccctcaaagaagtctgtgccaccctgcctcttcctttctcttggccatgttctgccaccaccaaaaccccaaaaacaatagggccaatttatggacttacaccttcaaaactatgatccaaaataactctgtctagtaagagagatgagcaaacacacaggcacattgggaaacacacacacacacacacacacacacacacacacacacacacacaaacacacacacacacacagaatactgacactgaatagtttcattgaagatgaaacttaagatcatgacagatttggcaaagtggtttcatttcacaagtaagaagaattcctttatactgaatacattcccattgttttagattgaatgcactcagattcattaagcacaggagatgattgctatgaaattatttccttttctactcaaacctggaacccacacacaaacactcctctcttggtttgcaatatcctatcttaaaaattattttaatttcaactgaaggctgatttcataaaggaagatgagaccaagaaagctctaaattgaagacattaatataaatgagctacacttaacattctattgatagtcctctactctgaaaggaaaatgtctataatttacctaaattgccttgaaaagagaagaataagagacttcctcctttgggtgcctgttccctgtgctcccctcataagcaggggagcagtgccattgagtagctgttatggctccacagctattagcttcattcccaaggagtgcgggctgatgtcagccattgcttacatctgaataaacatacatacaatgtccataataaaaccactctgagccacaaagtctgagattcaaagcgaattttaaatcaactaatatgcttttaaaaaggatggctggtggcttgtcctagcttgcttattttagggtacagaggtgagcagagaaaggggttaaagtatctctcactgatcatgaatattttattttgcttgtttttttttttcttattttttctttcatttgtatgtatgtcctctgtgggtatacacacatgaatgtacatgggtcttcaggtgcccaggaggacaggagagggcattggttctgtggtgtgaaagtcgctgtaagccatctgatgtgagtacccagattagaacttgggtccgtgaaagcactcttaaccacggagccctttctctaactctgttttactctctttatgtcaattataaaatattctttatgatcattaaacatattcatgagagtaaaatgtggaaagtagaaatgtccccagtttgtctctgaataactgtctgatgtgggttaaattattttccgttccatgcttatcaattcaattctaaagttgaattggaattaaattaaaaggactaagtaacannnnnnnnnnnnnnnnnnnnttggaattaaattaaaaggactaagtaacaagagacaggtgggatggcttagtggataagtcttgaatttgaaggacatcatatgtgtgtacatcacacacacacacaaataaatgggaaaagtttaaaagcatgtatcctaaagcagtcttcagtttaaaaactgtaacaaaaataagttgtgaattattctaataaaatccacacccagaaagccataatggctcagcattttgccattttgtccttggccccatctgcaaccctacctcttggtatgggcacactccaggactaacctataattagtgtgtgtgtgtgtgtgtgtgatttttcttggtcttgaatctgtaaatttttttttaaagatattgtgtgctttctgtatcttattttaatattcatgtttcaaaatagttttttgtagttcctgagaaatctgatggtagaaaataatagagcattgaaacacagttctatttaggttgtgcatgtatgtgaatgggcacagtaaagaaactgctgacatgcccactccatgatacagaaaggtttttattgtagttaagaaaggaagaaagaaagaaagaaagaaagaaagaaagaaaggaaggaaggaagaaagaaagaaagaaagaaagaaagaaagaaagaaagaaaggaaggaaggaaggaaggaaggaaggaagagcaagctaacaaacaagcagccaggggcatctggaagagtccagagcagagagaaaaaaagaagcagactggccatggcttgggctatctgtgaaagaaggaagaaaagnnnnnnnnnnnnnnnnnnnnnnnnnnnnnnnnnnnnnnnnnnnnnnnnnnnnnnnnnnnnnnnnnnnnnnnnnnnnnnnnnnnnnnnnnnnnnnnnnnnnnnnnnnnnnnnnnnnnnnnnnnnnnnnnnnnnnnnnnnnnnnnnnnnnnnnnnnnnnnnnnnnnnnnnnnnnnnnnnnnnnnnnnnnnnnnnnnnnnnnnnnnnnnnnnnnnnnnnnnnnnnnnnnnnnnnnnnnnnnnnnnnnnnnnnnnnnnnnnnnnnnnnnnnnnnnnnnnnnnnnnnnnnnnnnnnnnnnnnnnnnnnnnnnnnnnnnnnnnnnnnnnnnnnnnnnnnnnnnnnnnnnnnnnnncacgtgcacacgtgtacacacacacacacacacacacacacacacacacactcacacacacaagaatatcaggagtagccagggacagagagtgtagagagcaggagtctgaggtgagaagggccagagtggaactttcaaatgtatgacaagtacttgtgaacgtggactgagggaggctggagcctgcataggctttgatatacagccacaggtatatgttagtgggatcatatgtcctttctgcctgacataagggaagtgactccttttggcagatgggagccctttccaaaagttcccaaggaatgctggcttttgtttaactgccagaaatcctttactactccagataaagctggagtttgactcaattttgaagtgagtcagtaggcctgcccttctggggagggaatggggcaccccttggacttgactgtattagtctatagtctgcttcactatcaaaacatgcagttagagacaacagaaagttattctctctctgttctggaagcctaagtcagagtaccaaagttgatttttaattaaatatttttttatttcctgttttaaagactttctcatgtgtactttccccagcactgtttgtgtgtgtgtgtgtgtgtgtgtgtgtgtgtgtgtgtgtgtgtgtgaggggagggtgatctggtatttctccctttctcttttaaggatgcaggaagcttattgcattgggaatcccccccacctcccaccccatcactggttaggacttcagcatccgagtttggggagagatgcaccttaatctctaacaagatacactgtattctctagcagatcagacttgccctggagcctatggtggcttcaagattccctagcagagagcctgaggtgagccctcttagagattagctggtataaatggtacaaacaagacctgttccagcctgccaacagggagcaatggggccatgccagaggcatgccagacttccctcatttccccaggggtgggtttattggacctcaaggcctgtgtatttggagacacatccctgaaatatgggtgcttctgttgtagtgtggtatatcctgccttgacataggtcaatagcactgaggccgttcctctctggaacatcctaacagtgatgtcttgactattttattcaaagagagaagagaattccagacaaatgctttgaaagagataataattcttatagcgtcatccccttacctagcctcacaggaactgtctggagcaaaagacagccacagtgaaggagctgagaatcaacagccgtttaggacccagctactataaaggcttcatcttccaaaagccaggattcttgagagaatagttcttctagtgttgctgttttcactttcccttttgtttttaggtaccattatttattctactaagaaacccaagaaataattcaggtcacagcttagcacacaggctcagagatacataactgacgtgctggtttcatgaaatgacactaatattccctattgtctgtctcatgcacgctttgtgaagaatgctagttttcttaggattattactgacatgatgaaacactgtcaccaagagtgggttgaggaggggagggtatttggcttacatttctacattgtagtctatcattgaagaaagtcagggcaggaacctggaggcaggagccagtgcagaggctgtagtggtttgaataagaatggttttagcaccagggactggcaggattgagaaggattgggggttgtggtcttattggaggaaatgtgttactgcgggtgggctttgaggtttcaaaagcctactccacgccctctctccctctttgccagtggatcagggtgtagcccttagctatttctccagcaccatgatgccatgcctgccaccatattcctggccatgatgataatggactaagcctccaaaactgtaagtgagccccagttaaatgcttttctgtataagatgtggtcctggtatttcttcatagcaatagaacagtggctaagacagaggccatggaggaatgctgcttactgacttgttctccatggctttctcagccttttttcttatagaacccaggaccaccagccatccacaatgggctgggtcctctcccattaagaaaatgccctacagctttgtctgcttatagctcacttttctggaggcattttctcaattgagtctctttcctctcagataactattgcttgtatcaagttgacataaatgtagtctggatactggttatgacctaaggaatgatttgcaaatcagcacatagcaggtgcatgtattggaatattggggtttatagatccctgtcaagtactagatttctcatgatgcctttgaagggccagaaaatatcaaaactcttctctgtctctgtctctgtctctgtctctgtctctgtctctgtctctgtctctgtctctctccctccctccctttctctctctctcctattagaaggtgaacctcttttagcatggagatatagaagctttcaggcatctggagtaaaaaataccctataaaaagcaattctgtccaatctggctaatttacttgaaacagaatgggcggatttatgttaaatgtcaccaccaaaccatctgttggttcagtggttctcaaccttcctaatgctgggaccctttaatatagttcttcatgttgtgttgacccccaactataaaattattttttttttgctactgttatgcattgtagtgcaaatgtctctgttttttgatggtcttaggcaacccgtgaaggggttgtttacctgcaaaggggccgcagtccatatgttgagagccactgtatgagatgcatatggatgtaggtctttgatagggtagctcatgagatgcctctctgtggtaggcagaataatggtctccatacatatttaattcctaacccagaactggattatgttatgttcccttttgagaaaacattaagattgcagatagaattaagctgatatctagcttactttcaagtagattaccatggttacctgaaccgttgtgaggaggaaatgagggccaccatcgcttcgaagataaaagaggggcctagaaactgttaaaccattgctgtgaagatagaggggggcctagagactgtcaaagagaaggaggaagtagccctctagagcctccagaaagaaatgctgttgtgatgataccttgatactagctcagcaggacctgggccagactgtggaccagtgtgtaagacccgaactataagatcatagatttgtggtgtctgtgtgtgtctgtgtaggctagcggtcaaccttgggtcatttcttaggagctatctactttgttttctgtgacaggatctgttactggcttggaacttaccatctaggcaaggctgactggccagtaagccccagggatcctcctgagtgatggggtgacacatacatgccccatgtcagcgtctaaggatcaagctttggtcctcggctcagatgattactttgaagctctggatgtgtggtaacttgttacgctgcaatgggaaatgagtaccgtctgccactgctttgtattatatctttcataaaccaaacgcatgtttatttactagaaatgaaaatgagatgagagaacagtactgttttgaagaattcgtttttaccttaacgaccaatagccaccattcagacatccctgtgtggtgggagtgtccgtgtgtgtgccttgctggtgcagtagggaactatactaaacgtctgcgtgtgagatggcgaggtagttggtttaagaattgaaaattactgatctatgtactttttttttttgacacagtgatgtttaaaacttaaaaatggaatcatgtgacaaagcatagaaagcctatatcttactgtccctgctttgattttatttctgattccagactgctttatggttaagtttccctgcagtctgagctcgtgggcagacacagatgaaataggcgagaggctttgtgactctgttgaaggaggtctgaggcctgcattgcttgtaagcagcaatctggacagttcatgttcctcacctgccttcccataggctccgtagcagtggggtcaacagagtggcccaagccgtggggatctcttcctccagaaccccgagatcgattccactctctcccacaccccgtgcatggttcctgatctcgtgactgaatggaggcagcactctacataatcaccgtggacacttggtctgagtaccccgttcctcatcgtcttactttgagctcacagtccagtggtctgggcctgcacgggatgcctttgttatctgtgatggtttcatgtgagtcccgaataagctctctgttcaccccaaattttctaaatcaactcttagaatattctttccgaggcagatggctgaggcaggcccctgtgtgtctttcccacctcaggggcacctttggctctttgcaagcatcctgcctcctttctgacagtgactgtcactgtgagatgacatttgcatttagtcatttccatagcaacctggagcagggaatgacacttctgctttctaattataaactggctttgggaaaggacttaacaaacattcagttggttctttctcagtagatccagagatgcttggtaacagtgaaatggagctcaaatttacagacttgggaggaagtgatcatttcagaggccgctatggctcatggtggagggaagtacaggtgttgggtagcagcagggcacttggtgaggatagggtacggcagggagcttggctggagatgaaatgtctcctgttcatggctggttctgaacgggtttctttgtattataagatgcaaaccaaaccaaaccaactccatgttgccaaactgcaatagaaagtaaaagtgagtaattgctgacatgaagctgaccagaaaagacacggactatagtttgaggtgattattacaaaaggatgtatgtggttagaggcatccagtggagccattcatatgagtgcacttgtttgtaaattaaaaataaatcagtatgaagatgctttcctcctgggtaataacacatttgtctgtctacagatgtgggggatgggtttgaatgcctcctctgtcccttttccacggacgtcaaaatccacagtcgagttccttacatgcaagggaagcatctatgcaatccttctgcatacctgaagttatctctcagctgtttacacatactaatggaagtgctcggaaactagttgctattctctgttgctaagggaataatggcaaaaagcctacatgctcagaaagacatttaagagataattttaatctgtaagtgggtaagttctcaaatgtagaacttcctagactagtgatctagggggaaatcctcaagatacgttaagataaaacaaacaaaacaggatggaggcagagctgtatgaaacgcccctttacagcatggctggagggggttaggggtgagagaatgctcatgcacagaggactctccgggtgacaggcgaggacctgctggtaatgttgggctgtaaggtagttatcagctggcagctgtgtgtccacgtgtgtgcacgtgtctgccttaataatcgctaaatccatgcagtgctgcctgaatgcccagggctaggacctcaccgtggcctcaggtggcagtgtaggctgctcacatcatgctgattctcaccacccttctgtctccagttcgcctctcttcgtcacacacacattgttccacttctccttctctcccatctctcccccacttacttattattcttagcagttctctgtcctgcccatgcctcatgtcgatgggtgggggtcatctggatgccctccatcccctctgagtgttcgccgatccaactaatcctctccattgataatagcactctcttgctgagtcatagaacatcgagaactcaagcttggaccaacctggatgctttattcttactggctagttgtcatagagctcgagagtgttctatacgtgttctggaaagtgtattctacacatgctactggagaaaaaaagcatcagtagtctcacctagctgtgaaccccatgagctacaattaatgatcggctggcaagatatgcccaatgcaacagtggcatgaatattatagcagtaaccaatcacctttaattggttttaaagccttctcctcaagatggtcccccaggcttgttaccgttaactgggagataaacctgcttctgccttgcttgtaggccataggggagaatgcaccactattattctgctcaatggacagagtaattaatttggaccctttgtagctttctttgttttacaactcatgcaagatggattgcttagcatatccttaactgtttcaagtcaaatgtcttatcaaaggaattgaattagaagtaacctggatgctgcagtttagtcccaggcttcattctctggctgcttgcttaggccttcatttccagaactcagtgtgtgagctgtcaggagtgtcttccgcttgtgactggtgggtgatgtctgccatgagaaacaggaaagaaggcaacatcatttctgacttttcatttgccaaggtagctaggtgaagtcctttggaaatcttttttgtgtcaggtagtacttgctacttgctaaataaattctcattcatgttgctgttttggagtttgttcttttggaaacccattagtagaatcaggaagtctggccataggagcaaggctgccacctttcatactcattcaggtagaattaaaacaacaaaggttcaaaagcctcctttctgaacctttgtcattactcttatcagccttgacagaactggcaagtttctctaagctctccaggtagtaaattgcgtggccaggggcagcaccaggttcgtgcacgcaggttcccaggttttcagatgcatcaagtcctttaatcacaataaccacacaaatatgtgtctactcttgttaccatcctgacttgagctcagagcagttaggtgacttgcctcagtcactcagatgctagatagcggagcctggcttccatctttgggctgtctggatttggctcattataatccccgcagtgcctcaagtgcttgcctacaacacagagctctgtatgttcttggcaagttgtatcttttttttcttcttctattttcccagctgtaaaaggaaagattgagcatcatggcttacatctcaccctagctccgattgacttgattctcagccacacacttgggatgcccttgagcctttgtaggatctactgcaagatcggataatggtaaatgctgctggaggtgtacagatctcagtgagggctagcacctcggcacactccggaattagagcttgtcaagagccaaggacttatttccccaaacaattagaggacaccagtaattatgtttaattgcacactgagcagtgttcctgttgtcccaacccattgttttaattgtgcttaggagcagcaggctattattttgcagtttgtgaggtttaaaatggctttgggtggcagtcagaggagcagaagaggtaagcgcacaggctctggaattgggcagattttgtgcaaatcctgaatctgccacttgcaggcaggcttaacttctataaatgatggcctcttattgagaataacatggcgacaacctcagggttgtgtgaggcctagctagcatgtatgtgaggtgagtggatggcagtcactcagacttgcctaggatgattatgaccaccatcatcatcattgtcatcatcatcatcagtagtaattattgcttttctttttgaggccaggttttgcttatgctgcccaggctggtcgtagtcccaccctcctgaatgccggaactacaggtagcatatcccgtcttgtcttagtttgttattattgataatgaggtgactacaggctttgggcatattccaggctccagccccaaatgtgtggccccatctggggtaagtatggactccagcctgtacggagtgctgtggttctgtggtttttgacagtagagtattcattatttcttctgtttcagaatgttgtctgtaatctcatttcctaagggtatgtgaaatggagctaaggcattcagttaaccactgaagaaagtataaccataaaataaaactcttgatcaaaaccttgggggaaaggagggaaaccttagcactcgtggacaatggtcttgatggttgatcattttaagcagtacatagatgggaccttaggtaacatgggagcataaagggaaagagactccttttgatttctctttcaggccctgtgagtgtatcaaagggataatcagcttactgataatctttagtctttccttggaacgcccctctttatagaagggaaggactctgaggctgggagtccatgttcagcagcgataggaagctacactcattaatgttgtattgtttgcattaaagtctcccattttagcacctaattattttcactggtgatagtcatatgaaatttccattggcaatatatttaaggaagaacaatttaaggaaacattagatggggctggagagatggcccagcagttaagagcaccgactgctcttccagaggtcctgagttcaattctcagcaaccacatggtgattcacaaccatctgtaatgggatctgatgccctcttctagtgtgcatgaagacagagcactcatatacataacataaataaataaatatttaagaaaaaaaagaaaccgttaggtgaagcgtagaatgagttatatgcggttacagaacagcaggaggagctgtattaaagggccacagcattagaagggttgagaaccatgggctaggaggtagggtctagagtgtgtgatggagcagaggcagatgcgaagcttacgtattttagagttacagaagtgtgcatgagaggaatatggtgcaaataagcgtccctgagaggctgtgaagagttcaggggcaaggaggtaggaggacagagagaaggatgaggccgtctctgaggccagccgagagaggggcaggacacctcttttactggtaaattctgaaagtaaatattagccggattcttgatgttaaataacccagcagaaagtgacagtggagattgaggttggttgcctggagggatgcaaatggctatgagagacaaggaactcagtgcatactcattggtcgttttgtagtcccagggaaggatactcttgtaactgactggcctcttccaaggaagggctctgcacactagagagttgagcggttcgagcggttctgaggaaagccagtctttgcaaagtatcagtttaaatctccccactagtccactattgcttcagagagcttttccttccctggagctgatcagcgatcttcgtcacagggatgatctacttggacatgtggcctgtgactggcaactggccactgtcatattgggggcttcaccttgggggttgtgaagtcaagagctttagacacagtgactaataggcaccctggaatggaccctgttcattgcatgacaggctccaagctttgatccaggaacctaaggtctcttattgtctagcttggtttgtgctggggctggggctggggctggggctggggctggggctggggctggggctggggctggggctggggctggggctggggctggggctggggctggggctggggctggggctggggctggggctggggtggtttccatgagtgattccaagtctggggcttcttgacctcaaaccaagtcccatgacatcagtggaagacggaagaaagcaggaaggagtgggaacctctgaggatctgactcatggttggcttttgtgtctgagtggcccacagtgagggaaggaaggggaatactgtgtacccagccctgccaccttgctcagatgcttcaccaggaaatgaaagagtctctgggtcagcagaccctctcgggttagaaatcaatgttcatctggctaacggagagaccaatccatcatccgcagactgggaggcgcgatcggaggtttcgtcagccttttgatctcagatctgtccagcctgttcagtctctgctgccactgttgcagtccacagctttgataggcgctgtccacagtcacagatgtggaactgatctggaacaggcatccacgggctcaccagggatggacataaatctttctaggcagcttacatgactgtcttagaattcttatccatactcatttcccagtaacttggttgggcgtagactaggtagaaagtcccagctgccgtgtgcaagatgtcctctcagagaggagtaccgctggaaagagggctttgaagcaggtgggctgcgtgtcagagaagggatcagaagaggagtttctggttgctaagcagtttcagacaccacagttctcctgagtcccccaagacccaaatgtctggaactttatcctatcctcaccggccacgtggaccgtgaagaccttttcttctaccattaggagagatgctgagcagtaatctcagcttaactttaaaatatcttgaacaagcaccaggcaccctgcaaagtgactctgacccacacagaacagagttgggcccacgggccctgcttgtgatttctaaccctttcatcacattaaagctccatcctgaccgtagcagaacagaagaggcaaggacagactgttccatgccacacagaattagataacaactttatcatacagccacccgagcctcagtttctcccactgtgaggtgggcatcctattagctagtccgtgggatcatccgaggattcagtgagctcgtttctttagctcaccccactcatgctaggtcccagagcagctcctgcttagccttctccatcactgtcgtcccctctctgtctgtagcctccgtcataaccgcccctggctgaaagtgctgcctagcactgccaacatcctgaatgcctcctcaaaatagaagcttacttcatgtgacgcttcacatttttaaaactgacaccttttttcatcagacagcactattactgaataatacaatggaacgaatctgtgaagttatctacataatgaggccagtgtggcacgaaagcagtgaagtccttaaaaacaccgtctgaattttcacctatttatagagctttgaagtatgtgcttctcgttcctgcttctttgcctttctcatcagaccctgaacacttggtccctgggaactgtctcctcactgttggcttcctagaatctagcaggctgcctgaccagggagcatggcagctacatgtcaaatgataaagatacttgtacttagactaatttgccaaacaaaatggaactgagctaggatctggcatgcagagtggtatgaaaaatatattggccaggtcggggctgctctagttactgtgaaggtctctctgtctatagagaggacttcatattttgcacagactgtggctaaaggaaaatgggtgttagagtcagagacactgagctgggtatggattgccatctacctgttgactatattagggagttgacctgctgtccctgtcacatcacaggtgatgatatgaggttcattgctgtaggaatgtaacttgccaacttgtggtatcccttggttctctctctcccttgtttcctgttgacacacttgaacttgtaggtggaaagaagagagacaatctctatagaatgtgtaagattaaaatggacagcctttcttgtcccagtcagcactgttgctagaatgatagtgacttgtggctcaacatggtgaccaattcattaggttcctagtttctacaagagcttgtgtcatggttctttgttgttgtatttgcctcgttgcctccctcccaaccccacctagtcatctctgtttgccaaactgcccagctctctcaggattcctaccattgcttcctgattggtcttaatgattattttattttatagtttctattcctaagcatcaggccttcacagagttgcaaatagaaaccagagcaggctattcctttgcttaaaagaatatcacagaaggatgtactgaggggcatctcagcactgccctctgagctctccacctgctcctaccatcctttgccttgctgttgctggatggagtgatgcactttgcagcagatcaaatgttccttaagtacgactcctttcctgtcacctgggcctggaacgttctgcccttgatttctcaggctggccagccttcaggccttggttctgctgtcacatcctctagagccatggtacaacctggcagaaactccctgttacagttatccacgcagaagtgctgaattgaaacgcagtggacttgatctgtgtggtcagaagtccagaactttgggaaactgtgggctctgaatcagactttcttgccgctgttcctttctctactgtgccaatgtcaatcaagtattatttctgacctctaatttctgtgtcttaagatgggtgtttaatattcaccttagagtcttgctatagttattcaagatggaagtctccttttggcacatagactttctattggcagtattttggagtgacattggaaatgactatattatttaaatgtctgtaatgaatatttaaacactgcaaggttccactcagagatgagtgaggtcagaaacaaattctttttactatataatttatttttatatgtttatattattttttatatacattggtgttttgcctgcatgtatgtttgtgtgaaagtgtcagatcttagacataaagacatttgcgagctgccacattggcagtaggatttgaaccctgctcctctggaagagcaggcagggttcttaaccactgagtcatcactccagccccaagaaacaaattcttaactaaacttctctgaaagttgttggtaacatctttgcgacatccacagtgattttatatgccttttaaagatggtttgttactaaactcaaatggtttccttactgctatgacaggggcctgagcagttttgaacaagttattggcacaaggcaaaaaggatctccttggaatgctggtgaagtaaggtgatggatggagtgacatccggagagaagcatcctagtccagcctaaggctccgatcgatcatccttaggcaaaggggatgacagggccttaggctaggtgaggctggtgactgggcctctgtatgctgctgtgatggtatgacgtggggcattgggaaatggagcagttggtttgctcagtgaccaggtcatgatgtccctgtaaaccttggccctgtctccatatcttcatctcagtgttgttacttctgtctatttatctaccagatccctgtgcaggcctaaagaagaatcagtgatttcacaaaagtggcctttgagtttctggaaagtgacccaggcaacagctgtcatcacaacccacacatacaaagtattgtctggagcaaagctatggggagacaaatgagacagtgctcagctatgtaacctctgggatcagtggtttgaaagtcacttaaaagtgagtgtaactgaagggttccgttagactgtcccttgtttacatgttctcaaaccaacatgggaagcaagtgatgtaggcttgtgaccctgagaaagccatgggctctctgaatctaactgcttcctgtaaaatgcagagtagcaattacatgaaagtgtggttacttagaaatgtacacagcagagggactagcgtgctcgatacaatatgtcagccctgtcttaccttgcgctgtaacccagaatcttgctttctttccaccacacagtgcttccagatgcctgctgtctggactagactgtgattagagaccccctggaggaggactgctgtggatgctcaaaggacagagaggatacttgttaggtgaacagatgacagcaattctagaggtcacacagctgagcagtatgcatcccactggtttctaagaagaggaagatggagggacaaagaatctcaaagaaagacgttatccttatgttggaaaagagaacatttggcatgagtcttaaaggatggcctgaatttttgacagacaaggtcaagctgttagatggcgttcaaattaaaggggaagatgcaagcagtggggtggcagcagggaggttgcaagctcactgccagatgtttgatgggcaagaacccacctggcaaacagtgagagcatctcagtgggctgtggggctcagcaagttgttgagcaccttggccaaggaagatgcatttggaaaaggatgcagaggtgtaccgaagggaagggagagtacatgaccacttagaaggcttgtgcggtggtttggcaaaaagtagtaagagtagctgagatgtaaggcaagagagaccagaggcatggaggaccactctgaccctgatgtggagaagatggccctgaacgtgtcagcctaggcgactaggggtagaaagaggagatggagaggtgagttgagttctctcttcagcctacagcttctcctcagcatccgcgcaggactggcttcaaggtagcttttaaacttcaaacctcctagatccacgagtcctctgtgtgaaatcatgtagtgtttgcaagcagcaacacacgtcttacacttcagatcatctctagattattggcataataaatcatatttgtttctgtctgacaataactggggtctggagccctgagttagaggtagactttgtgtcttctcttgagacttatggctgaaaccacagatatactttaaagtgcttccagggcagacagaacaaaacagatgatccagaatgagagagagcatgatgacatgatggaacttggattgacaagaaggagaacgagcgactgagatagggtggtcagaagaaagatgccgagctggcccatacagtatctggcatccagggagatggcagtttcaacatgctgactagagctcagaagcaaacagttggtttttcatagttctgttaaccaatgaatctgataagtgaaatgctgctcctggctgaagattggaattctgattttgatgatacattcattgtttaacccactagtgcttcaaggagtccagtccaggatcagaaaagagacaggcaaggcagagagtactgggcggacttgaattttgccttctcttgtgtgtggctgcctagcctttctagtactttaagcattggaatatgaggtgctttgtcatcaagtaaaaggtaaaataatttaaaaggctgatgatcttcccatacttgagaggacttggatgtttttgtttagaaaactggttttcattcagggacactgatttttgttaatagagatttctgcagggagagggactttaactactttatctgttgattgggctttgcaccactgcactggggaccaagtgtcctactgtctcctgagtgaggatgccatctcactgggctagaatgtctaagcttcatgctgcccatattcagcctttccatcctaaatgtgattagctacagaagtcctgcatacagtttatatccatcagccttccctttcgagcatccgtgaagcctctctgtgtgtaagtgtgtgtgtgtgactttgtgtctgtgtctctgtgtgcctgtgtgtacctttagccatcaaaacagagctgcccgagcctgctaatttctgctggttttagttagtgtcatcttcataggagacttctgtctgcagttatgaagttatcttaacaggaagagcaagctattgcattctgagttatgccctgtcatgttctgaacatgttctattatcacagcatgttagagtcagaggaattccacatttcatgttctatagaggaggaggcctagaggtaagttgtataaggtcacaatttggtcaaatgtgtgaaattcttagcaaatccatagctgaggaatatatgtgatcctggagggacagtgacaaaatgcctcttatgggtggtcttatgggtgggaggcttggcatggaaccagaattctggtgcttatataagctcacctcaccaccttccactcgtccgaggaagccattcctttttctcagaaagggaggctaacgtttctgtcccatggctcagaaaagcaaccagaaatgaggcacctgaacacaccatgagagtaaagctgtcatccggcatgctgggcaattattactatgcgagctgtttcccatcagtgaggaaatgagttagtactatttctccgctctggtcacctgcagtgtggcttgctgagctgctcaggtgatggtctgggcacaagctctcatatcagcgtcacgtgtacagccacatggctttgcggtgtgtgccgccacaggcttcagccgcctcagactgagtatgtgttgctggccctggcagctcctgcgaggtcgccatgccctcaaaggaaggtagacatttcctgttattgtgtatctggcaaaaatgatgtctccatcttgtttttagtgaaaaaaaaattctgcctctcctgtgaggaaaaaaaaaatattttcccacagacttgacttggtaccagatctactgaggtaaccactgcagagatttttttattcccttctccgagtgtacatactcagtgaacagtgaacccttgaagcctaaagcttgccttctctggagtctcccatgcctgaggcagaagctacttgtgagaacattagagactcctgcctcccattactattgccatgtgttagagctacacagattcatcattttcagggaaaatggaaagcacaggtgagtgtcttggctcactagaatgagaggcacaagcttcaggggaaggaccagccattccgacctcctctgttgtcctctgcatcctggcaggtgggagaggaaggactgcggtttgctttcattggaagcaaaacatcaccatgtctttgaaacagttttcattattctccttaaaagaagtcatccttctgtttccagtctcctgttagccaggcgataattctgcatttctttattatcgctctggcaatgtgcctccaagaatattcttccgtagctgtctgcgatcctgacagggtctgtgtgtccacacagcagggagtttggcaggagggagagaattgcagcctggtttcctgtaggaagaaggcttacaagactcattcttgtgcgctgcttttgttcccttgcggtctgtgaagtggtgggcattgccttgccaactccactgggagccagccgggcactgctttgtggacgtctgcttcattattgactctcctgggagcagcgttggcttcagccagcatgggccccagccaccttcctaagggcagagagccagtgtggggagggacagcagtgtggatgctctgtaggttagtgtttctggctgcattcagagcgtggtccatccagtgcaggcaggaaagcgagaggatgtagctggagtggagaagatagcctggttttatagtcctcttgttaggcagctaaagactggtgggccctggggaggtgtgacaaggatggggatgagcgagctgctggtcactactaggtatggggagtttgccttaatatgcagagccctcctccccttgccttgggaactttctgtcaacttcctgacaaacaagagggtagatgaacagtaaagagagatgaatgggtagaggaagacagggagcccctaggactattaaaatctagcgttggtggaaggagaatgtagactttcaaagagatacagctcatatctcctacccctacatcctataatgagatcctagcatcccacttctagcctccttggcacccaagttccatgttagtccagggccctcggcagctagtgggccgcttttgcacgaattaggggttagtgatcttctgggcaggtgtggccctacatgtctcctgcttggcaggtgaccagcacctctgtgaaggaaaagtcacgtcgttcccccccccccccccaaggtctagggcaaaactggttgatgttgttttttctttttgtcttgatacaaggtcttgcagtgttccgaggctggccctggatcttggggtgaggtgatctcgctccagcctcttgaattgctggcactacagccatctgctattgcactggatcaactcagtggattttaacaatgattggagtttccactcctcccctctgcacttccttaccttgcctgtgcaccttgggaaatggccacatgtttggcagtgattttactttgcacccattgaattcccattgcacccagtgcaggtgtaaagtaaaaggcaaagaggagtgaagcgtctggggttttaccttagttggggttctctagaagcacaagggaaaccagaataacgtgcagagtactttgagaggtgaacctaagaaaccctgaagagggaagtgaggcagggggcaaaggaagccctggggttgtctctttggagttgctatagtgagcaagtagaactctaggggccagttggaatacccacccagtgaccccttcacaccaattctggctcagacagctgaagcactgtcccccaagttttatctgtcaggctgaggattgctgggttggaagcctagacatcccttccagcctgttcgttaggagttctaagagcaccaccaactggcacagccaacagatcaagggatgcaggagccagcagtggaaggtcaggccagtctgtaaagactgggaggtgagtcaggttcctagaactctgcttcagggtggcagtgggtattttgctcatgtgtctcgaagcccccaaagctatagaggaaagtgattgagtctatgagtgcctgagtcagacccagttccttacctttcctgcatgggctttggaactgaacatgccactaattattctgaaataatgtagacaattgttctcagaaaaaagctactgttttgtgtctgtgccccctcctcattcttaagagctgagccttaaggcctggagtcatgggcctgtgggattgcgggagcccaaaatatgattccatatcaagatatgatttgggtatcaagagggcaacagggtgtcaagttctgagcaggttcagggaaagtttcacttttctgtatctctcccgtgtaggctcatggcgtgggaagtttgctgcaattctggttcttggtgtaagttggtcatcaggcctcaaaccttgcaatagagaataacagtgttcccatctcgagtgtcttctctagcaccaggctctgtggtagatcctctatttgcatggttgtatttgatgctcactggaagcctgaattgtggcttctgttggctctgcaggagaactataataaagaagacagacaacagaaagtgttggcaaggctatagcgacaccagaacctgcatacactgctggcaggaatagtaaccagctcagtcgctttggaggataatttgccagttcttcaaagctaaacttaaatgtagagttcctatatggctcagcaggtccactcctagatacattcccagagggaacacacaaaaccttatgtgtgaatagtcataatagccccaaggaaaatcaacacagtggtcccatctgttaatgaatggtacataaagcattatatatccatccagtggaatattgtttggtcttgaaatgaagccatgatacatggtggatggaacttgaaacatcctcggtgagggaggctgctcagaagaacacacactatgaccccttttatgcgacatactgacgacaggcggttctgtgaagtctggaggcagagctagtggttgcctagaacaagggagaatgttggggtgactgactgctaatccagcaaggggttcttctggggggtgataggaaggctctggacttagatggtaatgtgggacttgaatgctccctgcactgtattgcacaaaggaatgaagtttattgtgtggcaattatattttaacaaacaagtcctcaagcttctggtgacgatattcatgttggtaaatgtgggcatcaatactagcctaaggactaaggaagggcttcttagctaatgttttgggtatatcctttcagactgttaggagagcccttcatagtttagtttctcctcatgcacggtaatatgacgctctcctgatgtcccagtcgtggggggggggggggatctttagagttcttcaattaaaaccaaacccgtacaattttcagaaacaagtacacctgtccttccgtttgttttccacagggagaaagtgctttggagggtggacagtagcttccaaagtgaggcagagctgattagacttcggccttgtcttggttttactgctgtgagcagacaccacgaccaaggcaactcttataaggacaacattgaattgaggctggcatataggttcagaagttcagtcagtgccaccaaagcaggaacatgacagtgtccaggcaggcatggtgcaggagaagctgagagttctacatcttcatctgaaagctgccagcagaatattcacttccaggcagctaggatgactgacttaaagcccactcccacagtaacacacctaccctaccaaggccacaccccccaatagtgccactcgctgggtcaagcctattcaaaccatgacaggccctgtctgtcttgttctggaaacagtgccaagcctcatgttcctgggaggtgggctgaaggatgttgctggctgtgttgcatgcaggctcatggagatgggcatcgtcagggtgagcagatcaaaggctgccacacatgtttggctcgattaaagcgcctacagcactggctctttgctcattggtccaattagttgtgtgtactcagaaatcatttagagttgactgggaacagaacgaggaaatattttaagaaagggccagagactcatgccttttgtctccttgattcctagtgtgaacgatttaaagcagagattttagtgttctagggagtggcccagagcctggaccccaggcatgcactggttgcctacctggctgccctcttgaggcgtgatctgctgcctacctagctgcttctgccagtgcctcttcttgtgaaggacctttgggtgctgaacaattccagagtatttcttaatattttttctcactatctcatatgaagcctacatctttttccttgcctctgattgagtgctgtctgtctgtctgtcttgcttttctctgttggtaagagaccttgccataagcatggttacctgctttcttgcatttccaacttcttcccagttctcaagtcctttcctctggctccaggttagtaccatgcccatgcctaacactgaattgccctattgtcttttgctaccacactgatcaagttacttcattctttcctattaatctcaaaacacagtggcttctcctgcttttaggagagaaaaaaaatctcttaggaagacagcaccgtgtagaagaagaacactggcaaatcaaggtcacagaggtacttctgcagagcacagagctgaaaaggagcttccactttgtgacacacgggtgggtggtaatatcttgtaaagtcctcatggggagtgagatggagcgtaaatggccggctcggacggtcagcatggagcaagtcagttgaaagaatccctcctcccctgcactcccttcctgcaatttcgggaatgaagtcatctaagcacctgtgactaatgattgctctcagcaaccagcaactctcagcggaaacagtagcctttccatccctcttaatgaagatagggaaaacaaacattcaaattatggccactgttggtcacaactcttgttcagtctttaagattgttcctgggtttcttaataatgtatttataagatcaattcattttctgtgccttattctcgttactcatcttcggaacatcctcttccctttgtctttcgcagctgagttgcttgcaggcagggagcggttcttgggtaacgggtcaatgtattaataggcaggccatgtggttcacagacattttgctctcaacaacttgggaggaattctggtggcatgatttttgtttttaattttaaccagagaagtgtaaggaccatctgctaatgttttttttttgtatgtgatcccggtaggtcatttgttttagtattctgcgcctgtgcagttgcactgcagggcatggaggcttcgtgacagcggtggcaagcttcgttattggtaatgagtgtggagggtgccatccgggtccctcgtataatgttcagtgggtttacctgtctgcttaggatttgcaacttctgtttcagtgggaaactttcattgcagtgaaccatttggttggttggaaatgggtgctacactccttggcaagaagcaaaccaactttttaggtgataattatgtcaatgtgaggtggggttgcttgaattagaaccatgaaagccctgaaggatgaaaaatatgagatatgaagaatgtgctggttggatttttgccaatttgactcaaactggagtcacctgagatgagggagcctcaactgagaatatgcgtccatcagattggtctgtgcgcatgtctttgggagcattttctccaggatgtttgatgtgggagggcccagtctaccatggacagtgctacccctgggcaggtggccctggcctgtataagagagcaggctgagcaagtcacagggagcaagccagtgatcagggttcctccttggcctctgcatcagttcctgccttcaggttactgccgagctcctgccttaactccccttgatgaccaactctaacctataagatgtaataaagttgctttacatcataatgttttattacaaaaacataaaagcaaattaagacagcagttcataaggggtagccaaatgcaagtttgagctgaaggactgtgaggggagggaggttgataacaaagactgagaagggagtgaatagggtgcaggaggttccactgggctacactgcaggagagggagagtgcaggcagccctgggcaaagagcctagtgtgtgagtggaacaggagcctcaggagggtatcaagtgaggaagtgatgtcatcttatttttagaatacttactctggccagtgatagaaatgggttattagggatgaagaacaacaaggggactggctaggggctttggctgtttcatatcagagattgatggagagaattgtgtggtatagatattacgaattgataatgattcaggctatatcccagatgggatgtctggcatacactgagccttataaaaatactgcgtgtaattatcggggtgattgctgggatatttggatacggagagcatgatggttttctttattctagtgaagtttgggtggctaaggggcactcatagtggtggaactctctagaaggtggaactcctgaacctcaattttagatgaaggctgagatagtcatttcaatttcctaaaagtcaagcacataaccaagaggcttgggtttaggccagttcttgactacttctgtctgaaagagacgccagcagaggactctggcgtgtgtcatcagagaagatggagaggccatgtgctgagaggacacctgcagggaaatgagtcttcagaggctggtgggtggtggccccatccagaagaagtgccagggtccagcacctacacagcaatgttatttgaatttttttcctctagttgtaaacggtcaagtaggtgggtttgttgtctgcctacagaattctcagccattgcatcacgagaagcactagacgcttgtctccttggggattctgggtaagggcctctgttcttgttttgatcagaatttgtgagatattcttagtagaaaaatgtggggggaggggagaggaaaggagaggaggggtacaagtcagttctctgaaaacattcaacaacattctaatctttctcttttaatactttaaggttcatttaaaaacaaaagcctgtatagaatactgagcgcatgaaagactgaaatgtgtacatttctaactaacgtgctagctctgacaagatggttcctgtaactaatgattttcagagttttatctttctcagcgtcaacccagccatacaatcttgcaggcagttgctttgggggatttaactttaggtcatttaaaagtgtcatgctgtttgtcaactgataattgataatattttaaaaggggaataatgaattcttgtcttccatctctcttaaaggaaagtataccacattatagcaagcatttaagctggaaggtaaacttggggcatcccttctgtgtgtcccgtacaccatcattcagtggatcatttttcctgctacattaaatatatcttctctaaaactgaaagcagggtcatctcgctggtgctccatcgaagctaggagaaacagaaaatttgttttaagtttctagagggttcagtggacgacttaggaaaattctgtaaatatttattctcctgtgttttcagtgcatgtgacagaccccagggccccgtgtgtgccaggcaagagctctgccactcagatctacccgcagccctctgtaaatgcttagccttacttttttggtatcggctaaattaaaaaaatttttaaaaatcattttaaatagtgtttatgagttggtgtatgtgtgtgtgtggctatgtatacctgagtattggtgacttaagaagccagaggagggtcttggatcccaggaagctggagtttcatattattaagtgcctgacatgggttctgggaactgaacttgagtaccctgtaagggtaagactcattctattattattatttttttttttacactccagattttattcccctcctggcccatcctcctctgactgttccacatcccatacttcctccctgccccctgtcctcacccccatccccaccccaccagacctttaaactccctggggcctccactctcttgagggttaagtgcatcatctctgaatgaacacagacctggaagtcctctgttgtatgtttgttgggggcctcatgtcagctggtctatgctgattggttggtggtccagtgcttgagagatctcaggggtgcaggttaattgagactgctggtcctcctacagggttgccctcctcctcagcttcttccagcctttccctaattcaaccacaggggtcagcagcttctgtccattggttgggtgcaaatatctgcatctgactctttatctgcttgttaggtcttttagagggcagtcatgataggtcccttttttgtgagtactccatagtctcagtattagtgtcaggccttgggacctccccttgagctggattccactttgggcctgtcactgaatcttattttcctcaggctcctctccatttccatccctgtaactctttcagataggaacaattagggttttgactgtgggatggcaactccatccctcacttgatgccctgactttctactgggggtggactctataagttccttctccctactctctggcattttatctaaggtcccttcctttgagtcctgagagtctctcacctcccaggtctctggttcattctagaggcttctcccaacctcctatcttccgaggttgcctgtttccattctttctactggccttcagggtttcagtcctttttcccccacccgataccagatcaggtaccccccctttccctcccatgtcttccctctctcctccttgtggttgctttcttctctctcccaagtgggactgatgtgtcctcgcttgggccctttagcttgttgacctttttgagttctgtggacagtatcttgggaattctgtacttatttttggctaatatccacttattagtgagtacataccatgcatgtccttttgggtctgagctacctcactcaggatgatattttctagttccatccatttgccttgaaaactcaggatgtcctcgttcctaatagctgagtactattgtattgtgtaaactaaccacattttctatattcattcttctgtcgtgggacatctgggttgtttccagcttctggctatcacaaataaggcctctatgaacacagtggaacacgtgcccctgtgacatggtagggcatcttttgggaatattcccaagagtggtatcgctgggtcttcaggtagatctatttccaatttttgaggaacctccagattgatttccagagtggttgtaccattttgcaatctcaccagcaatgaaggggtgttcttctttctccacatcctcaccaacatgtgctgtcacctgaggttttgatcttagcaattctgattggtgtaaggtggaatctcagggttgttttgatttgcatttctctgctcactaaggactttgaacatttctttaggtgcttctcagacattcgagattcctctgttgtgaattctcagtttagttctataccccgctttttgatggggttgtttggttttttggtggttagtttcttgagttctttatatattttggatattagctctctattggatgtggggttagtgaagattttttcacaatctttaggttgctgatttatctcattgactatgtttttgccttacagaagctttctagtttcatgaggtccctcttatcaattcttgatcttagaatgtgagccactggagttctgtttaggaaatttctctctctaccaatgagttcaacactcttttccactttctcttctattagattcaatgtatctggttttatgttgaggtccttgatccacttggacttgagctttgtgcatggtaataaatatgggtctattttcattttctacatacagacagcccgttagaccagcatcatttactgaagatgcttttttccccccattgtatatttttggcttctttgtcaaaaatcaagtgtgtgtaagtgtgtggttttatttctgagttttcatttctattccattgatcaacatgtctgtctctataccaataccatgcaggttttatcactattgctctgttgtaaagcttgaggtcagggatggtgattcccccagctgttcttttattattaagaattgtttttcgctattctgggtttttgccattccagataaatttgagaattgcttttctcatgtctttgaagaattgtgttggtattttgatggagattgcattgaatctgtagattgcttttggtaggatggccatttttactatattaattctgccaatcaatgagcataggagatctctctattttctgaggtctactatttctttcttgagaaacttgaagttattttcatacagattattcacttgtttggttagaatcaccccaagatattttatattatttgtgactattgtgaagggagttgtttccctaatttctttcacagcctgcttatcatttgtataaaggaaggctactgatttatttgagttaattttatatccagccactttgctgaagttgttaccaggtttatgagttctctggtggaatttttgggtcacttatatatactatcatatcatctgcaaaagtgatacttttatttcttctttgccaatttgtattcccttgatctcttttgttgtcttattgctcagctatcattttgagtactatattgaatagatatgggaagagtgggcagccttgtcttgtccccgattttagtgggattgctttaagtatctctacatttaatttgctattaaatttgttggttaaaactgttggtttgcagtaaattgcttttattatgtttaggtatgggtcttgaattcttgatctctacattacttttaacatgaagaggtgttgtattttgtcaaatgctttttctgcatctaaggagatgatcatgtgattttttttctttgagtttctttatatagtggattatgttagtggactttcatatattgaaccaactttgcatccctggcatgaagcctgtttgattgtggtgaatgttggttttaatgtgttcttgggttcaatttgcaagaattttattgagtatttctttactttttatttctttattttttcgagacagggtttcttcgtgtagccctggttgtcctggaactcactctgtagaccaggctggcctcgaactcagaaatccgcctgcctctgcctcccaagtgctgggattaaaggcatgagccaccactgcctggctattgagtatttctgtgtcaatattcctaagcgagattggtctgaagttctcttttttagttagttccttgtgtgatttatatatcagagtaattgtggatccatagaatgaattaggtagtctttcttctgtttctattttatggaatagtttgaggactattggtatcaggtcttctttgaaggtctgatagaattctccactaaattcatctggccctgggctttttttttttttttttttttttttttttggttcggaggtttttaatgacttcttctatttccttatggtatatggacctgtttagatagtttacctgctcttgatttaactttggtatgtggtatctgtctagaaaaccatccatttcatctagattttccagttttattgagtataggcttttgtagtaggatctgatgatttttaaaaatttcctccgtttctgttattatgtctcccttttcatttctgaatttgttaatttggatacagcctctgggtcctttagttagtttggctaggggtttacctatcttattgattctctcaaaaaaacagcttttggttttgttcattctttgtattgttctctttgtttctatttggtttatttccggccctgagtttgactatttcctgctgtctactcctgttgggtgagtttgcttctttttgttctagagctctcaggtgtgctgttaagttggtagtgtaagatctctccagtttctttaccagggcacttagtaaatgaattttcctcttagcactgctttcattgtgtcccataagtttggatattatgtatcaacactttcattaaattccaggaagtctttaatttcttcctttatttcttcgctgaccaagttattgagtagagttgttcagtttccatgtgtatgtgggctttctgttggttttgctgttattgaagaccatggtgttattatttaggtgttgttatttaggccatggtgatctgataggatgcataggattatttcaatctttttatatctttggagggttgttttgtgactaattatatggtcgatattggagaaggtaccatgaggtgctgagaaaaaggtgtattcttttgttttagggtgaaatgttctgtagatatctgttaaatccatttggttcataacctctcttagtttcactgtgtctctgtttagtttctgtttcaatcacctgtccattggtaagagtggagtgttgaagtctctcacaattattgtatggggttcaatgtgtgttttgagctttagtaaagtttcttttatgaatgtgggtacccttgcatttggggcatagatgtttagaattgagactttctcttggtggattttccctttgatgaatataaagtatcctttctcatcacccttgataacttttggttgaaagtgtatttttattggatattaggatggcaactccagcttgtttcttcagaccatttgcttgggacacctttttctatccttttattctgagatagtgcctgtctttgttattgaggtgtgtctcttgtatgcagcaaaatgttggttcttgtttgcctatctagtctgttagcttatgtctttttataagtgagttgagtccattaatattgagagatattaaagacagatgactgttgggtcctgttatatttgattttgtaggtgactttatgtgcttgtggttctcttcttttgactttgttgtgagatgcttaatatcttgtcttttctttgatgttggagttttccttctaggatcctgggttgggttggtatagatattgattgaatttggttttgtcctggaatattttgttttctccatctatgttgattgagagttttgctggatatagtagcctgggccggcatttgtgttctcttcgagtctgcatgacttctgacctggctcttctggctttcatagtctcttttgagaagtctggtgtaattctgataggcctacctttgtatgttacttggctcttttcccttgcatcttttaatattctttctttgttctgtgtgattagtgttttgataattatgtgacgagaggattttctgttctggtcccatttatttggtgttctataggcttcttgtacctttatggccgtctctttctttaggttggggaagttttcttctcttctatgattttgttgaagatattttcatgtcctttgagctgggaatcttcattctcctctattctgattatttttagatttggtcttttcattgtgtcctgaatttcctggatgttttgtgttaggaattttttatgttttgaattttctttgacagttgtgttaatcttttctatggtatcttctacacctgatattctctcttcttctttctcttgtattctgttggtgatacttaacatttgtaattcctgacctctttcctaggttttccatttccagatttgtctccatttttgttttctttattgtttctacttccacttttaggtcttgaaccactttatgcaatttcttcacctgtttgattgtggtttcctgtatttctttaagggacttactttgtttcctctttaagggcttcttcttgttcatctgtgttttcctgtatttctttcagtgagttatttatattctctttaaaggactctattatctctacgagataggattttaggtcaccttcctcattttcaggtgtattggtgtattcagggcttgctgtcgtgggagaaccgtgttcagatgatgcccacggatattggcttctgttgcttacggtcttgtgcttgcctctcaccatctggttatccctggtgtttgctgctatgggtgactctgtctggagtctgactcttttttctcttagttgcttcaggtctcctggtaggcatgtggccctggctgtagcagacctcctttgggaccttccaactggggggttttcagagggacatttaagctattgtcttatgtgaagctgttctccaggggggccaatggactgtggtttctgtttccctgtgtgcagcagaactccagggaggctttccgtttactgcatgactttgggccagttactctgaatgcccaccaggggtctttggattgtggtgttggttgcccagttgccctgtgtagagaggaactcctgggatgccttcaagctgtgctgtcttcagaggagcagacaagctggtgatcagttgctcagttgccctgtgtacagtatatctcttgggatgtctctggctgtggtatcttcagtggagcagactagctagcagtctgtcccagcaaaaaagggatgggtggaaggggagtggtattcggtgggtgggagttttggggtttgatgggtccccaagtccactgagttcccagtggcagctgtgggacttctggaggattcttaccaaatgctctgagtgcagcagatctgggatgcctcaggatatggtgtcttctggggagcagtggtaatattcattcttaacctaactgaatttctccagtccctgatacgggttgaatatgaaaacggataacgctagtaagacagacagttagttgagtattttggtgaggaataggttttggttactcaaccaaataaatacctggtttactaactaaagtacaaaacaagtacagaactgtgaatgaaactaaggaagcaatcccttctcaccattcctttcagaatggctgtaggtctatgtctgtgaatgaggctcacctcgtccctgcccctcttttttatgttttataaaaagtctccattttctaaggtaaaattagacgtaacttgtttgcctggctaggtcaattctgttttcagaaactaaaggtcaaacatacaacctagagctgggatttcacctccatttgcctgtagccacaggatgaatgagtgaccatttagcctgcccaaaggcctgtgtgtctttgtaggaggattatggatgtagcatgacttctctgggagctctgatgagtggttgtctcttcgaggagtcagcctgtccctgactcgtaggaggtgtggttttagctctcttctctcttttcttgtcctttgtccttctgtttctgatttgtgggccaggctgtgtgagaggctgtgctgatttgtcttggcactgttggcagaggtgtgttcccccacaccccagtgttcattgctgtgcctgacattgagataccagttagtccttactgaatagggaatgacaggtagtgggagctatctggtgctgtggtagaggtctcccttcccctgacttagcagtttctctgaagtttacgtatgtagctgccagccaaactcctagacaaccactctccctcacatttcttcttttgatgcatagaagggctcctttgttttggaagctaccatccagtttagacattgcttctgtatgacagggaactgaattctacaggatgatagtagtgctctgtgtctactaacaatggctccttcaatctgatcatgtcatctctccagtaaatacaacacaggcaggttttatttggttacttatttgtcctgcagtaccctacctactgcctccagattttcttgccctgggcttgtgatatcccttatttcctgaatataccagaccctttgctgtctactcaccttgtgcctagaatgttcttccctgatttccacctttctgaactttccatgatgctcttacttgcttgacttgtctacctttttatccagataagtggataaagacttagagctctgtgccttcaaggcccttgacgtccagcatccgtgcgtgtggtgtatttgtggctcgtgctgtaaaaggttctgtggtgatggaaaggactggcttaaaaactgggctggcgatgtagttgcctgtggcttaactactactattagtgctttttaggcccaaacccctaatgtgttttctccattcctttctttcatctgctttcagcaagggaagccgtatgtctttgaccgagtgctgccgcccaacacaacccaggagcaggtctacaatgcctgtgcaaagcagattgtcaaaggtaagtgcccctttatttcctcctgggatgtcactaatgaaaacattaagtgacattcgcagcctagcaatcagtgtgcctccactgtaagcagagtcctgttaattggaaacactaaattgctgtcttggctctagccctgccttgctgtgactgacctcagtcacgttattcaacctctgcattagttttctctgttactgttgccgcctctttggtgggcttattctgttccctaagagctcacaaagcaaggtaagcggtgtcacagaatttctgtcgtggtctctggggactacagggagagtgttcctttcatgtttgagggaggaaatggattgctccatgctttagccgtacatgtttggctggtttcttttactaataactccgagaatgtagtcttacaggtgaaaggttgctcttgccaccaaggggtattctacagtgtcatgaagtcccccctttgagctagctgtgcagccatgtctgctctacagcagtccttaatttcaattttcaccatcctaccactttcagccatcctaccacatcccgacatgtgttcctccaaacaggtagcttcaagcttgcctttgtgccgcagagatcagttcttttcactgggactggccttggccctggaggatttgtgtcaaaataacagcagggcgaagaagcaatttgtacattgctctctcttgccatttcaaagcaggagcaggttggagcatgctgtggcaggccctgccatctggacaaggctgaggggcatctcccgcgtgcctgcttttctccatcaaatccttgccttcagatgggaatgccacggcagccatgtgctcaaaggtcttgatgctgccacccatacaggcagccatgggtttaaaagacagaagcatcttgcagctttcgatctgctgttctcagggagccgagctgactaacctatttgaaattcatgagattcaggcctggtacatctgctagatgaattctgaccctggacacctgtgtgggagactcacgtcagcaggcaatgttccctgctaaggtgcatgcttattcacactcttgttacagatatcaattaattctgaaggtcttctctgcgagattattatagaaaactaacaagaaaaaaataagcttagattttagctgtttaggatgaacagttttggcggacaggggccggtagtttctgtcttttgctccctctgcctctctttgagtggtttctggctttgaaatgtcttccttggctttctcctgttcaggcctgccttcccctgcggctgagcgtggacataggctttttttttgtttgtttttttaaattaaagtaagattaatcacatgtgccagaattcccatcttttctctcttcaattttattatcggaagcaaacagtatttgctacatgctgtgctaagcatgaaggccatttaaatacatccagctacctctgtgccaatgtaattagaaatggatgcactccatttaaaaaactacagtgattaacaaacaatagtaatcgcctttgcgttttcattcactagtgtgtggtctctttcagtgtttggatattttcttatgtattttcttatatgaggtatcagacagacattctcatccctgttaatgtggacattttttgtttgttttggtttggtttggtttttttttaatgtatcagctaaaaactaaattaagaagaagcagtccctgtgaatatctgtcccaactctaggtaacctgctaccccaaatagatggtgatctacaaagaaaaccctttggaagaacagggctcggcatgtgatatgcagacgtttctagggcacaatgactataacgtgaatgtactcatttggtagcaatagagaataccttattcttcttaaaaagaaattgttaggatgacaaaggcctagtggaacatttgttaaacatttaaagaaatagactcttatttattcttttcatacacgaaacaatacaccgtgattatttgagcctgtaacgtcttccttccactctcccgagaaatcctcaactcctctccccccctcccccaccccccatacttccagtatgtctccctcactacttcttgccctcccacccctgttttgaaccctgactttaattagtgatgtttgttggaatgctggctcatctcatagctgcagtgagttgatggctggaatggtcatgtcatgtctgaaagacagcatttcacagcaactctttctccagctctttctggctccccgagttgtattctgagccccattctttgggaatgtgggtgctagatatgccatcgaaggctgagcagttactcgcagagacacttattctcagtactttgatcagctccaagtctctactttaggcataactattgacaagacagtttcatggtaggacttgttagcacataataatatgattctccctagggctgatgacctcctgagctatgggcaaagcgcaggtttacagcatcaggcttaaatgcgtttctacgaagtaggcctcaaatccaagccaagccgagtgattatccatataacttcatgctgctattgtactggaggcgagtcttccctggcgagttggtgttgtagcatggaggtcgcaggcatcgcgttgatgccttttctccctcagtggcctgcatagcaccttctggtactatcaagctaaccagcagggaggaagcgtccagctgagttctctatgttgtacagccaatgcgttggtgtcttcagcaagacggtcttatcatctggttgtgctgcataaccaagaacagtcggaagcctgtattgtttcagggtcttcagaccctccctgagcaataacttgtagtgagctatcccgtactttgtactgagatttcatttaataactcatgtcttatagggggatcattgtcaactcatgcaggttatctgtgttcaaactctgtatgtatatatgtgtgtgtgtatttaattttgtttttttaatgaatttccaaagtagtaggttgctattgaggttctttgcatatccttagtttgggttagctcaccctgcccaattcctctctcttcatttcctatctccatgcctgtttaaagcctcagatccctgtatcctcactccttcatattgttttcttctatccacctttcctcttaagacctgttcacctctcctttttcgtgggccctttctgtcttcccgggcttgacagatacctgattgaacttttaaaagtaacctccaaggctcctgcgagagcaaatgactttcctttctgtgtcagtaaggtaaatcatacatccatagcaagaccttcttggagtacacaatggagcaccactgggtcttcttgtcatcagagccctgcctcagttgggattgggatgtggtaaagagactaagatgtgaatcaaatgactctgaagatcagcatggtcacctgattcgtgatgctgtcgcaggctgatgagctctgtctcattgtctattgagacctttacagagcctgatttaagatgtctagagtcccagtatttcctacacttgcatctttgtgtttttcaaactgttggctgaaagagtgtgaagatttctccatctctgtaggaagaggttgtaaggtttgtgactataatcacggcaaataaggctcccgtgggtgcctaggcattaaactccatggttaccagatattattgctgagatcctggtaaccgtgtgctggtcagcaggagccactccggaccttccttgccttccaaagcaatcaattgtggactgaacaaatgcttagaggaggtggtttttttgttcgctttttattttatttttttatttttaaaaaattttttccagttgatttctctaagctacagttatttatgtatacaggtaatattaagtgcttatcacctgataagcactgctagggactggagtcatcaaaacatctaagactgtctgctgggaactctcaatataggagaggcatttcatatgccattatcatgcttttaggctatgtaggttaagatgggtgtgtgtaccatgccaggaccacacagaggagtgccactttgtgccgatttggtgggtgaagggagggagtggaaaactgaggaaaggttcttcgaaaggttgggccccgaggactatagataatagccgtagtatcagcaggaacttcgagagcctgaagatacaaacgatgtggcacgctcgggtagttcggaaggaatggtgtagggttttgagtacacggtggcaaatgaggttgccagaggcagtctgcatccctctggtggacatgctggacggtatcccagaggccacgtgggcagactgaacagctttaaacttaggaagatacactcagatctgtttcattatcctgtatgctctgtattatgtctgctctcgagcaccttagatgtcgcatcctaaagcttcagttgatgaggtgtgtgaacacttctttctctaccctattagagtgaaatttgatgcttggagaataaagcactttggccagatctagaggaatgagtgggtctgggccttgagacctagtttgccgactgcctgcggctctgagctattttgccttacctttctttttcagtcaggtcatatggactattaactaacaggccaaagtgctaggggtagggatgagtgtgtgaggagagtagaggggaaagaacagctactgtggccttagagctttgtgctggtcagtcgtgggtgagcttccactctgaaatgcagagactttggaggggtcagtgtgtgcaaatagtcactctgctcagcagagattaaagcaaacgtgtttctcaagctcagaactgtctaccatttactgcgatgggagtgtgtgtttgctgccttgggtgcctggagcctgggtcttcattctgcaggcacgggcagcttgagttctttggtttgctggcaaaccttgggatcccaatggagcagcctttagctgttgtcagaagcctagtgagtgcccctgacacaacaccgtctcccctgggagggttagtaggctgggcagcctcttaggaataccgatgtatagtgtgaaggaccttgattcgtgattcacaaagcactcatttctgctcctgtcagacctgggctcagctgtaagcagaacctaggatgcgtgcatgctcaagtttctgaactctgtagccagagctggccagcgtcctctgtcctctcccctcccctttgggagataacatgccgcttgtcatctgcagcagaagcttctgggtttgctgggctgctggatagacggacactggcctgagaggtgtggggctcccatcatgccagataccgtcacaaaggacgcttctgtctggaagagcattatgtgtggaaacagtcattctgctccgcagagactaaagcaaatgtgtttctccagcccaggaaccatcagccatttactgtgatggaagtttgcaggcctttggttgggagctatgggctggtcccggaggcagtatgtggttctgcacagggcccagcacaagccagtgctcgagtcgtccctcagcagcctgtgctggctcctctctcagcccttgaactgcactgctcacccaaggcgttctctgccggcactccccactaaccataaaacacactcggaataaacaaatgcaccaccctctcaaatccgagaaaatagacaaccctaggtcgacaggaccttactttttttttgttttgttttgttttgtttgttttttgagacagggttctctgtgtagccctggctgtcctggaactcactctgtagaccaggctggactcgaactcagaaatcctcctgcctctgcctcctgactgctgagattaaaggcgtgcgccatcaccgcccccggctaggaccttatgttttaaaattatcttttagttcagaattgagtcgatagagggcaacatcagctgcattcaattttgatctgggatattctctaaaatgtattacgtgtaagatgattctgggtactttaaaggccaatcagagtgtgctttcgtggattctgtatgctctctatgaaaaaaaaccaaaacaaaacagcaaggaaattgtgttcagtgtggattttctctgagtacactcccacatgcctatcagtaactcagctcaaggtgagccaatgccacttaggcatgttccctccccgcccccctttttaaaatggggtctcatttagctcaggttatcataaatggggtctcatttagctcaggctatcctcaggccctcacagagctagggcttaccttgaagtctggttcttttgtttctgtctcatcagagctgagattataggtgtgtgacatcactcctcgactgtgggctgctgaggactgaagccagtgtttgtgccctctaaagaaacactctcccagtcgatccgagacttgatgtggggactcagtttgtaaacacaggagaacagggactgtaaactacctgcttggtgagactgtgtcctgtgctcagtgagaacagccctgaaagctcatggagatgctggaggaagaggaagatggcagaggaaggagtgtgggctggacgtaggctctggagtcaggttcctttagggtgcggcaggttgccacacttcagaagaaaggagcgaggtcagaagctggctggatgttggcccagaccagtaaatcctagagcacgacctacacaggagtgtgagggaggaagggcctcagtctgaggagaggtgtttagtttctagtaaataaaaagctttctgttgtgacagtgcctggcgttccaacggcctgaagttgtttgcgttgtgagcattgaactttaaaatctcaactgtaggatggaacctctttctttgggtccctcaaagnnnnnnnnnnnnnnnnnnnnnnnnnnnnnnnnnnnnnnnnnnnnnnnnnnnnnnnnnnnnnnnnnnnnnnnnnnnnnnnnnnnnnnnnnnnnnnnntgaagcttaaacctctaaccctaacactgacttcttcagttttctctctcttctttctgctgttactagggaaaccgctttcaaaaaccatttgtagaagacagatacatgtgagtgctcccttcccccatctcgatacttttcttctctgatcccaagtcatattgtaacaatctcagaatagtaaaataggtatgcttttttttttctttttttccttttgtaaacctagcaagaaaaacaaaccaccatcaacacccccccaccaccaccacagtcagcacaaacaggttcagagaggagagggaaccaccccaatctgaaatacatggaggtgacggcctggcacactttctcacatggccccaagtagcatcctctattcagggcacttcttgccctcaccatcaaccacattaagaattcctcccttggtgcagagtggtgggtcaaggatattaattatgcattgtttccctttctgtgatggttgtagagaggagggggaggcaggagggaatatgttttaatcacctctgctgctctgaaagaattcccaccgatgatcttcagctctgcaacataaagcagcccccacccgcacggctcccctcctccctgtgtgaaaccgaagccagcctgcctcgcgtgtgggctttcaccgtgcacttattgtgtaattaagagaaattcctgatgctgatgggtccaggctatcctcctagtgaggcagtgaaagaaaaccagaggcattaaatttaagtcaggcctgctagtttccagggtgattggagctcggtttgcagtgtggtgcctttcgctcccctagttctagtctgttgtgatgggacttccgtgaggccttcatgggaaatggtccaaaggatccagagttaagctgaccgagaccaaaccttcaggcaccacattctattctaatctccagaaactgcaagtctgctggcttttcctctccaagaatctcaagagactaacacctaggcgaaagcttcacgtagccgaaaaagactcttcccctggagtcccgcagtctgcagaaatgagagaccctttctccttatttgtgggacagcagactctcctttcttttcttatttcacaatcatacttaaagcacatgcagttggcacatatcatttttgtaagaagacagagatgggccattaggaactgcaaccttacatcatacaaccaaggccagtgtaggagcagcataatgaattaatgttcatctctcttgtgcttgcagatgtccttgagggttataatggaacaatttttgcatatgggcagacttcatcaggaaaaactcataccatggaggtaagtttgcactgtcggtgtctgaggtgtgagagcgtcagcaaagcgtgagatgggtgtgacagcagaggtggttaggttcagccagactcttctgtccttggggagttttaaagtgccaatgagcagtaaaatctcaagaatttagtttttaaaaaaccttggttgagctgtctgtccaagtgaaaaaataaatttcatttaaaaaaatagtcagatagcttttggctgccacagccatcttccagtaactcaccaaaatgatgaacacaaagggaaagaggagaggcacctatgttctctaggccttttaggaaacatggcattgttcctttggccacatacatgtgaatctacaaaaaggatgatattgtaaacataaagggaatgggcactgttcaaaaaggaatgccccataagtgctaccgcggcaaaactggaagagtctacaatgtcacccagcatgccgtgggcatcattgtaaataagcaagttaagggcaaaattctggccaagaggatcaatgtgcggattgaacacatcaagcacttgaagagcaaagacagcttcctgaagtgggtgaaggagaacgaccagaagaaaaaggaagccaaagagaagggcgcctgggttcagctgaagcgccagcctgcgccacgcagagaagcgcactctgtgaggactaacggaaaagagcctgagctgttggagcccattccatatgaattcatggcctaatgtacacaaaaaataaactatcagcaccaggacaaaaaaaaaaaaaagtcagatatagggggtatggcttagtttcctagcttgcaggaggccctgaattagagcctcagagcatctctctgtctctgtctctgtctctctctctgtctctctctctgtctctctctctctgtctctctgtctctctctctgtctctctctctcacacacacacacacacacacacacacatatacacacacatcactgctgctacaaccattatgaataggtaattagtggtgtggagtcttatggactgcaacaggtcctgtctgttagggtgaactgcagtctcttaagaataaattaaaaacaaaacaaagcaaaaccctataggtcagagacctaaagaggttggattctagaccaaatttggaccacaagcagacttttatttgacttgcatggtgtctgtcggtttgaatgtatctaggtatgtctgtatatatgaatttatctttaagatggaatgatttcacaaaattctaactttttcacgattgtggtttttccatttcctttgaacactgaagattttgtagcactggatgaatttagcaaaaactgcaatttcccagagcaggaattttcattgcttgtacttgtttttaatctttgtgattttttttctttattttcattgcctggacttgaacccagtgccttatgcatcctaagcaaacatttgccactgagctacgctcatagccttggttagtttttgttaacgcgtgttaaaagtggctgtcaatgagaagaggccccataaagtatttgttaaaacagtaccagtgtggtggctctgcccaccctgcgtgtttggggctaggttctccagtaggtcccagtccacttggcccacagcctgaatgcctatgaaccgatgtgccccttctgatgtgaactggtcgggtactcagcaggactgagtaagcagtggaagggatggcctcactcatgctctcactgggagcttgtggcttcaggctagcttctaaacaggaactctttattgcccccttttctgcttttcaccaggagctcctgaggtctctggtgctggataatttgtctaaagcagcaggtctcaacctgtgggttgtgatccctttggggaccacatattagatatcctgcatatcagatatttatattatgattcttaacagtagcaaaattacagttatgaagtagcaatgaaaataattttatagttgggatccctacaacataagggactatatatattaaagtgttcagtattaggaaggttgaaagctactgctctagaggccaggcctacctgacaggtgagatgannnnnnnnnnnnnnnnnnnnnnnnnnnnnnnnnnnnnnnnnnnnnnnnnnnnnnnnnnnnnnnnnnnnnnnnnnnnnnnnnnnnnnnnnnnnnnnnnnnnnnnnnnnnnnnnnnnnnnnnnnnnnnnnnnnnnnnnnnnnnnnnnnnnnnnnnnnnnnnnnnnnnnnnnnnnnnnnnnnnnnnnnnnnnnnnnnnnnnnnnnnnnnnnnnnnnnnnnnnnnnnnnnnnnnnnnnnnnnnnnnnnnnnnnnnnnnnnnnnnnnnnnnnnnnnnnnnnnnnnnnnnnnnnnnnnnnnnnnnnnnnnnnnnnnnnnnnnnnnnnnnnnnnnnnnnnnnnnnnnnnnnnnnnnnnnnnnnnnnnnnnnnnnnnnnnnnnnnnnnnnnnnnnnnnnnnnnnnnnnnnnnnnnnnnnnnnnnnnnnnnnnnnnnnnnnnnnnnnnnnnnnnnnnnnnnnnnnnnnnnnnnnnnnnnnnnnnnnnnnnnnnnnnnnnnnnnnnnnnnnnnnnnnnnnnnnnnnnnnaggaaggttattatatgaaatggaaccacagagtgagtttggagcattcagcttataagcagcagggtaggatgaatccttaatccttcaaactaaggttttttcatttatgaatccctcctgggaacaggccctgagacaactgctgcagaatagatttagctcatgaatcattcctattgaagaggagatttcaaaggcgcggggctaaactctttggcgctctgatgttctgtgcactgattggagtgtgggctggggtgctggggatctcatttctgttgtgttgactttctttggcccattttgcagaagaccaagcggtttggagactgtgcaaattaaagaaacgtgaggcccatttgcctcctcttctccatcaggactaactactgcccagcacatgggttatattagcgaattgtctatgcacctcgctccctaagcagcatattccagaagacctggccttggtgttgccatgccccgactttgcccccctccttttctctcaagggctttgaccttgcaggtactagtgaagttgtagttgcacactttcccagctccacttctgctgaagaccgaggatggaggactgaccgagaggaaagggagggagagggagagagtgttccttcagggtctcaagagggaacccatcagtttttaggttttggaaaacgagtaaggtgttatgtaacacgaaagaagaaccctttagtattttaaatcaccgaactattaggggatgcttacaaaaatgaattctaagcttttgggattaatttaccattgacaaaagtaaagtattttgctaagtgtcataaaaactgtagacactgagagagactgctctgcagaggaagatgtcggaggaaagtgagtgggagtcgctaatggggaagactgtggctgtcctgtgctgctgtggggacatttgagcctttgggggaacacactcctgagggacctcagaggagctggattccatgcctctgtcatctgagttccccagattctgtcacctatgcatgtttgtcagtcatcacgagttacctctcttggttgtgaccttcgcctaatgctggatggagttggctgacccttttccgtgttgcccagcccccatgctggatcctgttgttctgtgggtgctgagaggcgggaggagggtagggggtctgttaagcggaagccaggggaagggggattgctgcaagctaaagatgtagactgtaggaaacagacgttcaggatcctggaatgcaattaaataagaaatgctctgcaggcattgtgtcttctgaaaggaggatttatatattcagcatacacacagagctctttcaaaagcattcagaagggatgctagctctcaagtgagcagactgtcacattttaaagcatttttcttttaattccccaattttgggtctgatatccagtggtgttgcccttatcttctgttaaaagagaacaacacacaatcctccatcacactggaaagattagcttctcatgatactgcatttaagggggattttcagataaaataggactcattgggcagtattggtcctgaggatggtaggcaccatcatgcaaggtggacttttcaggagaatgtgcaggtcggtggagaggatgtccggtggctggctgcagacaggctgagagtgcgacttgtctcactacttggtctgttgcttggaagggatgaatccctgtactcagtgtgctgagagagatggctggacgcaccttgtggttttcttcctgtttagtgggacatctggaagctataggaattctgtggtctctccagccacctcgcaaaccttcctaatgattctgaacaaaatgaagagtacatggtgcttaaatgctgctggcctcttgctttcccatctccagtgtttgaggaaactgtgcacatccaggagaccacggcagaggactcagagtcttgttgagtgaccagcggaccatgtcctggttctccttcgggacttgctcctgaaaagctgcattcagttggaaaagtttctggagagagttgtacagagcacagctgtaaagtgtcctgtttactcccttggtggagcgatagacagcagcccaccctgtttactgtgcctctctcatccctgagccatagtgtactttgcctgtctcagatagggcatgcttgttttcagttcctgtttttgctgctgccagctcacccctgctgtccacagcctctgcccagcctagatctcaatcatcctgcacactctaggggctcctaaggaatccatatttactacctcagctggaagggccttcatgatcctgaattcaccttttttcatagcctggtaaccacattgtatctgtgtatgtatgcttcatttggaagcagtatgatctttacacacatgcacatatgcacacacattcacacacagaggatagtcatttgtatatagtatacattttccatatatgtcacacaggcattctccatgtatcacacacatctcccacatacattatatagacacagacacatctacttatacaggagtatgccacatgtttaaatatatgccacacacattccatatatgtcacacagagcatatacttactgttcagacatcctttacatacatacatcacacacaaatacattatatatgtatatacatatatatatacatacacacacaaacacatacaactcttttcatactgccacacaatagacacatatctcacatatatcaccccccctatataccacacatatgttccatgtgtgcatatatgtttgccatagcaaatgcctatcctacttagtatcacacatgtactccctgccccgggttattttggcaggctgattttaagtcaggaatcagtaaaagatggtctattggaagagaaccatctaggaaaacacatttgagtaaagtataaatgacttttagattaccagtcattctctggtagtggaccagagaagaatctgctatgggttaccatgggttattcaagagccctggaggttttgttgaaaagtcttgattggctgagtggggtagtacaatttaactgcaagaaaatctgtcctttaatcctagggattcttttgccagtagtttctgcagcgtagagctcatggctgtggtctgttttgttggtgtttatgatgacctatgtgatgtaaatgtgatcaggtatttggtgccgttttcctaagatactgtaaggtagtagcctggaatagggtgttgtcttataacttcttaggtcaagtcagccccaccccaactcagtgaggacctatgaggagatgaatgttatacactaacatgtattgagtccttcctgttgcagggaacacttcgtatattctattgactctgcactaattttatgcagtaaaccctgagtgttaggccaaccccatttttaatgtgtctagaaccaaactaaaacacagtgtaaatatatcatttggatactttctctagctctttcactggggaccctgtgctccatccaatggatgactgtgagcatccacttctgtatttgtcatgtactggcagagcttctcaggagaattctatatcaggctcctgacagtaagctcttgttggcatccacagtagtgtctggttttggtggttatctatgggatggatccccaggtggggcagtctctggatggtcattccttcagtctctgctccacactttgtctttataactctttccatgggtgttttgttcccccttctaagaaggacggaaggggtttgcagccccataggaggaacaataatatgaactaaccagtagccccagagctccctgggactaaaccaccaatcaaagaaaacacatggtggaacttgtgtctctagcagcatatgtagcagaggatggcctagttggtcatcaatgggaggagagggccttggtcctgtgaaggttctatgccccagtataggggactgccagggccaggaagcaggagtgggtgggttggtgagcacggggaggagggaagggatagggggttttcggagggggaactaggaaaggggataacatttgaaatgtaaataaagaaaatagctaataatatttatacacacacacaatacatcatttgatttatcattcttgatagatgagggcagcatgccagaagagctagatgagagagtagccaggcatatctgaattctgcattccttttgcttatagtagagtagggagtcaggagtcagatgtgctgagaaattgggataccaagtgcttggtggcatgtctttaatgcttctgtccatatggggttttgctcttggaaactcaaatgttgacttggaagttccttttaggagagcagtatgtgatgaagacctggaggagaaagaggattaatcgaggggaaagtggttgaccttcagggcactgggcagatgtggaccaggtgtctgtgtgaatctgtaaaggttgctgactgggcagatgtggaccaggtgtctgtgagaatctgtaaatgttgctgactgggcagatgtggaccaggtgtctgtgtgaatctgtaaaggttgctgggcatctccaaggactgaggagaaaactggcttttgtgttactatatctagagttttataacttcccaaaagtctaaaatcttcaggtacaccatcactgtagatctccaggctatgtttgtggcagataggttgtttaacacttgggagaggacttgagtagtcatttcactggtagattaagagaagattctatggtatacaacctagccatggctttaagtacatcagatccctttagtgggaattgttggatattgtctcttccgttccctcccacagggcatcaacatatcaatactcatggcatctcttgacagccctcataggtggaaaaagaaattctaggcataaaagtatatttagtaatgttcaaaaagagtatttatccctccacctgtttgctaaaatcaaataagagtgggaaaaaggaatataagaatgcccttcaagtcaatttaaatactaaaaggagtaaaaaacatatttagaacaattcagttggagaattctagatttcaaaatgagaacactgggatggattttcttggccggtctgtaaaatgctcctgaagagggtatttttgagggtaagggctttagacaatcttggacaatggttggatctatccattctccagcagatcagatttgggattagctgatctggactggctttctggccaatctctaactcctgcaggttaaactaaagcgtgcctgttcacctcccaccttcttctttcccacagtttcactgcttctctgtgtggattcacacaggaggggagatggcctccccactccaaccaggacagacccccctccccacagccaggacagtactctgctggcaacagatgggagctccccgggaagccaacagcatgtgtgtgtgtgtgtgtgtgtgtgtgtgtgtgtgtgtgtgtatgtgtgtgtgtgtgcgtgtgtgtgtgtgcgtgtgtgcgtgcgtgtgctttctgttttgtaagttttgtttaacaagccctgggttgagccaggacttatgcccatttctagccttccctaccaatcgttctagaaacttctgtttgttgtgcaggaacaaacaaaacatgactcacacactcaacttggagttttacagattaaacgacattgtttgaaaaaggcagagccccgtttgctcctctcccgtgcttcccagcacttcctgactgttctgtgtctttcgctcataggggaagttacatgatcctcagcttatgggtatcattccaaggattgcacatgatatttttgatcacatctattccatggacgagaacctggagtttcatatcaaggtaagtgcttttattaagaacaagacaggccactaggccccaagtcatattacacagtctttctcctcctatataaataaatgtacaggatggttcttttcatcaagtgtcattctgtgggaaatagacactatttattaatttcagtcaataccaaacatttgggatgcttgcagtaggaacataaaaacatagaagccccctttaggatggaatcgttatacccattgcctggattctccccttttctcaatgcatttctgaggatagtccaggaatatgtatgtgtgggggtcaggacaccgttccccatgtgagttccctggaacataatctcttatgttaccaatagggaagctgccagagaaaagcattgtatggacaaataaacttggaaaatacttttttgaccagggctaaacttaccacaagttcaaatgctgtcatgaatagtgtggttctcagaaggaatgcaccctggataatgacacattcatgtcaccttgggaagtgttggcaggcaattcgcctgcctcttttctcttcctctttgttattattttattttaactcagaaatgctaatattgcttaaacttgaattgaaagagagacttctactctattattatttctgttgaattataaaatttggacttctttgtaaattccagaaggctacttgtttaaacagagaggcatgtcataaggtggcgactgtgtgaccagtgtagaacaggccatggagattagggaattccagccctggattttcctttgtttttaagtttaaaaaaaaggagagagatagttcatatggcataaaattcatcctttaaaaacatttctgtggagcttagattatttctcaaactgtatagccacgttcttgtgtaaatttttaatatttctacacacaccaccaaacacactaccttgtacccctctcttctccgttttcacttgccttctgagtctaaattttgctctctgttttgttgagcgtcttgggcagcatgggagccccttgatgaatgttctaggtttccaatcctgccatctcgtggggagagggatggcgagggggnnnnnnnnnnnnnnnnnnnnnnnnnnnnnnnnnnnnnnnnnnnnnnnnnnnnnnnnnnnnnnnnnnnnnnnnnnnnnnnnnnnnnnnnnnnnnnnnnnnnnnnnnnnnnnnnnnnnnnnnnnnnnnnnnnnnnnnnnnnnnnnnnnnnnnnnnnnnnnnnnnnnnnnnnnnnnnnnctgccctgcttctgggctcccagatacacacaatgtctgcttctccatctttgtgcctagaggggctgcagagcagggaggagagaggctgttctaagaaggcagggtagctcagtggagaggctgtcctgaaggcttgaacctggtacacatgacccagtgggtgagtaatgagggagcagaagttcagacacagacggatgggccacgttacaagtagaccctagcaccaactgatacttggtacctttttcattgtattaggcttctttctggcctggatagatggctccgtgggtaaaggcatttcctgccaagcctgacaatccaagtttggtccctgagcatcacatgtggaagagaactgcatcccacaagtgttctccacctgtgcaccagggctcaggcccttccctcatccacacaaaataaataaataaatgcagcaatcaaaaaccttaaccctctccccttatttatttctacagcaagctgctcctaactttacatttcaaaaagctgtttgtgcaattatgagtcacatccggtacaccacaggtctctcggttgctgaaagcaacctcgccaggcttcctatgtctgaggatgcagagcttgttgctttgatgggatcaaggtttacaagcttagtgcttctctacggctatttatgctgacacactttaaactgctgtagaggtcttaagtgataatcctgaataagatgttaaaccaattactgccctggaaatcgtgccttgtggcagagtcttattacgattaagaatggcgctggcttgaaatggtggtggggggaagggaagaatattccctcagtctctagaatcaagtcttaccgtctaggctcccattgtgcatttcctagttacgcttgattttctattaataggaattgtaaggggacaggttatcagtgtctgcttctgaacttacgtgctaacaggttaaaccaaaaggatccggctaaggcaatattgaaatctgctccttaatgtgtcccatgggggttttgaacattatttctgatcgtgctgtggtttttctgccgaacaatgcctattggtttcccttctgcctggccacacaaagcatttgaaataataaaatgaaatctgacgcctcaagaaagtcgaatataccagcatccagttttaacctgtattaaacaggaacaggattttaattgccaggcttggcagtacgtggttcatggcttctttttagatgtaattgattttctctgtaatttgtggaagtaaaaatcacatgtttagggtctccaaagttgactgaatatgatcaaatacattgtgtgcatgtatgaaaaacatttaaaaaaaatctcaggggtagtggaaaatcttaatggcagtcaggcaatcatgagctggaatagactgacaccagaatgagaccagcttcaggagagcctggctagagacgactagaattgggctttggggacctcacagaggtgagtgggcaacctgaaaggttagcgagaacggttaggggctggtgggatagctcagtggtacagtgcatgccttgcgtgtgtgaggccctagacgaccagagagatgtagtgcactgggcagatgaacagacaggtattagcagaggtacaggtacccaggagcaggtgccaggacactcagctgctgcttgtagatttcaaagtaggaatctcaaagctgccgggaactgggccagtgggtggtgctagatgaaggcacacaaaagataacaggccagggctgagctacaacagagtttagtgtcagggcagaggggccttcacattctccagatcagaggtgaggttggtccactcctgaagtttcacctgggtagtcacagcctagctttacagctgtacagcgacaattgaggctggcttaatgatggggtatatccagagaaatgtgttgaaagacagttgtatcattctgtaagcctcatagataataggcaaaaccagggatctatgatatcactaggcaatgtgatcttacggaactgctgccgtgtatgtggtctgttgcttaatattatcatgtagctcacaactatatttttgttccttttttaattaattattttatctatattatattccaaatgttgtcccctcccgttccaggtccccccttcacccctctcccctcccctttgcttctgagagggtgctcccacacctacctcaccctgctaggatcccccttccctggggcatcaagtttttacaagattaagcacatcctttcccattgaggccagacagggccctcctctgctgcgtatgtagcgggggccatggaccagccccacgaatgctctttggtgatcagtgcttagtctctgagagctctgaggggtccagttagttgatactgttgttcttcctgtggggtcgcaatctccttcagctaccctcagtccttctcctaactcttccataggggtccctggcctcagtccagggttgactgttaagtatctgcatctgtctcagtcacctgctggtagagccactcagaggcttctgtctgtaggcacaacatggcatcagtaatagtgtcaaggtttggtgcctgtgccagggatggatcccaagctgggctggtctctggatgacctttccttcagtctttactctatttttgtccctgcgtttccattttgcatatcttcctattttgcacaggtgcttatgagtatgggggaaattttatctgggaggaaagagtctgatataggcagtgtgtaaaatcctggaaagaatttttcacatctcaaagactaacagcttcatttgccagattgaggccatatgtacattagattcctcagaactcattcttagtttaagcatcgcattagttcagctatcagaccagtcacccgggaattcagacgctgattctgggttctggtgtcggaggctctgatgcagtggaactgtggtcgtttccagggctccgtgcttctgtagctgatactgatatatgtggggtcggctgaagcttaagaacgattattcagaaggcttccttttccttacacagtctaatcatcttttgtttggtttttgagaaaaaatttcttctgtagccccagctgaccttagattcacaacaaccctctcactcagccttcttatctgggacataggcatagctaccacacctggccaatagtctttattaaaccacatttgttccagtccatcacagactccaaacctggtgtcttcatcagtaccttctcaggtacctgtctgaactcctgttgttccaagcatccttagcctctccgtcatgcactgttcctgtgggtctgacgaggctgtggcatcatgcagctgggtgaagtctgctatgtttgaccaacacttgtttaggatgctttctcttatggctgttaccacacatggacatgggcttgatattcagccaaggctaaacttaggttctcttgtaagaggctatctagcagctgatatagggaacacctgggaccagaggagtcagaagtgtagagctagagaatggtccatggttggcagatgggttggtcacagtggccaagcaagaggaacacacgaggggtgcctgcggctctgtgctcaggactctgacctttccctcggcgttccctcttctcagccacagagaaagctttcatgagtttgatagtgatggttttaaaacatggtatggtgtttctatttcaatttcaatttttctttatctaggtttcctattttgagatctacttggacaaaataagggacttgcttgatggtgagttccacctgaatgcattgtgcttgctctgtagttgaagtccggggtgggggtgggggggggggttgagatgcgttagcatgcttctgcctggacagctgatgaaaatgtagagtgatgtttgccttcaggctgtgtgctcttcccagccacagcttaaacttgcctctcgtctgtaaccatagctattcttggagcacagggtttttaacttccctttccttctttgcatgccatcattttcaccaccacagtgtccaagaccaacttggcagttcatgaagacaaaaacagagtcccctatgtaaaggtatgcaaagacttggggcaatgcagctaacttttctctggtctgtgcaaatactgcatgagatgctataaagagtatccaaaggcatagtttatctataacattgatataagtataaaaaaccccaacagccagtatttaggttcttcaactgtagctttcctgtatgtaaattattattattattattattatttgttgctgagaatctaatccagtgcttcatgtataagttatgagctattatactcagccctctttatgaaatctattatttaagtactactacttagtatataaaagaggttttgggattgaatgcagtggtgtatgctctgaacctcaccgaagcctattgtggccttgtctattgtgctgaaatgatgaatgatggagggtgaggcagtacattctcatttcctcccctctcataagttttcttcttttaatttctggctcctgaaagcattgctttagggtatgaacaggagcttaaaaagcatttcttccagctttcccagggctggctggctcatacttctctttaatgtagaatccaagccccaggcaagggggaagcactgttggtcagcatcattgcctttctgtttagctgtacctttagggggagaaaggatgcttagctgctttgagatgctgttgctttgcaaccgctgtaatggccaacctgccctacctttgactcttgcaggggtgcaccgagaggtttgtgtcaagcccggaggaggtcatggatgtgatcgatgagggcaaagcaaaccgacacgtggctgtgacaagtaagtgtgtgtgtgtgtgtgtgggggggggaggtgatgtctatgctgttacatagcacggcagtatctgccctctgtgcaggacagctgggtgacgaggatgtgagggaaggtagcagagagcagcgagcaggcagagcccaggccctgtgctgcgtgagtgtatgcagcactctgaggtcttgaagaattgcctgagattccttgggttctgatcaaagtcttagaaagaaaatccaagttactaaattcatgccaaacacaaggaaaaacagttggggctctacctctgtagagagagaataatgcaaagagggcatcagagcagagcaggcggcttccaaggagtccctgaagctggagagctcacagcaggcacactcacatgagctaagatgcctgtctcatcccggggagctgcacgtgtttatcagcaaggcagaggctccttaaattgactagcactgtcctttcagagggatgtgggcagaggagtgtaagttcactcagagctgaaggaactaagaatttcaagttcggaagagaaaaaaaaaatcaggagaggatgtgtgcgctgcagttcattgatgctctgggttctgatgttgaggaagatgcaatgtgctgcaggctaggcacgcaggcttgaccaactgtcaggactctaagcctgggagctgccccaggaaaagcctgctgctgaggaagggagcgaaggtattgtatagaagagattcaagcagtagttggtggctggtctagacccttctaggagcaggtctgaggctcctgtgtgaatgggctccagctctgtgactcagaatcctcttctacacccacagcctgtgaaatgatgcttgtatatgcatcagttttcagagctgacctaggcttgtgtgctgtgtaggaaacactgcttcttgctgttctgcccgaaacccaaatgtacatgacaaacctttcttgctgtgtttcctaagctgccagtcatgaattatttacactgtacctgcttcagagccgagcatgtcgaatgttactagtgtccttagcattctgtcagggtttttttcccacattatttgtacatgtgtgtgtgtgtgtgtgtatgtatgtatgtatgtatgtatgtatgtatgtatgtgtttgtgcacgagcgtgggcatgtgtgcgtgctcacgtgtgtacgcatgctatgtagataagcacatggaagctagggagaacctactcttgaaagttttcctctaacgtgtgggtcttggaaattgccctgggatgccaggcttgacagcgagcatcttcacccattgagtcatcgtaccagctccggtttctattttagtggggtgagtatatttaacagtgctctgttgctaagtccatttgcattgtgggcaacatctgaccgtgtgtcgccacaatgctccatcttccccagctgagacctgaactcggggacctttgcagcgggtgctttacaggctgtcccatctccccagctccggttttaattttcaagatcagcttgactattcaggatgctgtgagagtttgtagacttttaaaagtttagggtagacttttctacttttgtagataatatcattgagattttgatacagttgtatttggatagattattttggcttatatatgtgcatgttttgtgtgcctgtgtgtattttatgtatgtgtaggcctgaagttgatgttgtatcttcctttggctggattttcacattttatttttgttgaggcagcctctttactgacacagtacttatcaattccagctcatcctgctagctctgagcccactctgtttctgctctgcagtccagggttacagataattgccatgcctgaccagcctttaaacgggttctgggatcccaaactccagtcctcgtgcttgctcagcaaagccttatctattaaagccatctctgcagatccaatgttgatatcttaacaatattttatcttcaaataaatgatcacagcttatgtttcccatctatctctatctgctttaatatctgtaagtggcattttggacctttggctacaaatctgtcattttctttaagtttatttctattttatccttcatattgctaatgtgaatagattgtcttcttaatattttattttttatttttattagatattttcttcatttacatttcaaatgctatccccaaagccccctatatcttcttaatatttttaggtcaggcatggaaacataaatggtttttacgcgttgatttttctagcgtgcagcattgctaaatttatttatttgtgaccttttaaaatgggatctttaaagctgggcgtggtggcgcacgcttttaatcccagcacttgggaggcagaggcaggcggatttctgagttcgaggacagcctggtctacagagtgagttccaggacagccagggctacacagagaaaccctgtctcgaaccccctcccccccaaaataaaatgggatctttagagggtttattttttttgaacaatctggtgagatgctttctgaggaatggtgaaagttgcttgggaccattactgggtctgctgtaaggggaagcgtttttccttggtatcctggccatttaacctgggaggccagtgcgtgtttcatatgggttgtagaggaatgtgtcttaatcttccctgaaggaagctcctggtagttcaggctacacatgggcaggacaaactgtgtcaggcactacactgtaataaacttcagggcttccacaggaccagcaaggaagctgtgagcttcttgggggttgagagagtggggtatgggatggatatagggcttctggccgaccctgagggtctttaattcctttgttacttgaaggcactgtaaatctgccctctctacaatgaatgaacttttttgtttgtttgtttgtttgttttgtttctttttaaaagaagaaacagtggcctcagatgcgtccccaaattggcttcaccagctgcagagagctgcagcagggtgacatgattggctgtgttttgaaggactagaggtctgctgcccgtgctgccgagctctctgcggagcagtaagccatttattttccttttcagacatgaacgaacacagctctaggagtcacagtatcttcctgattaacattaagcaagagaatgtggagactgaaaaaaaactcagcgggaagctgtatttggttgatttggctgggagtgaaaaggtaattggttcttatttatattatctgtaatttctccctgctatttgctcaagtgtacagttgtagaagttctgtgccttttacttcctggttttaaagaagtttgaagtgttgaggcatggtactatcgtgtttctttgcattctcattttgtcctgtgggctaagagtcgccagttcccttcagaggcatgtgtgtcagaggctctgattcattgatgcttggtagcctagggctttaagcaggtgttagtatgacttagcctagcaaggcagctgcaaaaggtgggatgggcgcccttaggatggaaggagccatctgatttcatggactccatacagtaggctcgggagggctctccccctgggacatggttggccctgcttctgtacctttgccttgctgaggaaaggtctggaacctgggctctgccagtgtttccgttctcctggaagtgggtttgaagtaacaggggacctttcatatgggtgaccttgggtcatccggttggaaaggcttctttggttttgttgtgattctctttccacacctcgctctgttctatgcccccaggcaccggctaagaccacatcctcttcccatgccagcccccttccacagcaccaggggatgttcccatggccatactctggcgggcacaagccctgtagacagcatcatagagccagcatacatgcacaatttctatttctgccatcatcagtgacatcagctggttgttctcatcagagcaggtcctgaagtactgtcagtctccctagctatacaggtgattgccactcatggcctcacactgctaagttcctgaaccctaactatggctacacacatccccgtaagtcatggcttttgaattgtcctcttacttggctgggcatctcaaatgttatgtgtgtgggctggctacattctcagctgctcatgaggatgaagggagcacgttgtccagctgtagacggaccactgactggacggactgccatgctgggtataagcccatacagagagccatgtagcgatgagttgtttaggactgaagtacacctggtagctgcctcctgctggcagttgctgcttcttgttaagggtacttatgaggtgtttcaagtgtctctgcttggtttttaattcatgtttttcttccttttcccctggatgagtccatatgagtgtactgtcctgagaccagagctctgggatttccatcccatcaccccaaagtgccatccttcccttagggcaccagagtggtatctttggggctcattgtccttgcctgcctcggaaggtgatgcatggtccctgctttgaatatttcatggagttaagatgctcaaattagagatcgtctaaaactgcctgtcataggctgctgatttttgtggcccattaccccatgatgtctctgcctgccacatttttggggcagaagagtctgtactattttcagaaccttgctcctggacaacattcccctctgttattggggagtgaagggggtctcctttatatatatttgagtccatcattgttcagtttaaagttatttctcctctttccttttctttttttccttttttcttttttggagagcagctgttcaccctgcttttgctcagaaaaccacgacaaatcttactgaatcctctcccctcctttaaaaaaaaaaagttggcagcatttgtaaacctctctatctatattaaatgctgtaaacgtgaacttatctgtactaacgaagtggaggacacaccgtgtacagtgggctatagaagaaaaaccaaatttatagtgtaacacacatatccttgtctttgcatgtctccccaagccttttgcatctgagacaccccttctttcctttctttgctccccactgcctccttccatgctacgggaaaaaagtagagaagaaacaaccagagcacccatccccacttctttagtcttttgcctggaatttgggctcataaatggtttcctcactgtgccgcaccagaccccatgtaactgggaggctgtgattcagtcccctaggatccagctcacagtggtgacagcacttctggaggctggttttctggatggatgtcccccagggaagtatctgcagttctcccacttgagccatttcagccattccactaaagcccaattgagaggaaaatgacaacgggggagatcagatcctcagcctctggctccggggaccgcttccggctccggggaccgcttccggctccggggaccgctggatggggtgcttcttaccttccttgcctgctttcctgcagggcctgccggctgcccctccgcgcgccgattttctgctctgtgctcacacagtcctcactgccttttctgtccgttcgtaggtcagcaaaaccggtgccgagggagctgttcttgatgaagctaaaaatatcaacaagtctttgtctgctcttggaaatgtgatttctgccttggcagaagggacagtaagtaatcctgtcaccatctattaaatagtattatgggactctgcctttgggatttatgtattcttattgggatggattgccacacatcccagacgctcatttattttcctctttggaggagagattcctggctggagtgcctgttgctgggtgctccactccactaggaagtatgaatggtgttgctaacttcctgtgacacgggtcatagcatggatagtctttggcaagatccaaagacctggctgcaagtcctctttccacgtgtttgtaagtttggccagcttgcttctgtagtttttctttgaatgggctgtcaaaaccaatactccttcttttcttaaatagaaaacacatgtaccgtaccgggacagcaagatgactcggattctccaggactctctgggtgggaactgtaggaccaccattgtcatttgctgttctccttcagtcttcaatgaagccgagaccaagtccacgctgatgtttggacagaggtgcgtgtgggcaggtctcagaagccatgctctgagctacgtagtagagcataggtgtgaatgtcttggagcaatggtcaaaagggccaaaaattattcagttgcatctagcaggtgacctataaacttgagacattgtttagggaggcaacagggattgcattttttttttttaagtagaggtcaggaatgtgcctgtctgaagaatgctattgaacaaagcaaagcaaaacacccaactcattgttgcagctacttttgttctttgtggactcaaagcctaacctttagctctataggatttcgcatacataaatctcaagattgataagcacttttaactccagttatttgaaatttgaaattcatttcaacattattcaggaaagcaatcagaaactgagataaaggcagagtagaggcgtgtataatggaggaaaggaacccaatgcattaaccctgagggtgggaggcatgaggtgtgtgtggaggaaagcgcaagggatgaccacattctcactgtttgaaaggctggagtcaatgtgccctgcctctgaacgttagctgatgcaagcatgaaggagctagagcagtcttcatatgtgtggatcttaccttccttactcccaccctcaccctctttcagtttttctagacagagtttattcagtgtaatcatccctggctgtcctggactctttgtagaccaggctggcctcaaactcacagagatctgcccgcctcggcctctgagtcctgagagtaaaggcttgtgccaccacacctggctttcttgtctttcttgacacggtccttttcacctaccttaccctgctgccacagctgacctcttcagtcttgtttgttcagtttccagaccctgtcttctcagctgtgtttttgggtgttgggtacctaagcttgggatactgtggccttggatggtctgagcatcgttgatgctcattgtgctaattccagacagatgtgctggggtggattctcctatcattattacattcagtgctgaacagctgctgatctatctctgtgcgcctttactgcctcaggtgtcaatggggttcccagtgttcccctgttatagacctgggagtatgttgtatggtaatgcccaagaagtcatttcaaatggggatgggtgctctgtggaaaattgctacagctgtttgaactgcattgcacatcgtagacattttctgagtctcaacaggacataggattctttggctgtgggctgtctaaacaataattgtgttgcaacgttgtaggattaatctatctcttaaaggatcggggtcctttgtttcttcctaaatgacttctttgatttgatacaggcttgaggtagtggcattgaatcaaggtgacacctttgtttcctggccactgatccactctctccttacttctctctgagcctcatatctctctaccgtagagatgaagtggctccttccgaggacttctgggaggaggatgatatgagttgcccaagggctggtacagaggaggctatcactgacttcaagctcgccttaaatactctggcagtattgagggttggaaagatagtgggtaagactagactagaaagaaggagcagcgttgcaatataaaagacagtttgaatgaaacagcatttcacgactggaactatagggtaaagaaatactataggaaatttgggattccaggagataaaatgtaatatcaaatatgtttctaggtgaaatagttggtctgcttcttgtaccagaccctgaagtgcatgacgtcagctttccagcatgggacgtgtgcagtggtcagtaggtgcacgcttattgaacagtgaagcaagcgagctcaggttcatggtgaaggatcgtcagggagctgtgtcagggaggtgtcccttggtcaaccctagaagtcgacctgggtttgatctagtttgttttctagtcagtagtctgatgtatatgatagtttctctctctctctctctctctctctctctctctctctctctctctctgtccatgttaattgattctttagggatagtggatttgtccatgggctttctgtctgctttactgttaactatatgcactgaacccaactatacagcagacatggatctgatcatcagattagacatgatatcccagagtgaataggattaaatactgggctggagagatggttcagctgtttctccagaggtcctgagttcaattcccagcaaccacatggtggctcacaaccatctgtaatggaatctaatgatttcttctggcacacaggtatacatgcaggtagaatgcgcatatacataacaaatatataaagctaagaaagaataataagatcaagcgctttgaacccaaaagctgctggtttcgtcccaagtgccagataaccagtgctcattttattcttgttgcagaactgtgggcagcatgatttctgtgggtctcctgaggacacagaggaggtgtatatttctgctgggctgaaatgcactgatgtgctgagttaatcacagcacgtgctttgaagctgtagaaactcagcagcatccacaggtgcctgaagcaccctgggaagagcctggcagcctgtgttaggattttagctttagtactgcattctcaggggaaatacaccctgatggactctcatttgatcaagctttcccctttagttctctgagtgcccagcatcagagagcagcaggtagtccagatacctgagaatcagaaagcccaattaaaacattttgttgatctttttttttttctatgctccagcatgttattctttagttttaagttactctcttcctagtactttcttttctagcatttttcagaaaagatatttgtgactttcagatgtgtgaactcaaatcactccatgatcttcgaagtctgtttcatgtgccttggtttggtggaggcggaggtggcccagatcagtatgtttcggtccagcaagaataattcagtctgttttcttgttgactgtgagaggggattggtgactcggggagagggatagtatttgtgttcctggtgtgcactgctctcagaaggaaaccatgctaccactttaatcaagccacctgtcatagtgacagttggacccagcagagactgagtagtgtacatttaaattcatgtcacaagagtgtgagaacattgtacctgcagaggcagagtgagccacttgcgaaggtgcacacattggtgcatttgacataaaaccaagagttcagtcacctctgttggagaacctgttgctaggataccagagggtaaccatagcccttggaggaagagatgctgttcttcactggtcacgagagctttaattcctccttcatgactaaccttttaaggcctggagagtgttttggagcagaaatgagttctgaggaaagtgtagctgttacacagcagtgagactcgggcagatcagaaggtttggtgtacccaaatgtctaagctctttaatcaaacatgaatccagctattgctctgtctgtgtttatagatggctaatgtttgcactcagttgactgagtcaagtggatgatcctgggtaatgaacatggccttcccgatcattcacagagaggccttgatgagcaaaagctgacgtttctcagggagaactgaagaccagaaaacacacttgctctgcatttcaagctggctgcttggacttgacttagctttgtggcccccacagacacatgagccagtttccttagaaaaccaagaggagactgtgctgcatgtccttctctgtctctgcattccttcccccttgacctccgccataccaatttccccaataaacccagatagatggagatgggatactggactaccgtctgcagagaccacagtcctctcccttactctctctcccctcctctcctaacatttcctgtgtagagcatatattacagacttttcccttgcactgagggtgcgaggttgcttgtctagagcctccttattcaaatatgagtactctctggaacacctggagatcaaggaaagatgccaaagcgagaggtaccaggagcaagcatcttctggctccttaaggaggccagagtagttagaagagactctaaagacatccagtgtgcttttcacttagaactatggccagcgaataagtaagtatgagaagagatcagtgaggagacaggcaagggaggcctttttcaagtgcacgtgatgggaatgccttcaagagtgttaggtgggagtgctcagcctcttgaaggagacatgcttagtcctcttagaacctaagtgtgtacctcttcacgcgcatactggacatttgggatggagggcctgaaggagctgggaaaggtgatgacacttgagagctgaaaggtggctgtcttctcatttcacagtagatgtttcttatataaccacatcggcatttgcctccaaatttaagaaggtgtgctggtcctctgatcactgttggctatacctataacactcttccccaaggtgttagctttaagtctttaaaaaaaaaaaaaagcaaaaaacaaaaacaaaaacaaaaatccccaggttcatttcctccctggagggagaagagctctaatacccaggcaaacccagatgacacactactgaaatgatatttgaacctctgcagcaaggcaacacaggaaacaggtaccatggtaatagcatccacacagtaggttacctcttgcaagtggatcttctgttagggctgaaacaatattgaacaaggagctgagctgttcatatgagttccagttgtaaatctgcaaacaggtcagcacacattagggttaatcacagggtctcaccacttcaggagtaaatacagctccaaaggtcacctgtgtcggagacagtgtccccaccctagatgactggactttgctgctcttgccatgctgtttgcataacaacaaaccatcatgtgagactgtattacactagtggggtctaatctaccttaattagattatcacactttgttgtgaggcaggtacaatgcttcctggtgcatttctgaataaactttatttttaagcaatgcatgactgttagacttcagacaaaattataaaattggcctttagagcctttcccagttcctagtgtcttactgagttcatgtgtgattgtgaactaactgaaattcttttggaagctaagctggacaataaagacacatatctgggactggggagatggctcagcagttaagagcactgactgctcttccagagatcctgagttcaattcccagcaaccacatggtggctcacaaccacctgtaatgggatccgatgtcctcttatggtgtgcctgaagatagcaaaagtgtactcatatacataaaataaataatccttaaaaaacataaaataaatgagactcagcctagggttttacatatatatatataaatatgtaaacgtctatatatatatatatatatatatatatatatatatatatacatacatacatatatttaaaagacacatatctgggtcattggcaccaggctctgtattgacttatcatgtctaagtatgtacgagtgtaggcagtaaatatgtgggaaaaacaaaagatccagaaattgcatataggtggagagatgctgcctttctatataagtttatttctataatgcatttttattaatatagaatacatatagtaaggagcataacataattatacagtcataaacatttacaaatgcacacaaacacgtaaccatctcccattgacttagaagtctgcctcttgcacctgcttagccagtgctctgtgctcaagagtaaccagcatcccgatgacttcagcccgcatggattgggattggcatgtaaggcttttgaacctcacatgcataaggccacatagtactgttttcattcagctgtctttatgcatcattgtatctggaaattatttcacactgttgggcgtagcagtttagtgtttatagttatgcagtattctattgaatgtattcattgtactgttggtaggtgtttgactgctttcatttaggggctattgcaataacattacagtgtctgttgcctgtggatatacctgttgataagtgtagatatgagtcatggggtgtggcatagttatagcagacgctacaaaccacttttctaaagttacagttaggacctatactcacagcaggcggtcagaggtaaggtcgctgccctttctcactgccagcccttctggtgggcacagaaaggcatctcatcagttccctttccgtcccccagaactaaggatctagtgttctttttgcagtgcatcttggcacttccttcaggaactgcctattcaagtctttttctgctttttccttcttgatttgtgggagttattccagctaactgctatctatatgtattttagtaccttcccctgttttacaaacatgcctttttaatcctacttttagtgagggaagttttaaatttatagtcaatttttttcttttatgttgtattcaagaaatctttacctaacacaaggtcttgaggatattttcagtattttgctttagacattttaccattttcacctatgatgcatcaggaatagaattcttatgtggagttttgttttgtttgtttgtttttttaactgtacattgaaaggactatgtccctgctctgtggtatgagaacttcccatacatcagatggcagtggtgtgagtttctgtctggatcatttattcaggctatgtaatcactttaaggattatggctttctaagtactgatattcatatgtatgcatgcacatgcatgcatgcacacacacagatcacacacacacacacacgctctctctctctctctctaagatatgggagataacttaaatctatggagccattttggtagagtcatctctctttttcttagctcatttctccatcccctggcctcaggggatgtaaaagtttgctcaagtcccatctggagcagagaaaatctataaggatccagcgtgagagtgttttcctaccgtggcttgagcaccaggccagagtgggttatattctattccatcccctcttactctgttgtctctgcctagctctgggccctgttcgcatcactacagtggctcccttccctctgctctgtagtcaggccaggccagtaaggaagtgggtagcaggtgatggaaaaggacagaggggatgagtgcaaggcctgcatttccctgcaggctcattgtgagctggattgctctagagctcaggccattacagttcccacaagtaaggtttgtcttcaagctctctttctgaggcttcaccatgtttactaattgaggcattacatgtcccctttctcagcacctttccacacctttcttagacttggcaaactgctcaagttgagtgggtcattgcttcactgccccagcttattatagaaatagaagaaaaagaattttctgggcatctcagaaagttaccctgcgatagacttgatagttctacttgagaaatgtacctctgagcaacactgcctggagacagcacaggggctccatcttttcctctctggtaccatttgcagtcttcagggcactatttatgacttaaataaaatcagtagtcttaaattgtatccttcagtgacagcaagcatcttagctatgaggctttttttttttttttctctcctacttcctgacttaagttgataacaggggacacagccatgcctgtgcttgcagcccagacgcagccatagcaccacctgagggtgttagaaggcagggtgagaaagccagactgcaccaagtcttaaagtactaataaaattactgctattgaagaattaaaattgaagcagttctggggagagcagccttaaggtacagcaaatgagaattatcctaattctttcatgagtccagcactgatatcatttaactcctctttcaacagttgggttatttagttgtctgctctagaaattaattttgcaatggcaactgtagcactggggcggacggttgaattacttgcaccaaaatagaaatcatgtcccaaatgtcatttgatgacaacagtaattaacctggatcacacatcagctgtagcagcaaacatgacagtcctagaattgtttagagattaaaatgagaatgtcagtggcaagaagacagagcaccatgtattttcacatgagctttgcctgcttaacaagcagggagcaaacaggcgaggaatttactgtttcccgggtgtggctgaacccgtctgtttctgtgcaggcctaggtgagcctagccttttgtttaatctcacctaatgcagatgctgatttcttttcttctccccagcttctcctttcatcgactgtctatcacgcacatgacatcacacccctaagccacgtgccctacgagatcatgaaaaaaaaaatggtgcccatgagacctgtttgtcatgcattatgttatttttaagacattctgaatttggatatacaaatattaaaaaaaatcccaacttctggctatttataaacagtgagatgatttcagaataaccagccttttattctggtgtgctgatgcttgcctttgctgaggggatcattaggaagccatggtgtcccccagtcaccctctctcacttatgtggcccacctaccttatagccatgtgttggcatgtgcctaacactttggttctaggcaccaaaggcaaataagagaagtagctgattgttcaatttgtgtcgctgacataagaaaccccaagctgtaagaggtggggcactttgcccatccttgttggtatgttcctagtgttttgtaagtgtttaccgagttgattgggaattctgtttagaagactagtctggcagaggtctgtggaatgcttaaacatgctgaacaccggggtaagcctctaacccacggcctgaagacagactgtgaggacacagaggaagttagacaaaatgggaccctgaggcacaatctgaatgaaagtccattggactgtgaaggagaagaggaaagggtggctctggagccttaagaaataacagtgtgaggttggagcaatggctcaggggttaagagtgcttgttctctcatgaggaccaaagattagacctcagcatccagtcagatagctcacagcccccagggatccagtgccctcttctggtccccgagggtacaggcatgtgcatgcatgtgtgtacacaccccccctccctccactcacctatacgtacagtcacatagacatgcatacatagaagtacacacacatactaaaaataagtccttttaaaaagctctagtaagcattgccagtgatgccgcttgagggctgtaggtaggtgccacagggagtctttgccattccagttccttttggatgtgaagggaatctgagacttgttatataaaatcagtaagggctaatggctattcttggaatttatttcctgtgttttaatcccagagcaaagaccatcaagaatacagtctctgtgaacttggaactaacagcagaagagtggaagaagaaatatgaaaaagagaaagagaagaacaaggccttgaagagtgtcctccagcatctggagatggagctgaacaggtggaggaacggtgagagcgagcggagtggagagaaggtttcctccttcctgggatggctggcatcttgggggactcttgggaaaggggggtgactgtggaagtcaagcctttccaattcctgtgatggcgagtgttttattattttgttttactaaagttttattattcctggccactgtgccccagctcattccatcccgtgacctgtgcacagtggggtggaccaagtgacagggatcagttgctcaattagtctctttaagtgtgtatatgtgcgtgtgtggattgaggggtgcacatgtgtggggagggggtacatgtttgtgtatgtatgtatgtgtaggggtgtacatgtatctggaggtgtgtgtgtgtgtgtgtgtgtgtgtgtataggctagagaattgctatgtgtgttatccccctcctttgcaacaggctttctcctttgcctggagctgacccattaggttagactagttcgtgtgccccatggatccgtctgtctccacctccccagctctaggattacaagcgcatgccaccatgcctgacatttttatgtgtcctcatgggatagaactctggtccttgcattgagcatcaaaggctttcccgagagagcagttccccatcctggctagagtctgtttcagatgctctgttttttcatgttgctgtccttcatttcagggatcctggcttcatggttacaggagagcttctgagactttttttttttttttctaataccaattgctttggctaaatgaaaactaggatttgcttcagtcttgccatttacttgtgggtaaatgtcacctctggccagaacttgccttttctgacctgcctcaccattcagttcctcagagtgagacatagtgggctgaagaaaccctttgctaagatggaccctgacaggcctgcttcatgaccagtttttccgcccccttcttcagtctctttggtttgctctataggagaaaatatctcctagagctggcgtgaagcgggtgggtgggttgtgggggaggtgtaaggggtggcttccagattccgggcagacatattattttggtgactttagcattatgacagagctcagacggtagcagtctcttttaatctggaagcaaagcaagttggagctgtgtgtcagaggacggcaatagctagaagtcatttgttcctcagatcccttgcttccctgtggtgtgtgtatttcagcagctactgcagcctgtggtgccctgagagaaggggcctggggattgctgagctggtctggaggtagcagggtctgtttgcagctgcgcagagagctggaagccgattgctggtgatggtatttgttgctgctccttgctagtaaggattgggtatcaacgagccacttattcacttgagaagcaattacgtggcaaacaagaattcaagagaggatcaaaatttgacccagtagcctaaataacaggattttcttctcttcggaagcatttctagctacacatgtgtttcaaaaggtgctagaataattgaataactcagcacctgagctgaatgatgatccctgcagtttggcaggagcagcagagtcgggtgtgtggaaattgggatgggaggtggctatgggaagctttgtggtggctctggaatcctttcgggtcaaatccctgtgggatgactcggccacttagtaaagccctttggtgtgacgttggctcactggccctagaagcattctgagttggacaataaccttgttttaatcgtttctcatctcttgcccgactctagcagaccagttctccaacacatatccagtgccaccttgtggaatctgctctgcctcatttgcctgacttcctgcatgcctagcatctttttggggtcctgcatcctattggcttctttatatgccaccactttaactgtctgttaaaaagtatgatttatgagtcttttggtggaattctacataaatctttaagctacataatttggggaaagtaaggcatagtttctggtatatcacagacctacaataaatgcatattacacaattgtgcgcctaacatggaatctgggcatccgggtgagacctgtgctttgaatgtaaagggaactttcagtcactgtcaatacatgtatggtaatagtctatgctgcacaccaagaaaacaaagtgtgtgtccagagattttatagcaggcagttaacctctttgagaagccaccgagggcttccttgaataaacaatatagagaattgactggagagatcagttagctgggtgaaacaggagatttaaggtgagctccagcttcctgtggggggaactgaattgactggggaactgagggtgagagcggaagaccagtgtagggtgtgggctggggaagcagtggtcttgggtgaacttggcaggtagtataggaattgttcttcaagtaatgagaagccactcagctatagaacacttcagaagagtggcgttttaaggtctcttagttgtgctggagaaaggactggggtaggcagaagaaggtgtggtagaggcagggagaaggcagttaaactgaaaaataggaggtagaatggaatgaattggattggcattgaaacagaaatttgcagggtttggtgaggactaaccatgcagggaaggcggtgtcaaggtggttctgaggcttttgtcttggctaagttggctcatagacagaactgttcccttagactagaaatacaggaacagagccggcctggggagcagagcaggaaagagaaagcctggggtgaccagaaagcatccacaggagggtcctgcgagaaggttgttctggggctcttcagaactgcaagagggaacttgagtattactgatctttcctgtggttgaaggcataggtagaggcaaggctcctataggtgatagagtggagagggaagagaggaagtagaggttgacagactcctcccaacagcctgtggccttgtaacctctgagcagctggatgggaggtgttctgcagagaaccttgccttccctgctagtatttgtgttttaaaggtgacattactggaggcaatggtttgtaagtgcagagaacatggactgatgggagagactacgggtgatcagagagcagtgagggagagtgaggaggctcgagtagtgctatcccgaaccactctcggctccctgtacctgactcctgaggcatggtagccatgtggaaaagaaagctggcaggatattgccaagttccttttgaattatgggatagattgttggatctaaacttttaggaggcagatacttaatttacttcagtgttccttgggtactgatatttctacattgggatctgaacacgctctaggagccctgacaatgggtactttccgtacggaagatactcctgtccttgcatggtatgcgtataatttaaaagcctcactgctccattccagctgtgagagagcaaggatgaagtgtgtgcacacgtatgtgctgtgagtgcttggtctgctgcagttgccatcacagagaatccagtggcaaagcaaggcaggaggaaatcaattacaaatcaggtgcagacagatgaatggataaatgaggacacatgtctaacccagttggtggtgacaggtgagaaagaggcatgccctgttacatatctagaggctgatctaaggtctaacccctcctacctccacctggaccaagtttcagccttagaagcttgattgatactatacactgtgagtttatgttccctctaggacacatgttgaaatcacagatcctgaggtactgggtgttggtttctttgggagttgtcctagttaggacttctcctgctgtgatgaaacaccataaccaaaagcagcttagggaggaaagggtttagtcagcttacactttcacattgtagttcctcactgaaggaagtcagggcaggaattcaaacagggcaggaaccaggaggcagagatgatggaggggtgctgcttactggcttgttctccttggcttgttcaggtcactcatacaaccctggaccaccagcccagaagtggccctactcacaatgggatgggccctcccacattaattagtaattaagagaatgctgtcttttttttttaataatacaagtaagaaataatattttattttcagaacagaatcatgaagcaatattacattttttttctggccttctgtgataatgcatgcacatggtgtacagtaattacatattcagacaaaataccaatacacataaaacaaaaacatgaataaaaaaattaaaattaataccaaggtaaaaattaaattagcagacctctacatcatagtactcagaaataatccatgttaacaagttgtctgctatgtatacacatatgtaaaagaccttacaacaaatgtaatgaatttccacacattatcatcatatacagccttttaatatttcttacactaaatatcagtcaagttacagtaaattcttgaactgctgtaatggttggtttaataccacagcatcgacatatacatccaacacagatttttaaaagagagtgaagacaagcatttaaaaatttaagaaaatgtaaaaagtaaacacaaagatatttaatttttctccttattctgcattgtcacagaaaaggtagggatacaattttgatgacctatttttaccttccatgcactttgatgtctgcatctttgacttcagaatacatatctgtaatgtcagattatacaatataaattaagtataagataaattaaataaatgctctgatgcctccatcgcagtaggtattgttcatcattgctttgtctattcagagatatttatgtttctatatgatacttaggattattattctatctgtatgaagaatgttattgtaattttcttaggtgttgtattaaaacaataaagtgtaaaaggtcataaacgtaccaaaagctccaggaaccttacccatcacagaaacacaagtcaatactacactgagactttacttcagcatagccaacaatggccagcattagtgcaacaaatagaaacaatgttttgttaggctatggttatgtaggatgctgcaatatcgcctgctgctgggaatgggaagttgtcaagtccttacagaagccaggattgaggttaagagaatgtctgtcttagtttgggatttactgctgtgaacagacacaaggcaagtcttataaaggacaacatttaattggggctggcttacaggttcagaggttcagctcattatcatcaaggtggaacatggcaacatccaggcaggcatggtgcaagaggagctgagagttctatatcttcatctgaaggctactaatggaagactgacttccagggagctagggtgagggtcttaagcccacccacgcccacagtgacacacttaccccaccaaggccacacctcccaatagtgccactccctgtgccaagcatatacaaaccatcacaatgtccaatgggcttgcctgaagtccatttttatggaggcattttctcaactgaggttcccatctctgaatggacactagcctgtgtctaggtgaactaacgcaagccagcacagaggtgactatgtcttgaggactgttgcctccgtcatcccatgagactctgctgctgcttatttgaggataaaaagaggtgtcatcagcaaacccagaagatctccctgaccccatccatccaagaacaggatgtctgtgtcgccacacggacctccaacttctaacttccgagttaggagaaatggttctgttgtccagaccacatcctgtggtgctttgccatagcagctctgagagactgagatggcagcctctttagcactgcaagctggactgttctcccctgcatatagttgggccttggttctcagatgaggacctgtgacttggagcgtatattctgcgagcctaattctttctggcattgcttctgaggcatactagccctctacacatgcatggagaactaaggagaggccccgtcttttcttgtttgtttttttgtttttgttttggttctctggctggcctgggactcagatctacctttgcctgcctctgcctgcagagtgctgcagttaaaggtgcgggccaccaccacccgagcaccccttttattaaggaaggaatggggagagtcacctcacgaccatggcttcctgcagttattgtcctctggttgcaagcagtggcagctgcagcagcgaccgactctgctcagcctaaatggaatgaaggcctgggaaggatataaagggaacacagcatctaaagatgctgcacacatgtctgcgcacatggctgaagtggggagcaaccagaggatagccgcctttcaggtgtttgcttcccaaagcacttggagatttggaggagcaggatagacgtggccatagcgtgctttgtgtagtctgtgaagggcaggctactttgactgtgtgataggtaaagcctgagtttagtccctgggtgaaaggagagaactgacttggtgggttatgatccacctcacaagtaggccatgacgcgtatgtacgtgtatggacatacgctaagtaaacacctacgtataaattttgaagtaaatcaagtcccagcctcatagctcacgcctgtcctcccagcatcttagaggcagaagcgggaagactccaagagaccgtgcctcaaagagagtcatgaaaggggaaacaaaactatactttttctagtttcaactccattttttttttttttgggaggggaagcaaggatatgtgaatgtaagtgtaatttctaagaaaaataaagggggggggaatcaaaccaaaaaagagaaccaagtttaaaatttaaaaagcactttttagttttgcaattataattctcttacatcatttcttctgccccttccttccttcaagcccttcccacatccctccttgcaagcccctcccacatccctccctgcaagcccctcccacatccctccctgcaagcccctcccacatccctccttgcaagcccctcccacatccctccctgcaagcccctcccacatccctcccagctcttctttaaatccatggccgctttttgtgtgctagttattactgcccaacttacatttttacagatgacacgtgtttatttgcatgtgcgcgcgcgcgtgtgtgtgcgtgtgcgtgtgcgtgtgtgtgtgtgtgtgtgtgtacctgtcacactttactctgaactgcgagttcagaggacaccttttcatgagttaactcttgtgccccagagactgaattcaggcgatgaggcttggctgcaggcatctttacctgctaaggcatgttgttagcccctaagacaagatttttacggaggttcgtgtcagggagaaaaaatgacccaaaaatccagctgttggggtgtcagggaaaggtggtctggtgtgtctgcagagtctctcctgttgaacaattaggtatacagtgagtgtagtgggttcctattgatgctgtctggggaaatcataacagtaaatgctttcttttgtttggttttcttgagacacgattttgctgtgttgtccaggctggctttaacctttcatcctcctgcctcggcttgcccagtgctgggacttcagtaggggaccactgtgcctgttgagattcactctgggggaggtgctggtcccctcttaggcttcataagtgtgagctcacaggaattagcatttcagtcaagatgtctaatttgttatgtgttcttccttccttgagagtgcagctaaactaatagaaataccgactgctcagcaaaccacgtggcctattcaaaaggtcatgaatgtaaagaaggccacagaatctggttagcctgtgcattagaaaattgctgtagacaggattaggggctgcagaggctgcttacaatatttttaggaagagtgtgaaggatgctatttgtatgcaaagcagcctcataaaggaatgatttctttcttttttttttttttttttaaacttcacatttatataatgacgtcttgttgccagctgttcctgcccatctggcaacttaaagatctccttttagtgtcttcgatacagaaattgcttagtgataggtttgccactaggcccgtttaattggtattaaaacaaaacacctcgtttgccagatctacagtggtttctggtggaagctgtgagtgacctgcaaatccctgccctggagtggctgagaaaatgcaattacctctctgtgttctccagaggctttggggactcaacttaggaaaagaattactagcttgttgctatttcatgtgtgaaattttaatgatttcctggcagtctaatagtattcctaaagaaaaaaaaagtccaaataaatccattaaatccattttagaatttttaactaatagacctaatgagggtttttgttctttttttttagtctgccattctcatccactgaaattgatagattctcccctccacccccaacccccccttttcagaaatgttatttatgctctctggggattttcgttttataattagaaggttctgcaagccttataggtatgctctaacagaatgctcctgtgtaaacacagatctttttagtccttaaaggtaattacagctgacaatagtaaatgccaggatgcttatttaaggacaggaggcctttcagcgtaggacaccagacattttccaaggttagaagctcttctttaggcagcagatacaagcctcgtgggctggactaaaagaaatctgcttttaataaaccagagcgaaaataaaaaaccctgctaatctccacttggtggtctctctctctctctctctctctctctctctctctctctctctctctctctctctctctccctccctccctccctcctccatccctccccctggttgattgagagcattattcctccagggttggtttgcagccctcctctctgttacaatcagttattccataatcatctcgtggagtacactgcagtgcagggaatattctcgattaacatggtaagattgccatggagacagattgcctggtgtcagctcttgcatggtgtttggaatttacagtccctagacaccggacatcgtggttaccagggtcgcttctggaagtcattcccctgccctttgaagggcagtggtgtttggttcctccctgggttgaagctgtgctgcctttgcttctgtgtgtggctgctttgttcagctccgtctgaatggtggttgaaaaaaaaaaatcctgcctgcctgacctttagaatatgaactggcgagagcttgctgtttacatgtagctttgtgggagatgtgttgacactttgattcagagaagtgctcaggagaaaccagaaaggctgctgtggcttccaaacactgttttcataatgataaaaataaccctgaaatggacttgcataactatttggtattttactttgtaaaagaccgcttgggtactaagttattttgaatatgctagaaaaattaattgagactcagaacgaatatctgaactgccaagcatgcgtagttgcgcactcctcagggagcaggggtggacttcagactgtgatgctggccgtgctcctgacatcctccctcttcctgcatctttagagcaatttcatgataaaaggagccttgcttcctcttctgtacagaaagcaaatgaagaagctaagcaggctacgtgcctgcgagtaattagacctgtgaaaatgtgcagcacggcttcaggaacccgctgcagcactagagatgtttatgagagtttattgatcattttcaaggggaccatagcagcagggtcagctttctggacctctgcaacctggagcatcacctacccctcggtaatgatgctgtcagaagaagacaactttagggggaatcggatctgggacttggtttgagcaggtcacttgtaggtcacaggagttaatccctggcctctgtctgcccagatgaatttaaaagggggtgggggcagccctcagttcatcttgcttacagatatcattgcctgtctagccatttggaaccaaagctcgcagggaatacatctcttgcaaatgtcttggatcttatctctttctctgcagcgagtgtctgcgggtgatctggtggtgcatggagggtttctgggtcaggtcagtacatttcagagtttcaccttcatcgggttgaagcaggaaggtcaaattaatagtgggttgctgtgtttcccagattttacaaactattcctgaaaaatccaaaaaataaccatatgccggactttcacaaatgccagtgtcagattcctaagaacagaattagaaagaaacaagaggttttaatatatgctgtgcatttcctgagtgtctgagggcacattctgaattatctgggtggttagaaattatgtctgtgtcttcatccatccactcacccactcaactgtctgttcatctcgtcatccatcttgcctctctgatagcccatgggtttaacggactgtagagaatattgattctttaaatgagtgaaattcattcctcatgctaacgttgttgatgaacgttttgaaccagcgattggagctgggcgatatactgatttgattcaggttcagctcagaggtcaccatgatctggttttatttcaggtcaataattttagaggaacgctcccacatagcgtgtagtccagttgacggggaaacacaaggagactttgttttacctgcagtgaagcatggcttatctagggcttgtttcccgttactgctttagatgtaactgatacaaaagtgaagtcattcgtgttagctttgcttacatagaagcctgcacacaagccttaaagccagggcaccccagtgttttgtgtatgctgagataatgtgcgctgtgttcaggtgggttcctggaggcatgaaatatactgttcctttccccgacttttggctcagggcagtttcctgggaaatgtttgcagaacagatattacgagctgggaagctgagtaaggtctgaggtgtcctgaggctcaggggctggagtgaagttgctggctacactgtggtggagaactgtctttggtgtgggtttgctttcaagtattccagctgaaagatggagtcaggctgtgtggtttccatagaatctgtttcctacattctgtctttgcatcatgattttcctgatggggcagcccctggccagcttgaaatccgtgccttttccccctgtcagcattgtcaaattgagtgcttcctttgaaggcccagcagaccctgctcggcggattgagaagtggtgtggggattccagattagctgcctttttttttttttttccctgagactacctgacatcacaagaaattattctatttgaactctcctgcagagccaattaatttgggcttcctgcggggagagtgcggtggtggagctcctgatctcgaaggaccgatccagtccttgagtccaggttgccctaacttccaccggctcccaagagtctgagtttgggaggagtggagtcccacagcgttctggttaaacagtggcgctgtgttccttgctttggctgtttctactaatgacacagtaacataattaattggtaattagggtgcctcaaaggtctatttccctttgaatcggtgactagagagaatatgattctagtaaagcactaatgtatttctccacaaaaggaaacatgtatgcaggagctcgcaggcagtgctggggttggagcagttggatgagctctgtggccagtgcagccgtttgatttctgccatgcattcttggtctaacagtggtcgattagctacacctttcttcccaagcagaaagaatggactgtagctctacacaaggactctctgttgtgtctgctgtgtctttgtcactgggagcggcaattcttagagctcttcctggagggttgcatgcttgatttctttagttctcagcatcctgcttgctgtattttctcaggggaagctgtacccgaggacgaacagatcagcgccaaggaccagaagagcctagagccctgtgacaacacacccatcatagacaacatcacgcctgttgtggacggcatctctgccgagaaggagaagtatgacgaggagatcaccagtttgtaccgacagctcgatgataaggtctgtggttcagagcaggcgccccatctccgtgggcccgaaagacgccactcagccccagtgggccagttaaagagataagttatctcctaatggtgaagagataagaggaagagttgattgtgttgccacatcagggggaagaatgtggaaggggctccatgaccccaaccccatctgcagggcacagacctgagcattatgtttaaataggggagacattgggatggtaggcagtgtgtggggatagcctcagttttggttctactggatgcttccaagaactattgcttgtgtggacatgtcagttcctaactgcccggagagctgccatttgaagactgctctcgccctgtgataacgtgtctcccagagtctgttgttattggaatgcaagggcactacaggtttgggttaccagctacagaccttcaggtactctttgtaccatgtgccttgaaaggggatttgataggctaggtatcatgcgttttagataggccctccctgagtattaactctgcttctctgcggagttgatcaggtgactggcagaaagtaaagagagatacaaaatgaagatagagatggtaggcttctatcctgtttttccttgcctcgtggggttagtgctctctcagaaggcagctcctgtgtgcctattgtatacattagccagagactggtagtcttcactctggtacaaagactgaaggtggcacttgcagtcagccccctggagctgaggtaggctgcagaccattattgatgtatatcttcctgatatctgttttctagcttgattactacagaaagttataatcaaaaagagctgggggaggggagagttggtctagatagacaagacctcacttccagaaatctgggaagattattacagaagaggacggcagtgtgagagtatgtgggtgtgtttgtctcctccttccttctccgtgcctttcccctctcttctcagagaagtcaacagtagcagccccactaggttcaggcgactcctttggctcaagtgtgaggctgatcacatagctgcatggccctgagctcggacctaatcactttaatgactgacccctctctccttgtgaagctcttcccggaggcagactaatgggtgatgcagtttgaccatgttaactggggttgctttctcctaggacaaactcaaatagtcatgtgactagagaaaagattccttgaacagcaggtctcactcatccccagtaaagtccacttaggaaccccggaggcccagaaacttaaatcagtgcgccctgtgatgctggcatattgcccttgggatatcctaagcgctttcagttcatttnnnnnnnnnnnnnnnnnnnnnnnnnnnnnnctatggggacacctctggcccggatgtaatagttttgttctgggaatgccaccattaatcttacagggctctgtctttgggttacagcccagagtctgctatcacctttgcaagctgaatgtgactggttgaggattctcctttgcttgtctgtggttctccatgttatatgtcacccaaacattaaagcagggtgaccctaccattccacaaacacatctcagaagatacccatgagaactgggtactttgcctttcgtgctgagtccccccccgcccccctcccccccgcctgcctttttaaacctgggtaattgtactcaacacctcaatgcaaaagtagatcaatagtaagttaatagtttttgcaaacgtattgatttctccaaagaactgctattgttttcaacagtgaggaaaagccacacgcaatctcttcctcactttacagattcccacatgtactgattcttggatgacaggtcagaattggttctatgatgctgagagatatgggagagagtggagcacagaggtgatgccccggaggacatcaaagctctcggtctactgtgccgcttgactgtgtcttattggccgtcattctcacgtgacctctcagactctagaggaaggccccatgcttccaatgatttagatgtttagattctttgagaatgcatgagttgggacacagtgtcttcttcggttattgaagtctctgggatggagtggggcattcgctggctggtagcatgtctttcttaagttttcacagcctgtagttgacagagcaggagcgtgttttcctagctcttgaccttgagccccacactcacttcattttggccttagccctttaaccaaggaactggttaggctcagtacgtctttctaggacacagtgggagaaagattacatagtttctccaaatccctctgtgctattcctcatgggtctaagaagagataaacgcaaggtcctgatccttgatggagaagctcgcactttgtagtagacctgcagcttaatgataagaggcgcagggacgacgcccgtgcttacctgtacgctattcttatctgtaactgagggctcacagatgtcacttcaaagattgttatggagactaaaagtcccaggtagataacaggatgctgtaaataccaggttgctcatcagtctcctctgtgggttctctttgcttgatgtagaagacgcctcatatggggccgtgaaaggctgtcagtacagtgggaggctgggttctagagtaaaaatatacacggtggctttgtgttgctcacggaaggcagtaaattcaagaactgtaagttgactacatactgtactaatgactgtttatcaaaaaacatatccagatttggtgactttttgacagcggaggtgaccgtatcatttcatgtataagaaaaatccaactacgaaattaatttctgaaaagtgccttgaaatcttttatctcagagtgagcatgcttaaacatgtcctgagagatacactcgacgtgcagaaagtacagcaagcacaccttattcagaaaggcctaggaaattacagtgaaatcagatagacaacactaattccttagaaggttgccctcataaggggcaagcctactcgaaggcttgtctctaagcactgatttgccttctcggagagctctgttttaactctctggatggtttcccatcacatcttagcttgtcacctgtcggggaggaaggctacatcttcaggctttgccaagagtgccgtgtgcaagctcaagccacatcaccctgtcccttcttatttttgtccgtcccttgggggcagttgtggattttgggttgttttgcttcgttgcctcggggaagtgatgaggttgaactttttgggtcttttattttaagctctttactcttcttgtgctgaggagcagaaatataaaattggtccttgtaactgacatgctaaatgtatgaagctgaaggaaagcatggcctagaaaacagtgagttagctgtgcaagcgccagttcttggcagttttgctatgctgtaatttctctgattctttttgccagaaggatttggcaaggagggaaataatcaatattctattcaccatggaagaaacatcggtgtataaagttcagtgcacacgagcttcctgagcatactagtgagatcgagtatataggaaagaccagagacacaggacgagggtgtgcagagccttccctgcacacgtgagagtgctggtgctctggagggtaccagctacaccatccgcttaatcccgtgccggtgatggcgtagactccaccatacatggtgcagatgtctgtggcaaacaggttctgtgaccaggctccgccattcacctgcctcacctcacctctgaagcggatccaaagtgcaggagaagggtccttcaatgaggaaaacactggcacaaacctgtgtttgaggaaaaaaacttgtgtttgaggaaaaaacctgtcacaaagacaatgtaatacactgagctgttatttgactgcttgggggtgccagccgagacgggcattccaataggacttttataatgaaaggagatgtgagcctggagccacattgtcattttttttttcacagaatgtgcttaaaatttcctttgaaatcatgaaaacagagcaggaaaggccacattcttccctagtggttccgcctcaagcctgctgcctgcctgtccttcactggaggtggcttgctggtgggggagagaggcaggcagagcactcttgctttctcaatagcaacacctagtggcagtgaagagagctgtcgttttcctgtgtgctcacccagccggctgcaggactttgcttgttttgcttttcaattggcaagactattggttgcagtcaagagggccgtctattggagaaaactccacggaagctcgagtttttttactctaagtaaatgggcatggtgtagtagccctttcttcccgtcacttggcaacattcctggtcacagatgggcttgccagtttacatctttatttggggaaggatgtctctgtagtccctttcagtcccgaagtatgagacccctggtttctggatgggcaggatttgggttctccaggcagatgttacctttcctagaaagaactctacacggcagattaccaagctcctggaatggcccctgctgcactttccccatctaatgagtgaactcgggactggcctcttggtgtctgattctggaaggggaaccaggatgtcaaaaccgacacaactaactaaaaattaaacatgatgtttcatttcaggatgatgaaattaaccagcagagccagctggctgaaaagctgaagcaacagatgttggatcaggatgaggtaacagacacaatgaattcttttttacagaggggtttttttttttctctctctcaatcacttttcgttgataatattagtcctagaaatacagtttgcaaatagccttttttttcttttttttttcttttttttaattgggtatttacttcatttacatttccaatactatcccaaaagtcccccacattctcccccacccactcgccacccaccccaaatagcctttttttaaaaccttaaagcgcatggagatttcttggtcgcccttctctcagggtctgctaaaggttggttgtggcaatgtgtagccagcaagctcctgactctgtagtactctgagcctcagggttgctctgtgccgcacttagtctttggggggcgggcagacacctctgtcccggggagggtggtgcttgctcagtctctgcagcagcatcccgttattttaggctacttcacctctacgaactgcctcatagacagaatggtttttggcatctgagtataattaatcatattcaccccgttagcctctcctatctcaccggcctctcctgcttctctgtttcctttcccaagccctcaagagtccatgtagaacagaaagtacgtggcatttgtcttcctgagtctggcttattttgcttatcatgatgatgtcttagatcctttcctacaaatgacatgatctcctatttctttactactaagtaaaacttcattgtgtgtatttatatatctattaatcgtctgtctgtcatctacctacccatcatatatttacctacttgctgatttgcctgtcatccatccatcccgtctacgtctgtcatactttctctacctagtcgtctgttgatgggcacctaggctggttccgtaacctggcagttgcaaaaggctggtgtgtgttttagcatagactgtgtcctcctgttctgccctacaggggatacacaaacaaaatcaaaagtagaccatcaaagaggaaaggcagctggggccgtagtgctgctactctgtatttggtacactaaaaaggaggccacctggtttcagcacccccccgccccccgccggcattcatttctaccacaaatgtcttttttgcaccgttctgcagtggattttacaaacaggaacccaagccaagcacagccagccgatctaccagagacagcattctcttgctgagatcacctaagtatttttctcttttgtgctttaagatgcttcgttgctaaagtgcctttggttggcttatacagtgccggcaggtggcagagatcgatgtcccagtctcagcccccacacccagggagctctgtaaccatttccttcctttctgcttcccatcatctttccagtgtaatgagtgtggttctgcagggaggcaggctgtgtctttggagtcatgtgaaccctgtttaatagattcctaccttagctgtggttgtggccacttatgttccctgttgtccgcttccacatgtactctgcatctccaagagtggttcagctgccttggatcaattccttttgttaccattcagactttaatattttttccttgcaaactgataaatgtccattaaggaaatcagacaataacaatggtaacagctacatgaaacatccacaaacccaggacctcattttaccatgtgtatagattttagggtatattcttctatacagttctgataaacagtaaaggaaagtaacttcatttcaagtactgtttgggtgattttgaaatgaacttaaatacaatatgaaattgtggcactgtttccagcggctctgccagtgtactgccactcattaaaagcagttctcccatcttttgtttaacatgaaaaagccaaccagctgtagtgccctggtgtacgtgtgtgtgtgtgtgtgtgtgtgtgtgtgtgtgtctcagtctgacttagagcataaaattcttaaaaggtaaaaaagagaaaagatttttgaaataacacttgaaaatgtgtttagcatctgtaacacacggtgagagttctccacaatctgactgctcccaacttgttctcccggatctggttttaaaattgctttgtgcagggagagcgcaggtcgttgacatataattagtgcactcacctggccttctccttgccccagctcctggcttccacgagaagggactatgagaagatccaggaggagctgacacgcctccagatcgaaaatgaggcagctaaagacgaagtgaaagaagtcctccaggccctggaggagctggctgtcaattacgaccagaagtcacaagaagtggaggacaagaccagggccaacgagcaactgactgatgagctggcccagaaaacggttggagcaatggtgttaaagggggcggggcttctctgttaacaaatgggaaggcagttggctgagtgcttatctgtgtaagacttggtgtgctccctgaggcctctcctccagtcccttcaccacagactacccagcacagctgctttacacccaggaagctgatgacatcagcaagaatgctttctggaaagggttaaatgcagatgctagatccaggaaaagcttagtgagaagtttgactttatggctcttttggcctcaggcgagatttttaaaccgtcctgagtattcattgctttatttctcaaaaacgacaataatgtgcttcttcatggcacctgtgttagtgacactttacgtaaagcacttagcaaggacctctgtgtgtggtcactgaatagcaccgaaagcgttgttactaaagagcagaggcaggggatgcccaggagttcagcagtccacagtttacatcctgctgaatgacagtgttccccgacttcccaccctcttgtcctagtcggaaggacagaggtaagctggccctgttcactggcttccagccgagggatcgctgtatttctggttcctccctgagagacagctgttgtgggttttacttggtgggctagtgacaggtagtctgctgtggccggtgagcatttggtgatgtggcggatgccatgccctttgctgcctggagatggctcacagagaaattgagttgctgtagcctggtgtccttggtggctctgcctgaaggacctggtgtcctggactgtgccatactaccttaatagaaacatcagtcccgggcactcagagcagggtggggaggaaagcactggctgctggcagtggagcggacaggaagtactatttactccccacatcctactgcatcggggaagaaaggccttcctaatggtttccatgggacagggctgctatgtctgtggtattaaataaggtgaaacaaatagttggcagtgctgatggactgtaagtccctgcagactcactgagagaggactgccactctgcctctactcagtgtccccctgggttcctacagcgtgtcccttctgtgttgtacatctgaaagcaaggcaagattttctatagtacgcttctcgttttgtgtcagaacaactattatcagactgctttaatatactatttttagtaagtggtagcgactcactgaaaatgcctttgaattaacttgcaaggcccggggaggagaggacttccttctgcagcacaggctgttggtaccaagatgctagaagagctacgattccagtgctgcgcctgaagaaggcattgcttctcctgctaacaatcggggtggggggatagaaaagaggttaatttgatgaagtttggtgagaaaatcgagcttttgctgctatgaagaagctctgctatggaacctgagtaattctgaagaattatagtatttaatttggcttccctgaggactagaagatgttctaagttgttacctatcctcattagtgtttgtctgggctattgattccagaccccattactcagggtatttggatgggacccagggaggagatttttgtttgagcatggagctggggaacctgaaatagaacaagggggaagaaacaacctttggtaagttagaaaatgtagttaaatcctataaacgtagggcctctttttgcgccagtgtgtacaggtagagaccaagtcagccctcagcatccttctttaaagtgtgctctgtctttttattttgagacagtctcattgttttggaactcactgagtatggtagattgttgtccaatggccagaggaatccttccagtcctgggataacaatggcgcaccaccagacccagatagagcttccaggattcaaacctaggtccttatgcttgtgccccaagcaccttacagacggagctctctctccaacctcttatttatttaaaaggccttactacaatttacttatttttatgttcacgtaccatggtacctgggtggaggtcagaggacagtttgctggagtcagttcttaccttgacccagtgagccctgctctgggccctgaattcatttacagtaactcactttgctagcgtcgatataaccaataataataataataatacatatctagtaataatacatagctggttttacaaggtaacatctctgaattaagtttctgtatcagaaccaagtgctacgcagcagtcagccttcagagtgcttttccactgagatcagaggagtgattaaagagctgggtctggcatgggctgttgagctctggaggtcacaggtggaaattcatgggccaccttggtaacctgtggctgactttgttttccagacgacactgacaaccacccagcgagagctgagtcagctgcaagagcttagtaaccaccagaaaaagagggccacagagatcctgaacctgcttctcaaggacctgggggagataggcggaattattggcaccaacgatgtgaagactgtaagccagacttgtgttctctgttcctaccctgactggtgtgatccgagtcaagctctgcagcacctgaggctcagggctgtactctgcacctggcgcatgctgaaaaaggagagctggcgcatgaagcaggggctgggggaggggatggagaggaacagtttgcctttcagatctggggggcatcttccagtcttggttggttttgtgtggcttgtttttttttttctttagccttacctgcaatgctctcacactggggctcagctgggagaagctgcaggccaggtctcagtccccacccttccccacccccccagcccaatgcagtgagaattctccagccaagcagtacgaattgagaaagcttccagctgaaagtcataggcagctagcaggggctgaaagagtaaaccacacttaattatgtgtaacaggaggaggctaggccttgttactcagggtcatctgcatcacctggggctaattagcaatttagaccccaggctgacctcagacatactgaagcggactctgtgttttaacaagatgactcgtggcttattaaagttagagaacccaatttggtttcattgcagtggctccacaatccacaggacccgactgttgtgtttcctctctgcccatccttagctactttcattttcatatctttacgcttttgcctcgtagcaagatcactgctgtagcaccaactgtcaagtctttattcatttacatccagtgtgctgtatcactaaccacttttatccaggagaggggactatataccagaaattcccaatcttatgtagccttagggcagctgcaaggcagcggtttcaggccctgccaggttaagcttttaagtcacggctaggctggtctgtgcttgacggttaatgtttagagccacatgttgctgttgagcagtgtagttctgacatggggctgattaaaggctcgcaggacctcatggagtggatttgtgggacgttggcacctcctgctgataacaataagaaaagatatttttatgctaagatcttacactgagctgaggaacacattagtgaactcaaagcgtgtctgtgctttgccattaaaggtccttcctgccggaaatcctaagtatgatgagaggatttttaaatacctaattgcatgctttgggattatttttaggttccagacactagatgcccttagctaatttcattgatgactctcacttacagatcacggtagtctcagagagcctccttccatgctggaccaatggcaaaggctgccagtgtatctgtgctgttgcattatgggagggatagaacggggagcagtatcgggaggcaaatctcagtcaccaacccaactcacgtttagcaagggcctccatgatggggagtcacagctgataattgtagcttttcctgctggtcacttagtattgtgctgcagtcattgttaggtggtattgaattcttatatggttaataaatcacaatacaggaacgcaaaactgtatacttcatgtttgctaccaatatttagggctcatacccaatatcattttatctcagttctcaaatgtttacacagaaaaatatgtgatttaatgacagcaatgataacatttgaggaggtgggaggggcagagagggggctgatgggaggacaccgaacatcagaaattgctggcgttcctgggctagattctgctgggacatagtcttcctaaggtgcaaggctgccctctggtggttaaacatagtgcacacaaagctacttttctgcatggttcagcttgtataccatgcatcttagcagatgggtctaacccaataccttgtctccatttttgttttctagtggagttctgaaagttagaaaccagatatacctcattcaggaattctgtcagaaccatctcttgtcagtgttaacttaggcttgttcttagatatcttatcagagtaggttactgtctacttggaagggcagctccaaaaaggcaaaggaaaagattggtagcagcagatggctaagcatggaaattttcacatgaggaggcactgggcgattggtgcattctctggcattagaggttctgtttgaagagtgtggtgaaagtcttttatagttcagccattgcatgtagacatcaggctcctcaccactacggaaagtgtggagaagagaattgaagtgctgggtggaacttcttctctacaggcgagattatgaagggcccccactagggacattgggtcaccgttgtagacatgcagggtggggcttctgaggagggttctccttcataaattcttcaatagtttttcttctcgtatcatcctttctatcctcaaatcggttataaggaagtgtatggttaacagaggagcacgtttgatgtgggttttggtgggaactttcttgtgtgcaatctctgaggacttgatggtgacttcgacatgtatgtttttggcttcccctgtggctacaatgtttgccccaaagctagggctgtctcagggacccatggttagggttcacagacttctgatgtgtccttctgtgctcagctggcagatgtgaacggggtcattgaggaggagttcaccatggcacgcctgtacattagcaagatgaagtcggaggtcaagtctctcgtgaaccgcagcaagcagctggagagtgcccagatggactctaacaggaagatgaacgccagtgagcgcgagctggcagcgtgccagttgcttatctcacaggtaggctatccattggaccctgttcacgagcatccattgaggtctgcccctgatccggtgcccttctcagggttaatagtgcgtactagggagagccagtgcactcggccttatatgagtgggccttaagatagcccacagtcctcttgtgtttctgaaacaaagattccactttgtagctgggattatccttgaactcatcctcctcctaaagtgggacgtagtgggacggtctgatgctgcttgtagtccaagattagtcttgacctcttttctcagccccacccctcaccccgtactcgaatatgggtgattggtgtgaattgccaagcctggtctctgggtttatccttaaacctagattttgttgtgtaaattacacaaacccctcaaggcttctctgtcttcaaagtgtctcgatttctctgcccactcatggatggctttgtagttgagcatatatgatgtatctttaagtctcctattagcgcgggaagattcctacatctgtaaatccctaccatgggagcagtataagatgtatgggtagaaactactgtgggtggtggtggcaggtgctgttgcactgtttttcacatgtacacacaacataaacatgtcatgtgcattttcttgcatgatctttaaaaagttttgtagggagattttatttatttatttttcaaataaaggtatgattgtgattaaatactttgcaaaatacacgacggtgaagtctgggtttctcaagctcagggcatgtgtccttgatgagctagcaagccagctctttccccattggaatggcgtttccatctcaggaaggtagctcagaggaccatgggacagttctgggctgcacggacatgtaagcttacatttgggtttgagatttccaagacggtaccagtgtgtgctgttcaccacctcatagctgagtcgtttggggaaatgggtaccagtgtggactggcatgtctaacagtgccaagcagcagggcatcagattgtgctatggctttaaacgtatgatgcagtaacagaaagagctccaactttcttgtctaaaatggattctatgggttgtttttatatgaagtgaaatattatttaaagggcactttagtgctggtatgtggtagaatgttgataaacatgatgagatataatttagcaatccttttgaaaacactggtaaaatataaaaccagaaaaaaaatacatacttggtgttctgtatgtgtgagctcaatacaggtgtgctcacatgtatgtgcacatgtggagaccaaaggctggctttgggtactttcttctgctgcttttcttgtctactatatatgctcatgatgatgagtctagtgcttgtgttttggctagactggccaacaatcctctgggacccacctgtctttgtccatcctcagtactggggctgtaggcaaatgccaccactgtcagtttttatatgccttctggagattcagatataggccattatgtttgtgcagaaggctactctttgtacatttccctaacccggaagtatcgtttggtccagtaattttatatatactatttttcattggtaatggagatgacatttttaaatgtcatatggcattataattttctgattaaaatattaaaagcttatatggaaactatggatgcactattatttgacattattgtaaaatacattacccaaatacctgttaatagacaaatgatgaagttatgtggaacaatattacataacactgacaaaaatccataaaacttgggcatttggaaagtgtaattataagtaacaaaaacagagtttacacacacacacacacacacacacacacacatgcctcttaatttgtaagatggtatgtttttttataactatattgtcattagcaacaagaaccttttttttaatttgcagcaagacatgtttataatttataaaaactgagaggaaagtacagcccaactctagtctctaggtcacctctgagactatggcatgagcttgttggctgttcctactcccaacagttgggggctgaagtcagccacaggcagagcccagccctttctctgtccagctggacagagcagctccatgcccaaatcctgcctgcacaccgtaccctgccatgactactcaggttagctgtgccccgtgtgggtgagcgaggaggagacggtacagcctgcagagtccgtagacaagggcatgactcagtctgcagtgctcaaagtactccctagacaaggacgcaggctgtggatgctgctcactggagccagtgcagccagggagagggggagcagcactcactctcaagtgtggggtccccggccttggggtgatactgactgctgtatgagagctaggacgcttcgaaagtcagtcgggaaagccttcctaagttagcagccggtgcactccccactctgccacaatacagaaagcctttgcttctgtcagaaaccttgcctcttttctggtgtggtttatgaaaactaagagtattcctcattgaaattctctcccttctttgttcatatcgtatcccttccaaagctcttccaactgggttgccgaggagtagttagatcactgggattcattcgactgggtcgtcctgcccggaacctgagtccccagatctagagggagcagtctgtgtattccatctgtctagaagtcacatgatgcctgttcagcccctgagctcccacccatttattgactcattccactggtgtttattaattatctactctatactgtcatgagcaaaaaaccagtgatgttaaacagaagccaggggctgtgagaaaatgacagaacctagtaaggagtcacccagggcatcatgtgcgtgtgtggagggagggtacaggcagagaggaaaccttaaagtgcagagtctctaatgaccagagttgaactgtctctgagggacagatgaagagcagatgtgctgtttgaatctataggtacgtgtccatagagagaggccttcagtcctgggtattcctcctccccctcctcctcttcctcctcctcctcctcctccccctggtgctccctttgaatccaggccattgcttacactgggcaggtgctctactagtgagctacaccattagctcggtagcttttaccacaaggaaggaaaccagggcaggctttggtctccacgtgggacaagtgggagagcacaggacatggccacacagcatttggcagcatctggcagcgagctgcagagtacatgggagagacagagagctcccttggtcctcagttctgagtcccaggcaaaggacgaaatgttgtgccattcctcggggaggtctctaacgtgtcttttccagttggacagctgcaggcgagccgagatagtcagatgctaggtcctcacctttgcttctgctctgccttcttcttcaaagcacgaagccaagatcaagtctctgacagactacatgcagaacatggaacagaagaggcggcagctggaagagtcccaggactccctcagcgaggaactggccaagctccgggcccagggtaaatactgactcctttgccggtgtcagatacttggcctgagccagtctggagctggctgaggtctgatgtttagttttgttcagctacagtgtttctgggaactgtagcataactgaaagaaacacatgttaccccaccctgtgtctgctgcctcccagctttcctctgtccactcagctgactgggccagcatcctctcctaaccccattggcctcttgctctgcaaagcttgtccctgggcttgtcagatatatctctggtgctgcttatctgttctgattgccttggaacaacctagttagtgattgtggctaaatcagtattattgaggagtctcactgccatcttctctggactggtcactctactgtgtcccaggggtgattgtgaaatgcaaattctgtcttatggcaaaccctatgggtcgtgcccttcctcgggattccgttcttggactaagtgctaggcttttgaacaagttcttctcttagctgtgtggtacctgatacacaggaaacacttaataaatccgagtaaacataagcaaatattgagtggccatcagaagtgcagaaacgaggtcagggtttaagaacattgcagtgtgtagaatgagagcagtcacacagattgaaggctgaaatgaagatcagttctttatagaacaatgtgataattgtaacagttcttcaggccatttgagcctcaaattttaagcatttattgcagagtttgattttatatttttaaagatgatgacgacgacgatgatgatgatgatgtgtgtgtaggtgcctgagggagccagaagagggtgttcagtgccctgtaggtggaattattggcatttgtgagctacctgatatggatgttgagacctaaactctgtcctctggaagaacgtcaagtgctcttaaatactaagccattttcccagtccctcatcacaaagctttagatcagaaaagcataaacaagaatgcagagaagaggagaaaagaaaaccatctaaaatatctaaaagttcagtagactttaataggttattagtcttcatgtctgagacagcacgtgtgtgtgtgtgtgtgtgtgtgtgtgtgtgtgcgtgtgtgtatgtgtgtgtggccatggttatgacacagtgttagggatacaatctttattgcagttactaaagataaatggatccttgtattcttagaaattaatatttaaaataaaatcactctgatgagtagtaggatggatgatgttattatttcattccttttattttcatttaaagctatttactggataaatacatgctgcatcaggtctaaaggcaaattaagaagaaagggccctgccatagctttgtaacattttattttgtggtaaggaatggactttggagtaaagcacgcctcccaatactggacaaagaaaaagcattttcctgtcttgcatatatttgctgcagtggggacactgaatagaaatataaacagaaaaggcctgaaataaagtaaaatagactagaggaatgatgagtcggatgtcaatgcccaaacgacatttgctccccaccccacacagctcactgcccttgcacacatgctcagggaaccccatgagggcacagagacaggagtgctggtcacagccctgcccacctggggccccctggtgaatccagaaagtgttagagtttgtttccctagttttcatctttagcttgtttccctgctccagattcttagaaaatcaacagctactcctgggaggtaaattaactccttgtggaatcttcccggtgacacgaatccagatgtcacctcaagctcacaggggctttataatctgcaccctcagggctggctcccagaggccaggtgggaagcgattctgggtctgcctgcttccaggcaaccccttcctttccctagggatgcaatccactctgcgtcccaagtactaacacaggccaaaggagaggtcagcccgagatgttgggtgtttgccaggctccccctactccatgccagcatttgcactgtgctgttatggttttgttttgctgaatttttgcttcagggtacgagccctgcaagttaaaactccagtcactttttactgtttgaaacagaaaaaatgcacgaagtcagtttccaagataaggaaaaggagcacctgacgaggctgcaggatgctgaggaggtgaaggtgagtgtgtgcacatctggaatgatctgtccccagacctgtgcatgtcagtcagacagggagaagaggacccatggctgggcccgatgtagtgacaagatgctgatgggactgcaggaagccagaagtgtctctgcatacacctacgctgcactaatgtctttgtgctccctgctcctgaaggggttaagtgacttgtctggagtcacccaggtagcaagaaagctgtgatctgactggcctgactgggaaaaccacgggtctcagatgagagggggtagaagggcaaaggcagactttctgtgcatcgttgggctggtttgcctctggggcccactcagttttgtgacagattcacgggttttgctgtacaaatgaagcaaggccgggggcttgggcacacgagccagaatcgcccttaattttggggtttaacatctgagggagatagatagggatccagggcttgtcactgagggggcagagcgccgactacttgacgccacatttctcctggcctggcttgcagaaagctttggagcagcagatggagagccaccgggaagcgcaccaaaagcagctgtccagacttcgcgatgagattgaggagaagcagagaatcattgatgagatccgggagtgagttggctggggggctcatgggatacgggcgggcacgggcaagccttgggtggcagacttaaaggacatggcttttggccagggcccctcgtctctgtgcttggactctgtgtgctgcctctgaggtctgttctcccatctggagcccagccccacccccgcccccaatgctctggtacagcaggtggcatgcaaagccagctgccccttcatatcaatccagccagttcaggggtgactcagcttggaagatacacacccaggagctggaaagactaaatgaatgtatgaagaaaaaaaaaaaaagcccaaacaaaaaaaccacaagactattcctcctccaggaattaacaaacactccagagaagctgtttggctttgttgcctcttcagcccaacagattatgcacctgtagccacctggtcacctgtgtgcacatctcaaagacctgtgccagtatgagtctgtgcgtgatagatggcaatatacccttcccgctgctatcaggatgacatcattgcaacttaactctggatgctgccttgtgaccacatcctgccttctcagagtccttggggagcccccctgctccacagtaccctttccttttctgtagcacaagtcccccggttacaaagcttgcttatggggggggatcttattctggggttcattatgctctttacatagtagatcttcttggcagtctctgaacccctttgcagaacagccttttaaatgctcccctaaaaagcatactactataaagaaaatatgtatactgaaatagaatttcacccactgcccctccctccccaactagggcaagaccctctccattacccctcccaccaccctcccaccatcaccactgcttctttctatagatgaagaattagatataggaagcaaggttgaattatttacttaaggtcacacggctaaataggaatcagactggagctaagcgtttaattctccaggctactgatccaaatcttttcagagtatgtgagctgcttgcaagagcatttgcatcttgaagaagaggaggagggaagcaggagtctagctggtgtgctagctctgtgcagcctgtctgaggacaggcctctgcctgctctgtccccaccccttctgcgccttcctattccaacaccccttgagcttctcctggacacaattctgattaatattcctcaagacattgttctgaaagagaaggaaagagagaaagggagatagcgagaacataatataagtcagtgcatgagttccttgtgggagctttctagacttgggctcttggtgcttctggcttccttcacacagtcttgtggtctcagcctctcggagggctttatgagcactggcgtgaggcagaagtggaatagaccctcctgtcttagaatttctgttgctggagaaaacaccatgaccaacagcaacttgtggaggaaaggatttatttcgagttaagcagttgacagttatcatccagggaagtgaggacaggaacttagggcagaggctctgcagggctgctgcttactgccttgctcctcatggcttgctcagcctgcgttcttacagcacccagtaccaccagccctgggatggcacctcttcggagagcttgttccttccatagcattcatcaataacaataaaatactgcagacttgccttcaggcagatcttgtgacagcagttcctcaattgagagccctccttcccaaatgacttcagctcatgtcagattgacataaatttgaccagcacagccagatgctgactttctgtctccacaaaaccgtactccaagggctgccccatgtcggctgccgtcctccatggaagacagcttccgacacttgtggggggatgctgttgaatggccaaatagttactgagtatacagctgttctctgggtgtgtatagcagcagagtgtatataacagggctcattctcttttctcttttccctccccctccctccnnnnnnnnnnnnnnnnnnnnccctccctcctctctatgttcaagcatcatcttttctccaatgtcattatatccccacagagcccttgcacacaaacaaactataaatacaaccgcaaagcctttgtttcatttcatgcttccgagctgctccccagaaattagttttcactcgggcagagaagaagctgtgaagttgttctctgatccctcaaaatcctcccgaattgttgcctttattgcccagaactaatggggctggaagagaaccagcgctttcggcggatgactcagaagttcaagctgacctggaatatattgctttttcctctcaatttcagtttgaatcagaaactgcaactggaacaggagaggctcagctctgattataacaagctgaaaatagaggaccaggagagagaagtgaaactggagaagctcctgtgagtgccttaaccctccctgactcgtcatcccctcccactccccagggccagccctagtggagccctggagactcctgctgttcaaagcagcagtggcttgcttgggcctttctctgcctagccttccttgctgaggtatgcctgaggtgcaaactgcatctgctccaattctggtgctgctgcctcagtggctcacgattcctttctgtctctcagattgctcaatgacaaaagggagcaagccagggaggacctcaagggactggaggagactgtggtgagtcactccccaacccagctcactcccagaggcctgatttgtttgtcacctaccgaactgtctaatctaaaattttatcttcacacaccctttcctgtagagcatttagactaagcactcggtggcagactgggatttgtggatttacttcttaacagaattaatccattggatacttagtcagttattagtgttgtaatcctgagatacttgaataagaattgagctccatcgtaaagcagtgtctgcactttgtgacgccactccactctgaacagatatttagcgagcatggaggcgggccctggtcctgatggctgatcagtacacactgtagagaggtcttgtcctctaggtgctgaggtgagcagaggggaagagcacacaggggcagtgacttgtggcagcaacagggacatcagtgtgcaactgggtgatgggggcgcggcgggttagaaggcaggcacatgaggatagtaccggagtaggtgccttgatgggggaggggcagaaagaagagcaggaggctctgcttgcctctgaaggggctccaattttgaaattactgttgggtttctttgctatgcctatagctgctggcttcccctggcagctttggttttggtggctgtgcagggcagcagcttggtcacacgtcacagctgtggcttatcacaaaccatcccaacagcttaacacagtgaaaatgtgtttaggcttgcacacgtttaaattcagcagtgccttctgatcccactcacgtgtcacgggagtctatgggacagagcccattcacgacaacctggagacccagactgtaggcagatggctactcccatctggagccgaggctgcatgccggctcctgggtcagtacaaagtgctcctcagagaaacgaggacacagcctttgggacaggggccagatgcctgtgctgacaggaggttggacctttcgagggtgatgtctatagggaaagcagacacaaagccatgaggtcacttcatctctatagtagagcaacgcagtgcataacggagtgttcttatgagagtgcagagaaatagtaaacactgaacgtttactagattcccgccatcctggctgtatgataattccagatgctctctgcttgtgccccgtgtgcaccccgacacccgtgcacccttgtttaccttctgtgtctctgctgtcctcacacaaagctggcacatgcagttgcacacacggcttgtcagcacgccacatactcacttttgtgatgtcctctgggcttggccacaggatctgattgttcatacggtgttcatacggtgtattcctatacacgcacacacagctgcatctcactaatgatttttttttattcaaaagcattctactcattttacataagttgttgtatacttcagactcatacttgcttgcctttctcatacctctcctcatacttacagacatgtaagaggcacagaggcccggtaagctcagacctatgcatgtacattcagccccagccacggctcacactcttacactgcactctcatgggccccaccccaccccaccgctcacacacaccatctctcaaggacactttctcacacaaacacaccacatatacacacagtgctctttttctgacatataatacatattctttcacatttctctctcacacactctccttcctatatacaactctttacacatactgtctcacacacacatacaatctcacacacattttcttttccacacactttctcacatacacgttatctctctcttacacatatgctttctctctctctctctcacacacacacacactttctcactttctctcactgagattctttttcgcacatagaatctctcacacacacaatctcatacactttttcacatttacaccataatgcgcgctctctctctcccccccctctctccctctcccctacataccccacgtctttccccactcacatcctgacttactcatattctcacatacctaccctttcttgttcctttccctgggagctggatggatacaagaccagtaggcagccccctttgctgtcttaggctctcgagtgtagcctctgtcacctactcagttattctccctccatccctcccacaagctcatttccttattttctcagtaatctggctgtgcctgcacacactcgttctcgcaggctgccccccacttacggacatgctcatccaccccccacacaaggacagagccactgatgtgctggctcctcttcctgtctccctcagacacccccccaaatccaggactagattgctgcagtgtgtgctgctttagacttgagcgtttgccctcagccttggattcctcccacgctgagctgtagatattcttcagagacaggctcttgctgtccttggctgtccattctgttctcaaggcctcctgggccagccttccctgcctcctgagcacggtggggaggagtaggacgctgcccacagactggactctgagaactgcactccagactggccatctatgctgttgtatgctgatggcaggacactgagcacttcctcctcatctcacctcgtgccacacggactgcctctcaggtgctagcctcactgtccaccatgataggaagtttacccttgaggtcctgcatggaagtcagtagcgtcttggtggaaagaggcctgagggaaattggaggttgtagaaataattatgaatgtgatggagggaaggtcattgctgcagggacccaagtgacagctgctgaaggacagcagcgtcagccaccttaaatgtgttgactgctcctgccaaacggttaaagatgagaggaaggagccgacgtaggactctcaggttgcatttgtgtcccaaggcaaggcctggcttgtggtcaggccttcttgcctcccttttgcatggtggtgcttttcatcagaaaatatcaactgtgatcacagggtgggcagaagtaagagatctgaggtggagggacagcatgcagggcatttgtgaacattaaggggtgctaggactgagctccctctggcagaggtgtggggcaggctggatcctggagcactgacctgcagccttggtccttgctgtgaggcggctcactcacagacgagactgtgtgcacattagtcataagaccaggcctgcttggcctcctgcagaaaccaatttaccccagccaaggatgcaattgacttcaggtgcttctcatttcagcacagaattggatctggtaataaggtcttaaattaacagagaaccttattccaaggaacttagtgtttctttaactctgggtcctgtttcaacctttttaatttaagcctgtgtaattttcatcccctgacatcaggtcgatttatacagatgaaaacattgaagattctctgtctcctcctcacttataaggaaataatttacatgaaactaatgcatgcttgtgtaaaaaaacatatcaagaatcaagagttcagttcccagcatgcacacagggcagctcatgaccacctgtaatttcacctccacatgatccaatgccctcttctcaaaccctccagcacctgcatttatgtatgcacataggcatgaatttcagaccaatcagagctacagaaaatagtatttccaactaaaatgtatatataaaaattatacatacttacatgtacatatgtatgtatgtatgtatacaaagacttgaatagaaggaaacatttagatcttctggttttgttaccaaagagcagcaggtttggttcaggcgcttgtctcctcactcatatagtcatagaagttcattcatagaaaataatccaaaatgaaggaggaagttgcagttgccggctcttgggatgtgagctcatattagccattgcactgaccacttaccgaggccagaaattgtcctaagagattctaggtcttcctgtttagtctcagtgccagtgagtcaaattctctttatcttcatctcaaaaatgaaaaaaggcacaggaagttccaggacttgcccagcgccaccaggtggagagtctgggaactgctcatccctgagttgctgatgtgagcaaacatacttgtggactggggcagtggtgggtgaagaatcatgggaagtcccagccagtgcagatcaatcatggctacctttggttttgcacgctggtatgaagtgtaatatttatatagggagtaaaccaaaccaaaccaaaaggagagcctattctggcaggtaacttcctaggaatgtttgtctggctccattgagagcagaatagaggagctggctgtgttctggcttacagctggtagtcagagttccccggtttctgcaccgtgcaagctgaagagtgggcaaggcacagatggtaccacggcagcaacagtatcaatggcagctgcagcatcaccggggcaggggggagggtaacgacatctcgagcaaacgcagcagcagttcagtccgtcaccccactgaccatgtgcaaaaatctcttccagtctagagaactccagacccttcataacctgcgcaaactcttcgtccaggatttgacaacccgggtgaaaaaggtgagtcctgtctgctatttctgaacaagttgaggagaaaagttggagcccatgaagcatcatctttggttgaaatatcccttgcttacattaaggctggttttgcttaaaaattaattgcctcatgccagaaaaaccttattaaaagaatgtgtttctggctaaaatcacttcagaatattttaccatctgaattcccttcttagcaaaaggaagttataatgctatccctggctggcctttatttaaaatgacatatatttttctggccccactgtgtgaaaatcactgctttgggccagaaaagtccggcattcttttcagaagacaacatggttccctagtgtacagaagagagatggacagagactcaggtttgtctatgcagtgtgtggggtgcgttagtattgagaactccagacccttcagaatgaacttgttttcctagccaccacagtaggttctggcatccctgcattgcagctgtggatctaggcttgggtgtgattgcggggctgaaaaggcttgggcataagtctgcaaggtctccgaatcacgtgatctcagagagtctccagattgctgactcaatagctcagctcagaactgagaagagtgaatgcagaagagacacgggcagcttaaaggaaggaattaaagcatgcacagatgttcagtaaaggcacacacgtctgggtgggagtacacccgtgtgtactcgtacacatgggtgtgtttgaaggagcaaaggaaacaaggtcagatatagttaaaagggaatgattggcagaagcaggtgtgagagggacagaactaacagcactggtgtgtgtcctgcttggtaaaaagaaagcactgatttttcccagagttcagagagagtcaagctggaagcatttgcaaggaatttcagcagagtggaaagaagccatatctgatggctagtgtcatcagggaggagggaggagaaggtggagcccggggagataagattcagccagttgtgcatagaatctactagggataagttcaaggaggtgctgaacagtgcagtgcatgcccaacaggaagcagtgtgcagttggcaagcaccgctgacgacagcactgtaataaccaaaataaattcaagactacccagtaccttcccccttcaaaggactttccaaactgtagtagcaggccaagcacagagccagataaaaagctggctgactaaataaacatagaaacatagttttaatggtcaaaattacttagcttctaaaacaagattaacaattcccctaccccgcctcacactaaagacagaaggacagacaaagtaagagtcaccctatacaaaccaaccaatgtctgaaaaggttattggctacaccaattaaaataagccaaactaccctggtgcctatatccggcccttacaaaggtataaaaagtgttctttctttgttctgggtctctcctccggcctgcgtgctgagaaggggttccccaacatgttggataggtaaaatcctcatgcgttgtgcaacaatggtggtctctgtggtctttgtgtgagtgagggtcttttgacaagctacaacagcatgactctagcaagttgaaatcttgctaatgcaaaaagcaaaggcagagactcctgggagattttcaaaacctgcacaaagactgggtgtcaatggttagtgcattgtatgaggagcacactctacaaagcacatattaccctggggcctgcaccaggcaggaggatgaggccaggatagatgtgatgtgctggaagtgcacctgatgccagcttaggagaccagtgaagaagagccctgcgccttgttgggaggagggtgctgtccagaggaaggtcaagaggtggagtcagaatcccctgactctgacttcattctatagaacttcctaaggatgacttagctttagatttctgctctgtgggcctctggcagctgcattggcatcacctggaaatttgcttaaatacataatataccacagagctgaggactcagagatggaggtgggctaagcactctgagttttagtaagtgccccgggctcctgattcgcaatcaagtttgagagttcctgctgggggctgagctgatggtagaaaccattactctgctgaagaagggtggtttcttctgctgttccaccagacaggcatgttttgctgtttttgaatgtcaggttgtgtttccacatgcatttcctaatttatctgtggcaccttgcttgtcaagagtatggagcggccgccagtttcatgatctgataaatcggaaggattttcccagcacctggctgctgtgatggggctgagcctgactcattcaggaactgcatagctttgggtgtttaagagacaagcagaagccgttaggctcccccagtggcacaatggctctggctgacaggcttggcaatttctcatctgatcttgatggctaagctgaactcgagccttatgcttattttcacactggatcttcttaataagttgtgagcctttttcttttgaaaagagaaatctttttatctgcaggggagaggaacatttcgttagagagaaatgcgtgtgcagcatacaaaagcagatctgaaggcattcttattccagcatcctaaaataaggcctcgcgacacttcagtggaaagcagggaaatttatcgggaagtcccctgattggagactttgacaactgctcttcattttcactttcagactgtcctttgggtgggggggtgttgaggatttttctttttcagaagtaaaaatgtatcttaaacactgggtaggtgactggggaggggagggggaagtgggtcataccactgactgtcatgtgtggatacagagtgtggagctggacagcgacgatggagggggcagcgctgctcagaagcagaagatctccttcctggagaacaacctggaacagcttaccaaggtgcacaagcaggtgagtgagctcggcaccctggcccggcctctgctctctcccggcacagctttggctggttgcctgcaacacagggagaagagttctcatgttggatgtctgctcgtggtcaaagaaaacgtgtgctggaaaaaaaaatgcagtcttcaaaaatccctggatcttggcaggaacagtattcctggctactaaggaggtggtgtggggggtgaccagtcaagcttcagtactgaagaccagtctgggcaccatagtgagatcctgtctcagagtgataagaagatgctagatctagggggagttagggtgaggagtgaggggtggatgtgatcaaaatacattgtatatgttctaaaagaattaataaacaaaaacaggaaaaaaaagcccatgcctgtagcctcagtaacttcctctatatatgaaaaacaccctttggctaacaagatagctcagtacataatcatgtgctgcatgactgatgatctgagtttggtcccaagaaatccacagagtagagaaagaaaactgacttctgcaagatgtcctctgacctctgcacatgtgcccacacgtacacataggaggcaagactatatacccatatattcccatgtatgtctacccttggatactgactggccttgtgctctcccatggcatctcttagacttctctgtagagcagaagtctccatagagtgcatctgctgaccactctggttctggtccctcagtttgcatctaaggagactttacttcctttcacaggtggtggtgtggtttgaatgagaatggcccctgtggtctcatttgaatgcctagtcacctgggaggctcactatttggaaggattagaaggcctctttgcgtataggtatggccttattggaggaagtatgtcattgggagtggactttgaggcttcaaaaatcccattcttggcctaagctttcatctgctgcctgtgggtcaggatgtagaactctcagttccttcttcagcaccacgtctgcctgcatactgtcatgctccccatcatgatgataatggattgacatctaaagctgtaagcaagccgcagtcagtcactttctttgatgagttgcagtagccatggtgtctcttcactgcagtagaacagtgactaaggcaggtgggacccagagactggaaccagcatcttctgagctctgttgtcctaatcctacctcagccatcttgggtgtcccttagaatcattgttctgacgtctgtccagtgtgacagagaggaatgagtatgtccagtaaaccagtgatttaggtaagccatttgcccctcctttctataaatgccagcatgtctgggactcttccctctttagggtttggtatggggtacaaacggtctaattcttttggctacatgtcacttctcttgacatgctagatctgtttccatagggctggtgatggcattttccccagagagaagatggcagatcaatatagtgaaatcattcaagcaaattgataatgagaaatacagaagcaaagactgccaggcatcttgaaatctggctctgcaactcattattttattcatgaattcaaggaatatttattaaaagccaagtcttccaggcatggagctactgctggcataagcaaaataggtcagaacagccgtagctcgctttgataaagctttttctgatttttgatcctttccctgatccatctggattccaacaattgtaattgtagtttaagtgcaaaaccctgggtactggctgtaaccaggcttgtggctactttgtgggttcttttttctttcaccctttcagccccctaatactagatgggagagaagaaaggatagaggggaaagggggtgttgttatcttagactacttactgctggttaggggcatcaagttccttggaaattttactcttcattgtcaggacatctaatttcttcttgttttttagttgcacatgactacataacaaattgtaaccaagaacatccaacaaaaaaaccaacaaccccacacacttcttggggccctagcatttatatatcctctgaaaagttcccagaattccaaacatcacatacttgtggaactatctgccactggcaaaatcactcccctgctagagtacaaggcaaaccataatcagctgctgtgatgcagcctcacacatatccccccacacctggggttgaaacgaaagcatagtcttataatacttataatactttttttgggggggttggtttttcgagacagggtttctctgtgtagccctggctgtcctggaactcactctgtagaccaggctggcctcaaactcagaaatccacctgcctctgcctcccgagtgctgggattaaaggcgtgcgccaccacacccggcgactttttttttttttaagaaaccaaaattctcagtgcccttaaatactaagccgactttccagctcacctttaaaccaaaatattacacttctggtccttaaagatttgtggccatctcatgatgcaaaatgcgtttagttaacctccagggatccactgagtcttaccaactccaacagtgtttgaaagcccaagtttggagtttgccctgagactcaaggtaatattttaactgtgagcacctgcctgggaacaacacaaccaacaaaatggtacgtgtgtttctaacatgcagtggctcagagtcaacatttctaaaagaagaaacaagggaaaagcatgaaaagattggactaaatcaagttagaaactcagcagggcaaacaccaaaccctactgctccatttccagcatcttgggtttgtgatagcatcatctatgttccagcaggcttgtttggccccgcccctcacactctgttgccatggatacctgtgggctctctcttgggctggctgtactcagtgcctgcagagctatggaagcttaggcttcaccttcactgctttatcactcataagttccgtaatgcacattgctctttggaaactggttgcaagtttctctgacacctcccctctgctttgtatgttacatgcctttaaaattagtatcctgtaaatgatacaaagttctgctatccactcaaaatgtagccttgcccatggaccccagctacaatgttctttgtgtgtcttccaggctgagcctgaagaaacacttccctatgtggccccatatgagcagtgtgcccgagaagctgtcttggttcaagtactctatttcaaaggaaagttttccaaccatgtttgcgggtatggtgaggatctttccctaaaggcaacttttcttctttcccatttccagtgtttgaagtttctccttaacggctttaatccctttaacaattacagccaccttgtttgtaccagcgctaacctctgcagctcctttccttgccagacttcaacattttagacctttccactccttgtcactgtaaatctaagaacaaagaacaataatcatgcaacagcctgaatcttacactctcttgaaatgtccttctcaaattaacatgtccataacttttgaacttagctctgcttaagatttcaaggcagagaatacagatcactattgttggagtccagtggggcaaggctacattttgagtggatacaatacacagagaatacagctcgatttttttttgtttgtttcttttttgccattcatgttataacatgggtattctttaggttggttcacaacagagtctataatgctcatgtcacttcatgagcctggccatcactgtcctcctttctgttggcattctccaaactcccacgagaataatccactaagctgtgcgtatggccccagagggccccttaaacctgcaggtctacggcaggcctcttccacgtcctcacataaactgtcccaggagcccagcaggcttctcacagagatgccttcctactctgggttcctgcttctgggtttgtaactgttttcatttctttggccaaatacctgacaaaaaggaggtcacgggagaaaggcctgagggcatggcttgagggcagagaccctgaagatgggaaaagaatggtggaaattggctagtggctgtgctgtaggaacctgttcatatttggacatttcaggaagcagagaagatgaagagcactaatgttcatccagctttcttcttttcccctttccttcaacctgggaccccagcctctgggatgactctttccacattcaggatggagcatggagagagtctctccctccattaaactactttggaaatgtcctcagagacatataacttaccttgtatgtgcttctaaattgggttgtgttgacaatgacagtgaactattgcgaagttcaagtgaagcgtcaatactgtttagtgggagcagtttctaagtgactgtctcactatggtcctttcattttatgaaggcaacacccaagacttggagtggctcagctcctaccaccaagtcagatggcaggaatggtagcattgacattggagtcctccattacctagggtcctaagtaaaaaggagcaaacagttccctcctgtttcttgcgagcctcaggatatgtctgagctaggttttaacccaacgccagtacagactgtgctctgcaaggtctgcagaggactctgaaatgtgcccatttcctgacttggaatttctcagctcacaagtacatcctagagtaataaattcctcacggcctcttcccttcccagacacactcaaacaagaatacacctgccctgtggctcgccatggcttctactttaatgcatcccccttattactgctcctgtgagctggagttatatggaccatcaaagacaacctagtagggtgatggtctggctgctcgtcaggtttgtctcttcttccatgtccttgtcctgccagggagtagcacagccttgctcaaacctggcttctttgcccctctgctgcagctggtccgggacaatgcagatttgcgctgtgaactccccaagctggagaagaggcttcgtgctaccgcagaacgcgtcaaggccttggagagtgcgctgaaagaggccaaggagaatgccatgagggaccgaaaacgctaccagcaggaagtagatcgcatcaaggaggctgtgcgagccaagaacatggccaggagggcacattcggctcagatcggtatgtgtgtaccaaggggtgagagtgacatgaacttatgtgggatttcactcacctgaaaggctaggatagatccagtgggacttggaattcccggcgacctggtgttcatcctggaaaagcatgagattcagacaccactgtcctcctgagtatagggtgctcttcagaaccgtgcgctgagcctcagaagccagctgtgctggagcttttggctgtaagcagaggcacactcttggaaatagtataatttatgaatatctcgcagcaggaccatgaagaataccatctgtctgcttcagggaaatcctctggcttggaaataactgcaaagagtcaggccagcaacactgagtactgttgctgcgagctgaatggtgggctgaagttcaagccccaaggcctatggagctgggcgctttcctcaaataggaatagtggctgtagatgctctatcacagatgccaagctaaagccagagggataaaaggacttacaggtgttgtctagagttatttttaattgaagcatccttaataacttgcaacattatttcccatcagatattgttttgtagctatattgtgagacagccactttgtgtttccaccttaaaaatcccttagattagtgatacattgaatttattcggtttcttaccctttgagaaaattgtggcctcttttcctagaaagctcatcacaggtagaattcttgtgaaatctatagggaactatggatctactgcagataaaaaccaaaatcctttgcttctaacatttatttatttatttatttatttatttaaaattttcacccttaaaaataagatgattagaggctagaaagatggctcagcagttaagagcactggctgttcttccagaggacccaagttcaattcccagcacccacatggcagcttgcagctgtctgtaactcctgttccaggggatctgacacacattggccagatatacatgcaggcaaaacaccaatgtacataaaatacaaataaataaattattcaagaaaaaaaagaatctttgttttttaaaaagaaaaaataataggatgattaatatataagttctctctctccctgaattatgtggggtgtccttagtttatttttcagaggccagacctgctatgcccaggaaggtctgggggtaagtaagtggtgcaatgttgataaacccatgactggtcgtcaccaatgatgttcttctctctcctttctctgggatatagccaagcccatccgcccaggccattacccagcatcatctccgacagctgtccatgccgtccgaggaggaggaggtggctcttcaaactctactcactaccagaaataaagcagagtgagtcctgcagcctggggtattttctctttgcagcagccccggggcctacctgggggcattgccctcttgacactctgaaaccctaccctggcctttagccatattctctaatagagatatgttcatctctgttccaggaagagggctgggatccaggtaagagaaatctgggcctagctttgccagcccatatagccaaaggatcctctagtcacagggctggtgcaactctgagccaggcatggcctaatcacctctcaggttgatgagtgcttcatctagggtttggactgtgggacttccctccgcagctgaatctacaaagcgagacagaagtaaggggtggctttaagtctcaggaatgggatacaatgagcgggttatgagtcatatttttatcattattgtgagcctcgataaatgggggtttgaagaatgtgtagtttatatttaagtggggctagaccactttttctttgagacagcgagtggtctgtgagccccagttcctaccacttggatgttcattattgctctgacagtaaaagagtgatatgcttttgggagagaaacaggaagaggtacgcctgtccctagtagctgaatacagaaagattcccagtcaggctggcagtggatagtagggggctcagaaaaccgcagacttggagtgtgtagatggaaagggatgatcacaaagtgactcctgggctctgagccctcactagggaggctagctgacagagcaggggagcatcaatcaaggcatgccttggtgatccagagcaactgatttagccagtgcttttagaatcgcatttgaagtgaatggtccagggcagaatgacggcattactaaggcccagctgcaggcttcaggaagggtgcttctgtgtagctttacataaacagccaggaattagccaaggtctggccaggtgagtgggaaccagagggcaggcctaggccgtctgcactgggccaacacactgggagtatcactgtatctcagtgagttggactgtaagtcacccattcaagtccaaaacgtgcttctagtctgaaataaaatcaaattggatattactgaattgtttttgattgcatgttgtcaggaccaaggacaaaatctgaaaggtggctattgggggctgtttaggaaaaaaaaaaaagcctcaaattcttgtgtgggctggaggcagagggcaggggtggggtgtgcacttagcatgtaagggaactgggttcagtacaatgcaacagtaataaaggtaccagcttaggtaggtaaaggacaacaggccaggctactagcggagtggggcctacctggacttctctgtttttaaccaagaatggccagtggttttgatatccagcaaaaaatataatacctacttctctgtagtaagcagggctcatatacaatgatagtttctcatgggcaggaagtgcaagggctgggtatagttagtaaggtctgtagagaccacagaatctcagactattagactctgtcctctgtgggtgcctcctttccttggcgttgcctcatggcctccagaatgacttctgctagaccttcagctccgtgtcttctttgcaggagttgtatcccaagaagaagccagggtgaggcaaaggcagctctcctggccacagcagcctccctcagagtacccatgcaaaactgaagtctaaatgcctggatcagaggcatgtggccacataggagactagaaaaggcagctttatctgggtacattggcgccccagaagggagttaggttttatattgttgtgagcataatacttgcagtggtaacctaatgggagaaagatcatttctgactcctggtttagaagcctcagtgtcacagaggggaaggtggtagaagaagcttagttcctggagacaggagcactatacgtcatgtagggccaggatgcagagaaggcggcaggaagaagggatagggagaggtttcaaggactgcacctcctaacagttcactaccaagtgtttatcaagcacagactacgggagagggatttagactgcaacaagagtcatgtttttaggagaataagaatggatggtggggtggatacttagcagtctgggcaacatgcagtgtgtaggttgtcatttgataaaagcacattgtgagctctgaccttccaacaagttcttagtaaatacactgtcccagggtttccagactatgttttaaatccctcctcatggaattcagtaaaactctgccaaacctacacaagtccgggttgacctgggacttgctatgtagcccagacttaccttgaactcacaacaggctgcctgcctgagcctcctgagtgttggagtcacaggtgtgagctaccacagtagatttaaaactcgacattttgtgtaaggttgatcatttgtcactggtatgacctcttatactggagactgaaaagtcacaacttctctgacccagaacttcagagggggtgacctagatgtctatctaatgccaagcattaagtaagctcccatatcacagcaacagtatgttgtccttaagagctccaccagaggttttgagtttctgtactgtgccatcatttacgaaaggaagtttccctctatgaccaacttctgagagcaacagtgatccactggcacagatatttagaaggcagcttgacagccacatcacatatctttaataaaaccatgatagctgttttccactgtggcctgtgaacatccccagcctcaaatttttgttgtctcttacagtaccagaagcaaattctcccctgtagagtggtttaagtctagttggaaagcagttggtcgtaccccaatcatctgtgccgctgttgtacctgtagtcacatcttgcttggcactttgatagcatggcatgcagggtccagaaggactgttggtgacaatttctcccccaacagcctgcacagcacctctgcattatggaaaccagacagcgagggaggaagcctcagctcagtcccaacgcatgcactgtttgccagtcaggtctcaccatttagttctggcatggagccagccacagtggccagtttccctgtttggggtgggatggggtggggaggtggaattctctgtagccgccgacaactagagagttagcccagtgctgtcactgagatttttcattgtgattatgtaacaataatttggcttctaggagtgttgtctcctgctcatgcaggatgccttcctgtgtgctcagcagctgccttaactgttctcgcacgtgcttttatacatctgtaagacactcaagagttggtgttctataacgaagcctttttacagaagtaggcagatcccttgaaaagaccattggcatccatttcaagtagtgccaccagtcttaagtggctaaaggcatactagtaaagggactgtaagaagatctaatacagtacaaaaagatctcttcacatttacaaattatttcttcaaaagtgcaacattagaaactgggcatggtggtgtgcatttccaatcccggcactcaggaggcagaggcagaggcaggcaagatctctgcaaatttgatgccagtttggtctacaaagtgagttctaggaccgccagggcagtttcacaaagaaactctgtcttaaaaagcaaacaaacatgataccgtgttagtatgtggtatggcctttgtgaactactgctcaggcttttagaagcccagtagcacagcatttggctaacacaaatcttgcttttgttgctggcccgtgcagtgcccttctctgttttgcctcctttctcattatctttgttgactttgctgttgtgttttatgaacccagtttatgtgttggctgtgttcagatctcagagcctctcttacatcataagggtcaccaaagccccctgctcttcctggggtccccattaagtcagtctcttttttaaacaggcccaccagacccaagctaattctcttattgacaggcaccttttatcatcttctggtccctcatattcatgaggacctcacctgatgaaaaccttgagtgtgaatggtccctatgagccagtccaacagacattggtttccgtcatgttgacaattctggttcccagcttttgtcccaagaaacttagcttagctgcttagctgcttctttgccacaggactcggattgctcccatctgcacgcatgccccacagccttacaggccaggccgtgacaggcccttcttatggcctgtgtagaactctttcccagttcaggaagctgagaggcagatagttcctggttatcatggccttgcaggggtttctctgtgtagctgtgactgccctggaactcagagatccacctgcctcagcctcctgggtgctgggattaaaggcatgcatcatcagcaccgggtggcatgggccatgttaaaggatcccatgtacatgctgagccatgggttttccctttctctgtattaatggttagacctaagggttgttttgttttgttttgtttttaaatcacttttaccttgtcctcttctccctcattagctgacttcttacatgggctccatctttgtggatcccacaaagtgcctgtgttgtattcttgtacccgtccataagaggtggcaaggcaatacctctgtctcatttaaaatagggcaaatataaaggcaagtgattactacttgttcttttcctgtttttatcttggtaaaccaatgagattcattagggttacttacaggaacaaggatgactcgaagacagctgcctcactgaatgcccactcctgctgggaccctggtcctctctgcatgatttgtaggtagctcaaagacagctgcctcactgaaagcgagtctcctttgtagtccttactacttacttaacattgctggggtaggaggaatgcttatgtatctggtcagtttcagggacttcctgagacttgtgggttgcttacttccatagtcttaagaatggagcttttaaattttgaggaaattgctccacagcaggtgagcaagagtctaaagctcagcagagtccagagtcagaggcctagagagtgaagacccacagattgtgtttacagtctgatgttttagagtccagggtagagggaagagtggaaggtggactggcctgaaaactgacaagtaggtcatggaaaggaggtggcacgagggtaagatctgaataagagggtgtaaggttccagggagacagagactgggtagttggtgaaagccagatggtggtgaacttgggcagctttaggcagtctgtgtggagctggatggcgagtggctgctgtgctgatgatagtgatagtgaggaatgagacagcagctgtgagttacatttgatggaagccagagatgtggaggatgtaggttgacataggtgtctatctcaaaaagcagatgatattgttgctagttatcaactggtggtatccatccagctaaggtggcagaggtggaggtgcagatgcagcaggaaggtaggtggggtaggcagaggtcaaactgctcagcactgggcctccctttttttccaagtaagaagcatagattatcagcagtgagggaggggagaagggctgtaggcctgagaagagagacagtgtgaaacggtcctctcaggcagcatggagtgtttgtctgaggctccacactgagtgtagacacccagttaaatatttatccagctctctggttctgagggccctggagatagctccttttcttgacaatgcattggcaacccaaatgtggacttattccaatatatccaccagatggcgctgtaagggcattgttgaattctcattaagcagcacttcaacagacttcaacaacacatttgtctgtaatgtgtgccctgagccccacccgagtgtgtgtgtgtgtgtgtgtgtgtgtgtgtgtgtgtgtgtgtgtgcgcgcgtgcatgtgtgtgcatgcatgtgtgtgcgtgcatgtatgtgtgtaggggatatttatcgagctacagctatatagaggtgggtgaaatctatctcccatatttcccttatatttaacttacattttcttaaacatgactggtaaaagaatatttctaagaaatataattctcagaggtccccaacgttcgttgaacttattttattataatacttaaatatttataagttcaaaataatatacgttccctgttcttacatatttaacacagccataaagtcaaaacaaattttaaaatgacattaaaacaagtcagaaatccaaaccacttaactgtatcataatttaacaaaagatgaattgagttttcatcgaaaataaacagaaacgtgcagtgtgactgtgtgcttccgctgtgagtctgacgtgccctcgcttgcatgtgccttgactggaccaaggtgtcacactccttctgttagaaccacgccatgcctcttcttgtgtctggagtgcatcacgttccttttgagtggctatatatatatatatatatatatatatatacaaataaatgtttttttctgctctgcttttatgtttgagacacaggaaagcactcgagcagccccttccatagcctgacaggaccccctggttagcctgccttttccagaggagcttaggggtcatgctatgaccctctgcctctgctccatatgacattccagggactatcattgaaggatacctgtcctatatagattctacttcctcaggatccctaatgtgaataaaataaataactatgaattattagtgtaaatccttacatgctgggtaacgggatgcaaagagatgtacaataaagctgtacccatgctcactgctgtctgctgcctcagtagttatcctgaaatcctgactgctgggctgcctggccagtgcacctctgttccagcacagaccttggccctgccccgatggagccatagacatagaatgcacacactgctttctagactcctcacagtaaactgggctcgtgcaagggagactccagatattcagcagggagaggaaagtcagtatttctaatgcaggcctctcttgcatttttccttggttcccagtgctcccacccttcatcatcttcatacacttgaagctggagccagaaacttctggccagttatggtatgactgtgtcttcctttgatcagaagaagttccaacctcctcagaacccccaacttctctactgcttcccttcctccatccaggcagaatggcgtttcctctctaagcacttggctactccgacaccaaagcccttcctttcaggactttgtctttgcactgagcgtcccaaaaggccgctcactcactctgcccttgtctgtctcactctcctgtcttttcatctgtgactttttgtcttaatcacctgaatcccgtttgtcttgctccactgttagggtgactcttcattgtctccccttgtgacacctagtcacaagcaaattatcttgcgtatccccaagatgctcacacagctacttgttcccagtggaaatggatcatactgtgcgggagggcagaccagatgtggctgtcagcttagcccctgagactgtgacactgagtcttattgatggcatgcagggatcctccagacaggtgcagcccacctcttgaaccaccataccattcatggtgctgctctaaaaccctagccattggtaactggatgattgcacggttcatcattcaaggagctcactacaggcagaaacagtgactggtttccgaccgaggtggtgctgggtctctttggtctgagcctggttcttaccctctggccaagtcactttgtctttgtgcccctgtgtggtcagcagctacttaacaggtctgtggaggaccaagtatgtcagtgtgtaattaaggtatagggactgtgtgcctagaccaggcatttgcaagcttcataactagagaaaaagtgaagatttttagggtaaaagttcaggtttcacctgcagccctggtaccctaggctagaccaccttcccggtataccaggcaaagagatggtaatgattaaagtcagagatagatttattcagtgttgccacactaggaaagggaacaaataaggtcccactgactccaagtctgtctcagggtgcttggcataagttgtacatttacacacagggagaactgggtctggaggaaagaggtgtatgcagagatgagcaggtcctgggcaagatgtggtctggtttgtgtcagttctggttctggagggagatccacagaggcccttattgctggcggggccagtgtttcccaggagatggtcacttctatttcagagtatagccatcaagaccctcatggataattgccttcaggtagcaaaagggggtccacggatgcagtgcttcagggtagcaagttagggggtaagagagttatcatgagggttttcctcttcctgaaactccatttggacaatggcatcgctgtgcctttagtcttgaaaggggatgagctaggttagaccgagctctgtgagcagctaacgtgccaaactgaagaggtatgtggaggatgcaaaagaaagcaggaaggcacaaaagacccagacaccatgttttcgtccgactttccagttacctcgtgggtccacaggagtcagtggttagtggacgaagcagcctctgttcctgtttctctgctgtttctgcacatgctcacaccacctaaccaggcttcttattctgtgttccaaacagaagggccaaaccaaggtgggcctgagaccaggaacttggagcttctgtgtgcccgttcttgaagttttgactttggataccttgtgtatccttcgagaggatcagtggtatcagaggctttagtgtctatttgtcacatgtatcatacaatttaaaaactaaagcattaaatgaatgattcacttacgtaagttaccagaagtgaacattttttttaataaaaagttaaatttttaattttgtgtgtatctgtgtgtgggaatgtacacatgagtacagaggccagaagaggatttaaatctcttggatctggaataacagatgtgtgagtgatgggtgagtgactagtgagtgatgggtgagtgactagtgagtgacgggtgagtgacgggtgagtgatgggtgagtgaactggctgaggagggtgctgggaactgaactctggtcttctgcaagaacaatagtggttaacaatggttaaccactgaaccatctctctagcccctttactttataagcaattgatttttatttagttatgtgtctgcatgtctttatgttggtatgtgcatatgagtgcaggcataactagcatttttaaggaaagattcgtttttttaaaaaaaaaccctcagctaattggcattattttacattttcgtagacctctttgtctcctttaatggatagcagctacttctcgggtctgcttgtgcatctgtttctctgcatggccttgcctggagtatatgaagacaacagctacccttatcacttcagagaagattcttggctgtttcgagaaaggattcaagggatacaagggtccttatgtaggagtctgacaggacaatatggaaggcattaaaggaaacccagacaagaacttagccaaacttgacctttagagtactaatcttatagctgttgtgaggtcaaaaggaaagtagtgtgtctgtagggaccaggacagagggacctgaggtgggcactgctggtggcctggagactaccacccagaactcagaaggcgacgcggtggcaccaggaagaccttgcttcagtagtctgggttatgcacttctcctggtcaaaaatgcggaacggttcctccgtggcagattgtatcgccacgataagcaaaggcaactggtaattcttataaatggggattgaactgtagaaaggcgcagggaaagat

SEQ ID NO: 708 - DNA, 2871 bp, Mus musculus
atggcggatccagccgaatgcagcatcaaagtgatgtgccggttccggcccctcaacgaagcggagatcctccgcggggacaaattcatccccaaattcaaaggcgaggagacggtggtgatcgggcaagggaagccgtatgtctttgaccgagtgctgccgcccaacacaacccaggagcaggtctacaatgcctgtgcaaagcagattgtcaaagatgtccttgagggttataatggaacaatttttgcatatgggcagacttcatcaggaaaaactcataccatggaggggaagttacatgatcctcagcttatgggtatcattccaaggattgcacatgatatttttgatcacatctattccatggacgagaacctggagtttcatatcaaggtttcctattttgagatctacttggacaaaataagggacttgcttgatgtgtccaagaccaacttggcagttcatgaagacaaaaacagagtcccctatgtaaaggggtgcaccgagaggtttgtgtcaagcccggaggaggtcatggatgtgatcgatgagggcaaagcaaaccgacacgtggctgtgacaaacatgaacgaacacagctctaggagtcacagtatcttcctgattaacattaagcaagagaatgtggagactgaaaaaaaactcagcgggaagctgtatttggttgatttggctgggagtgaaaaggtcagcaaaaccggtgccgagggagctgttcttgatgaagctaaaaatatcaacaagtctttgtctgctcttggaaatgtgatttctgccttggcagaagggacaaaaacacatgtaccgtaccgggacagcaagatgactcggattctccaggactctctgggtgggaactgtaggaccaccattgtcatttgctgttctccttcagtcttcaatgaagccgagaccaagtccacgctgatgtttggacagagagcaaagaccatcaagaatacagtctctgtgaacttggaactaacagcagaagagtggaagaagaaatatgaaaaagagaaagagaagaacaaggccttgaagagtgtcctccagcatctggagatggagctgaacaggtggaggaacggggaagctgtacccgaggacgaacagatcagcgccaaggaccagaagagcctagagccctgtgacaacacacccatcatagacaacatcacgcctgttgtggacggcatctctgccgagaaggagaagtatgacgaggagatcaccagtttgtaccgacagctcgatgataaggatgatgaaattaaccagcagagccagctggctgaaaagctgaagcaacagatgttggatcaggatgagctcctggcttccacgagaagggactatgagaagatccaggaggagctgacacgcctccagatcgaaaatgaggcagctaaagacgaagtgaaagaagtcctccaggccctggaggagctggctgtcaattacgaccagaagtcacaagaagtggaggacaagaccagggccaacgagcaactgactgatgagctggcccagaaaacgacgacactgacaaccacccagcgagagctgagtcagctgcaagagcttagtaaccaccagaaaaagagggccacagagatcctgaacctgcttctcaaggacctgggggagataggcggaattattggcaccaacgatgtgaagactctggcagatgtgaacggggtcattgaggaggagttcaccatggcacgcctgtacattagcaagatgaagtcggaggtcaagtctctcgtgaaccgcagcaagcagctggagagtgcccagatggactctaacaggaagatgaacgccagtgagcgcgagctggcagcgtgccagttgcttatctcacagcacgaagccaagatcaagtctctgacagactacatgcagaacatggaacagaagaggcggcagctggaagagtcccaggactccctcagcgaggaactggccaagctccgggcccaggaaaaaatgcacgaagtcagtttccaagataaggaaaaggagcacctgacgaggctgcaggatgctgaggaggtgaagaaagctttggagcagcagatggagagccaccgggaagcgcaccaaaagcagctgtccagacttcgcgatgagattgaggagaagcagagaatcattgatgagatccgggatttgaatcagaaactgcaactggaacaggagaggctcagctctgattataacaagctgaaaatagaggaccaggagagagaagtgaaactggagaagctcctattgctcaatgacaaaagggagcaagccagggaggacctcaagggactggaggagactgtgtctagagaactccagacccttcataacctgcgcaaactcttcgtccaggatttgacaacccgggtgaaaaagagtgtggagctggacagcgacgatggagggggcagcgctgctcagaagcagaagatctccttcctggagaacaacctggaacagcttaccaaggtgcacaagcagctggtccgggacaatgcagatttgcgctgtgaactccccaagctggagaagaggcttcgtgctaccgcagaacgcgtcaaggccttggagagtgcgctgaaagaggccaaggagaatgccatgagggaccgaaaacgctaccagcaggaagtagatcgcatcaaggaggctgtgcgagccaagaacatggccaggagggcacattcggctcagatcgccaagcccatccgcccaggccattacccagcatcatctccgacagctgtccatgccgtccgaggaggaggaggtggctcttcaaactctactcactaccagaaataa

SEQ ID NO: 709 - protein, 952 aa, Mus musculus
MADPAECSIKVMCRFRPLNEAEILRGDKFIPKFKGEETVVIGQGKPYVFDRVLPPNTTQEQVYNACAKQIVKDVLEGYNGTIFAYGQTSSGKTHTMEGKLHDPQLMGIIPRIAHDIFDHIYSMDENLEFHIKVSYFEIYLDKIRDLLDVSKTNLAVHEDKNRVPYVKGCTERFVSSPEEVMDVIDEGKANRHVAVTNMNEHSSRSHSIFLINIKQENVETEKKLSGKLYLVDLAGSEKVSKTGAEGAVLDEAKNINKSLSALGNVISAEGTKTHVPYRDSKMTRILQDSLGGNCRTTIVICCSPSVFNEAETKSTLMFGQRAKTIKNTVSVNLELTAEEWKKKYEKEKEKNKALKSVLQHLEMELNRWRNGEAVPEDEQISAKDQKSLEPCDNTPIIDNITPVVDGISAEKEKYDEEITSLYRQLDDKDDEINQQSQLAEKLKQQMLDQDELLASTRRDYEKIQEELTRLQIENEAAKDEVKEVLQALEELAVNYDQKSQEVEDKTRANEQLTDELAQKTTTLTTTQRELSQLQELSNHQKKRATEILNLLLKDLGEIGGIIGTNDVKTLADVNGVIEEEFTMARLYISKMKSEVKSLVNRSKQLESAQMDSNRKMNASELAACQLLISQHEAKIKSLTDYMQNMEQKRRQLEESQDSLSEELAKLRAQEKMHEVSFQDKEKEHLTRLQDAEEVKKALEQQMESHREAHQKQLSRLRDEIEEKQRIIDEIRDLNQKLQLEQERLSSDYNKLKIEDQEREVKLEKLLLLNDKREQAREDLKGLEETVSRELQTLHNLRKLFVQDLTTRVKKSVELDSDDGGGSAAQKQKISFLENNLEQLTKVHKQLVRDNADLRCELPKLEKRLRATAERVKALESALKEAKENAMRDRKRYQQEVDRIKEAVRAKNMARRAHSAQIAKPIRPGHYPASSPTAVHAVRGGGGGSSNSTHYQK

SEQ ID NO: 710 - DNA, 121167 bp, Homo sapiens
  misc_feature (1)...(121167): n = A,T,C or G
tttaaaagttattgagtccattagtggttcaaatggtggaacttcaagtcaggaagcaggggcaggggctggcagaaggaagtgttgggagagtttgttcttcaaattccacatgtgtgtggccacccagctcttccaatacctaagcgttgaaaaatatggtaccctgtcctccaactaaaattagaaatcttttaaaagatgcaatgcttgtgtgtcaactacactcaaaatcactttttaaagatttttggcttataaaattgtggctgaattcagcaacaaaaagtttttaaagaaaaaattctatgtgtgtatatatgttggagtcagggtcttgctctgtggcccaggccttagtgcagtggcatgatcgtagttcactgaagcctcaaattattgggctcacatgatcctctcaccacagcctcctgactagctaggactaacaggtgtgcaccaccacaactggctaatttttaaaaaatattttatagagttggggtctttctgtgttgcctaggctggtctcaaactcctggcctcaagtgatcttcccactacgggctcccaaagtactgggattacaggtatgagctgttgcacctggcctgtatatatattttagtgcttcaagtacttcatctgccagttgggcaacccaccattgctactgtgggtcaaatgtcccttctcctgcatgacaactgagatgatgtaccctgggatgcatgagccttgtgtagcccaagttccagatggtccatctagatgtagttgactattaaagacctatttggagtttgcatccagcagctctcatttatagtgctagtgcactatgtttgaatgggagtggcatgttaaatacccattgtgatatagacatcctgaacttaatgactattgctagttttggttaatgtaattatactcatttgtggaacattttccttgtaatttatgggagttattttatccataatatgtagaagcaagccattgcactctaggttatatggcatcatgttctaaacccaaatgtgtggaattcttagaaaatctatagttgagggaacagttacaagatgcaatatggtgttatgggtagaaggcttggctgggaaccagaaattctggatcccagtctcagctcaaagttttgccttccacatggccatgggaagttattctccattcccagaaagtgaagttgatattcttgtctgacccccaaaatcatgaggaacaaatggaactgaggggccttaacttattataaaagtaaaattgctgctcaatacatgggataattataattatgtaagctgtttctgaagagtgaaaaaaagttaacaaatgttaattctattggcagtaaatatttgcagtgtttttcagaagcctctctatgcatcatacttagccaagtgaaggtctggggaaagcttttgtttttgattttttaactaaagggaagagaactttacatgtgtcaccacgtgttcccatgttggcagcgccatcatgagactcagcgtaactgggagaggtttgtcgagcggcagtttgaccggatggtactgcactgtgccaggaagccccaccagggcggtgtaccccagagagaaggctcagtgctatccttgttatcttccatttggcgcaagagatcctccattctaccttctgtgaaatggctttttcacctcccatccagtgaagaaggtttgttttttttttcttcagacttgacttggcagaaaacttgatctgctgaaataaccatggcagcaatttctgctccttcctctgagtgcagagaacccggagctctctcctgtttacagcttaccttctctcatgctataggtcaaggcagaagccattctgacgggaaatcacagcattccttaccgctcattattgtgatagcttgttagagccagaactattcaacctttgactttacagagaggaagaggcttagaaaatataggtaaattgatcaaggtctcaaagcaggtgaggggccagtttctggactagaaccagttgcctgacttttcctcctaccccctgtaggtaagggtacacagcaatcaaaggcgaaagagcttgggggtgggagagaaaggagttcactgtattttgatctgaaatgaaaatcacatacacataagaaccttatttttgaggcacaggttccattattctctttaacagaagtaacacttctgtcttctttatgcctgttagccaggcaatgattctgaatttcttcattatcactcgggcagtttgccttctcagaatgttcttttgtagctgtctgtgatcttgacagtgtctgtgtgtccacacagtgggaattttggcagaaaggaaagaattctagcctggtttcccgcaggaaggcttacaagattcattcttgtgtgttgcctttgttccttctcaatacgtgaagtggttggcattgccttggcaactccattagaagccagtggctgctttgtggacatttgtttcattgcagattctcctgggagcagccttggctttggccggaactggcaccagctgctttccatgccttggggcatggagccagtgtggggagggggagggcaatgtccaggggcagctctggcttagcacttatactcccagttacagcgtcatcccatgtagactgggcaggcagtggagtggagaggagaatggggagctggagtagaggcttctgctgactggagatatcagcatggccttagggtctccctgtgaggctgccattgcaaatgagtagaccctggagagggtataatggtgatggaaaagagctggtggtcattgccaggtatgggatgttttgccccaatgtgcaaagtggggtttttcctgccttggcaatttgcaggccagcttcagataaatgggaaggtaggtaatggggtaaagaggtaaaggggtgtagaaagacatagtgacttcaggactgctaaaatcttggtggggagtaagaatggtgggaaatacgtgaagtttctgacacactggagaaatacagtgtgcgtctcctgtatcgtacaccatttgagagtggcaccctcctctagcatccctggggcccatctggcaggtattagtcatcattatgatcaacagacatctattgagcacctgccctgcaccattaaggtgctctgctaggccagggccttcaagagcctttgatgcttctagaattgtgtcagttagaaactgataattccctgggtggatgtggccccgtgggaccattgcttggcaagtgaccagcaagcatccttttatgaaggaaaaggtgtaccccctttccaggatagtgtcccaaagccccagcttgttgaattttagcaaggatttcaatttccactcaatttgttggctgagcaccaaccaaatgtgatggcttcatatttgacagtgaaaccaccagtccagatcttttaggacctactgaatgaaagaactttgggagcaaaatgtcttgaattttgccttacttggggctcccccagaagcagaccctgaggcaaggatggaagtgcaggtttctttgggagatgatcctaggaaacactgatgaagagtgaagtgaggcagggaagcgaaggacccatatagagtgcgccatcacgtgagttcccactaggggtaatgggagcctcatcccactggggaggtctgggtgccagtttggaatacatgcctcagggtcacccctgcactaccacccctgggcatgggagctaaagtattgaccccccaactcttaatagccattgactaagaactgctggggttggtacccacaacatccctttggcctgttgcgggtgaccaagagggctccagcagccagaaaagccttcaggtagagagatgcaggagctgaccatgagaagttagactagccaggcagagagatgcaggagctgactgtgggaggttagactagcttacatggaagtggtggagagtgagaggatagtcaggcccctgacagcatctgctgcaggtctgccatttgtattttcacagaagtttccagagtctccaaagctgtaacagtaaagctggtgagtgtacaagtgcctgtaccagacatggctccttgccttttgtgaatagactttatgaatgaacattgaaattttgtttatttttaaagagtgcagaggatggccttgaaacagggtaaatttttctggggctcttggaaattaaatggcccctgtgctctgtggagctgagctcaggagtcacaggcctggggacctggaggggcccaagatgtgattcagcacttaggtgtcgtgaggataataggatgtcaagttcctgagctggtacattgtgaatgaccgtcactttttcatttcacttcatttaggggataactgcttggtaagtttagtgtaatgcaaatgcctgatgtaggttggtcaccaactttttttttttttaaaaacagaatgacactgaccacatcttgagcaaaactctttgttcattggactaattaattttgtatttgaaaataatttggaattgattgggaggaaagcagggggaaaaaaggaccagaaattcaggcttattgtttccttgacgtttggagagagcaagtgattttaaagtggaacttctagagcactggatagggaggcaggaggtctggatgcgaggcacacatctgctgcctacctagctggctgcacgcatgccatctaccctctcctgatctttctttatttataaaacatgctgatgggttgaaatgacctggaaggaccttttggctctgaaaaattatacaattttaaaaataacttcaactttccatagcaagccttgcatctgtctttccctagcctctgattggcctttgcccatttttaattccttctgttgaaaggaatgcttgccattgcatgccctctgctttttttaattttttatttttttccccaatcttgccttcttcccatatcttcagtttttctttcctcaacggtttcatgtcagcactaccttcatggttaacactttcttgactgccacaggctacagtagggatctctgtcttttgttacctcataatcactttgcttcagtctttcatattagtcttagcatgtgttattgcggatgtctcctgcttttctggcaaatcataagctttttaggaaaccagtactccgtaaaggaagaacccttgaagtaagggcctggcagttatttcccctaagtaatagagcagataatatggcttggccttagttttccagtttgtaaaatggggataataatacctagctcatagagttcttatgagaattaaatgggctagagtataaaagggcatgggtcatcgtggttggtgatggtgttggtgacagtgttaaggtgacagcacaggctgaaagaacttgtcatttctgtactttcaggaatgaaatcatataagtgcctggaacacagagttacttattgttctccatagtcagttcctcttctgaatacagtactcctcagtgtcagaaggtaattccacagagtgagtttaaatctctctgtgaaaattttagcctttgcttgtttctttcttgataaagagagcagaaaaatcattcaaatcattggcagccttatgctacaattcgtcgtcagtcttagagcttgttattggattacttcttaatgatctcttcttggggataattaatttcactttccttaacatccctcctggtgcccatcttcaaaacgtttatgtgaatcttttgctttctgttgtctcccagagtaatattccttccaggctgggaaacagttattgggtaatgggtcaaatgtattaataggcaggccatatggttcccagacaccttgcattcaacaatttgatagagttctggtggtatgattttttaaaaatttaactataaaagtgtaagaaccatctgctgttattttttgtatgtgatcctggtaaattattaattttagttatactgctcctatgtaattagcactgttccacatgcaggcttcaaggcaaagcttgtatactttattttcagtagtaatgtgtgtggaatgtgtgtgtctcatccagattcccttcataaattgaaacaggtttgcctacatggggttaggacttgggatttatatggcttctgttttagctggtaaaatgctataattgtagtggttaattagattgattgataattagtcacatactaactactatggagcaaactaattcaggtaatgtaatagagagtgatacctgggtggggttggggctcctaggaccatgaaaactttcagggaaggagaaatttgaattgagttctaaagagtagtgataaggagacaggtaaatgaatatctgcagtgagataattctaagggaaaggaagagttaagagcaaaggctgtgaactggggaataagcatcatacagagaaaagtccgtggggccacactgtagtgagatggaggatgatgcaggcagctgagggcaaagagggtctaatctaagaataataggagcctttggaaggaattaggcaaggaattggtatctgatttacagttttaggaagctcattttagctgctaagtggaaatttgatagttaggagcgagaattaaggaagggagaccagtcaggaggtgatagctgttgtgtagaagagactaatggagaaatgatggactaagtttgcatggtatagatggtgagaagtgatagggtttgggatatagtttggatatggaatctatgggacatattgaatggttcttagttttcagtctgagtaactaggtgattggtggtatagttcttactcagatatggagggcttgatggctcttttttggtcagttaaatttgagatggctcatggacacctaaatggaaatgtctagaggacatgtgaatctggatgttagaagagagatgaaggctgaaatattcatttaaattacatgtaactcaagagtgtagacagaaaggaggcagaggtctgggtcttgaatacaccaccatttagaagtttgaaagaaacgccagcaaaggacattgatggaggtagccagagaggttggagagagccatgtgctgcatagacacctggaagggactcgtgtctccagaaggagtgactggtgacctcatcattaggtttcaagtgttagtacccagaacctgcattaaatgtcatttgaaaagtgtattctgtagctgtaaactcagtgatgactagagcaagttgggcccagtgcatgcctggagaaacctttagccatggtggaataaaaaatgggcaatcttgcctccttgggggctactggggaagggtctttgttcaagtctcaatcaggatttgtgagattttcataccattactaaagcagcaaagagtaattagtgattttttaaaatggcaattatcaattatatatacagctggtacagctatgccccaagtcagttctttgaaaatattcaataactaaattctgatcaatctcttccgagactttaaggttgacctaaaataaaagcctataactaactcagtgcaagacaggacacataaaaatatttacatttttaactacataacgtgttaatcctgacaagataggtctcataacaaatcactttctaaattttatcttttcttagtatcaatcataatgacttgaaggcaacttctgtttgggagttaactttaggttatgaagaatcgctgtattatctgtttgtcatttgataaattatgttatttaaatgaggaatagagatttcttgctctctacttctcttaaagtgaaggcataatgcattctaataaacattttaaacagaagggcaaaactgaggagtcctttcttttttgtaccatgtgctataatttaacaggtcattttgtctgctgtattaagtgtattttctctaaaacccaaagcaggatcaagctgtaaacaagacgctttactttggtgattctcattgtttgtataaataggggatttgttttaaattaagcaaagctacatttttgttccagaaagttcaattgataacaaatacccagacaaactctgcaaatatttactcttaccttttaccttactgacatttagttgaattttacaaatagataaagcttaataagcatgtagtaggctgatagttggcaatagactgtggtgaggaatagtctattggttattcaaccaaatccttgattcactaactgaaggaaacttactgcaaacaaaacatcagaaaatgttctatttctataattttagcagaatgactctggttctgctgctttgcatcaaaacaaaattttatagtaactgaaaattccctatttctctaagaccaaatggaagtagctcctttacctggctggtgctatccagttttcaaagagtaaagcttaagggctaggattttatctccagttcagctctacccaagtaataaataagtagaacattaagccattctgacagctgtgtacttactttgtgtgaaggttataggatgtaacaagccttgctcttggatccctcatgagcaattatcttttcgaggagtcccactgtccttgggtggttcctggtgtccagagccacacataggaggggcacagtgggagaaaaggaggctcttggctctgctctctcctccctctcatcttctgccctcccctctgctatgtggggaacatgaagatgaagggcctcctgagtgagtccggctgtggaagagggtgagcatgattgcctcctgcctgggcggtggtggtagagaagaggtgccctcaggatgggttctcctagggaaggggctgtgtctgtcccacccaccacttccccagcactcagcactgtgcctggcacctaaatgcccagtaactccttattaagcatacagtgattgggcgtcagggcacatataatgcacggtggagtttcttcccttacctctactagttatttccttgaaacacacacatttgagcatcaaaccaaatcccaagaccacacacctggggaaatctcttgatttactctacagaagggctctctttgtcttggaagcctcaacccagttaaaacatcacttgtgcatgagaaagaaaacacaggaattcttttggacacaaagcaataatatctttctaataagagcagctacttaaatctgtttgtcccatcttcccattggctaacatttaagcacatcaccttggctaactgtgccctgcatgaattggctcctgattttcttgccctccagttccttgaacaaaccaggccctttgctgtctgctgggcttctgcctaggatgcgcttctacagctcttcaggagcctccatcttcccgatcctgtaaagatacacttaagtggtccttcttcaccaggctttccttgccctctctagcattccctctgtcccactgttttaaacctaggcattttgcgttttcctatgtgtttgctttcttgcttattagctatctgctcaacttaattgaatgattcacaagagcaagactgttttgtgattttttttttcagcatctagcccagtgccaggctctgtgtaagtgctcagtaaatatttgtttgaatgaatgaatgagtctcaacctacccttcatttaaaaagtggttcaatttaaatttttttaaaatctcagattctcaacatacagtgcacatatacacaatgcatgtgtggtttatgctgtaaaaattccctgctcttggtaatgaactgccttaaagaacagggttggtgacttagtgcctatggcctagctactaatgtttgcgattttttattcctaaacatctaatgtgttttttccacctttttcttccctttgtctttcttttttagcaagggaagccatatgtcttcgacagagtgctacctcccaacacgacccaagagcaggtttacaatgcatgtgcgaagcaaattgtcaaaggtaagtgctatttctttatttcctcctgggccattcagagtaattgaaagcattaagtgatatttgcagcctaggaatcaatgtgccttgactgtaagcagaggcctgctaattggaaacactgaattctatagcctcggttctagccctgatttgctatgttgtcaggcaaattatttaatctctctattctcccttttcaaggacatgtctttatttcttttgccaccttttttattttgtcacccaaaagcttaaaagcaaggtaagctgtgttcacactatttctgtaataattttaaaacactgggctgcaggtatggaacctcctttttcctttgaaggagaaaatatatattcctgatgctccagttgtacatctttggttgatttattctgtgtgtctgtctcccttttactaatatctctcagcaagaagccttaaatatggaaaatttttgccatttagaaattttctacagtgtcataaaatcacattaccgtgttggttattgagctggtcttgccattcagcattccttaattatgctttctcctaacccattttcaaccatcccacccagatcctgacatttattcctccaaacaggtagcctcaagcctacatttacatcttagagatcagtccttttctctaggactggcattggccctggaggattcatgtcaaaatagcagcagggagatgaagcaatttgcacattgctctaccttgtcctttcaaatcaggggcaggttgaagcttgcattggcaggcttgccatctggacagagctggggggcatctcctgctactttgcttttcatcatcaaatcatttccttcaaatgtgaatgctgtggcaattgtgctttcaaatgtcttgatgctgccccctgtataggcagctctggatttaataagcaagaagtaaaaacaaaactaaaaaaacctaccatgtcactttggatctgcttgtttttagaagctgactaacctaagtatttgaaattcatgaaaatcagctctgggtacatctgttcgtttaattctgaccctggacacctgtgtgggagatgcatgtcagcatgtaatgttccttgctgaggtggatggttattcacattcttgctgcagacatcaattaattttgaaggtcttcacagtgagatttttatagaaacccaatgagaaaaaaaatatgactgaattcgagctctttctgaattaatagtatggacctatatcgggtggtaatttttatcttctctctgcttttactcttctgcttctctttctatctaaacatgttttctctgtttttgcagtatatctttcttggtttgctcctactcagccctgctccctattattcgactcattcatatattttttattaaagtaagattaatcacatatgtgccaaaatttctttttctctcccccttcattatcacaaacaaatagtatttaccacatgctgtgctaaacatgagggccatttaaatacatcctgtcctctctaagctgacataattagaaatggatgcactctgttaaaaaaaaatcctgtgattaacaacctgtagtaatactctttgagtctttattcactaaagaagtttgggcctctttcaatgttcggatttctctacagtatgaaatgtcagaaatgggcaggtcttgtgaagatatggcctaactctggataacttgagacccaatatgtagtgagctataaagaaaaccatctagcagaataaaatcaggcgctgacatgatatgactaacagacatttctagggtaccataaatatgtatgatcatacatacatgccttattctcccttaaaaaggaattgatgaaggtctgattggatttcacaaatatccactgaggctagtgtgagaagtggccatgtatttcagaatcagtaagctaaaacatagaggtacaagaaagaactccttggaacagatgatcaagtatagctgaggtatctcttgccatgagtaaccctatttaaatcaagattgggaggcggtgctgtggagccctttttttctagaggctaataattaaatcagatgatttccgaagagcaccatagtccccgtgattcctgataatgggtggaccaaggagcattcctttcaagtccatctaaactcttaatgatttggagcatctgggaggctccatttaactcgatggctttattctctctctggtttttcattccctaccacttcactgggttaaaaaaaatatattttaaatgtttgtttgtggagtcctggcatctctcatgctcccatctttgtctggtgtttgtttttcaaaattttgcttgaaaaagcatgtagaattctcctccatttcttctcaaagaggttgtagggtttctgactaccagcacagtaaatgggaaggctcctttggacgcctaggaattaaacaccatggtaactggatgctattattgaagtactgtaactatgtcccagcctacagaagccacaccaatcatttgccttccaaattaactagatacagatgatccagatgctagagaaggggaaatttcttgttttccagttctgattcctttaaaattcattcattcagttgtttcttttaatcattcatttctgtaagtagtaataagtacttaccgtggggtaagcagtgctgggactggagtcgccatgctatgtaagactgtctgcaaggagctttgagtacagggaaagagacagatgtgtacataatcatcacacacataggcattatgtactttagaaagggtgtatgcaaaatgccacgggaacacagaagaatgtcacttgtattgattttgattgggagagggagtggagaattaaagaaggtttctctgaaaggttgggtcctgaggactatagaatataggagggttgtacaagcagaggggatttcaaaagtaaaagcataaacacacaaattctgcttggacaacttggagcggcacagggtgcagagtggcattatgggagatgaggctgggacatttaggctggagcaatttgatggcaatggatggactttatcctgcagacaatgtggacccaatgaagagtgttaagcttaggatgacattatcagatctgttttgttattatcttatatatgactctgaagaaaaaaaatatttttagctgtgacttatcaggcactgtctatatacttgacatatgttgttgcattttaaatcataacaactttctgaagggtgagcattattttcctcattgtacagaagaggaatttgaggctcagagaagtgaagtaacttggccaggttggttcgggggccatggactgggactcaagcctgggcttgtcagactgactgactgatattcttctgtactcccctgcccccctttcctggtgggcacacagctagcatttgatgacaattattttatgagtggtccctgttctgtcaggccatatggactattatctaagcattgcaaaagacagggctaggaatggtgtgggaggagggtagagaagaggggacagggatggtggctcctacaccttgtgatggccctggtggcctgccagtgatgaggtgcgtttccattctgaagatgcagcatgcccttgcctgggcacagggactgccctttaggctggccagccggcatgcgggctggcctcaggtagtcagcaggaccgcctcatcatcctctgattatggcctacctgagtggtttggtgactggtgaggatggcctgtcagccaccatcaccagaaaccctacaggcccccatttcccctggagagtcggtaggaagccccatgcctccgtaggactactgatgggtaggtatgatcacatcctcccccaattctaatctgaagatggcactaactcttttgctttagcaagacctggattcagaactgagcaaatgggaggcaaggagcattttaagtatctactgctatccttcctcctcccctgggagatgagaaggctctgggcacctgcagtggaagctccttctggggttcatgcggctgcgggatggaagagtgctgtggccccggggtgcggcgggctatgctgtaccagtggaggtcacatcacaccaggcactaacacaaagaaactttctgtctgcggagcgtggctggcatgtggaaacattgtttctgcagagactctaaaacaaatgcattccgtgggcccaggagcgggcactggacgtgatgaaagtgccttttgtgggcgcttctgtgggagtcggatggaggttggcgtggcccccgcagtgcggagcgcggcctggcctttcctgctacggctccccctctgcctgtggtcgcggtggccatagaaacgcgctgggctcctgctccacttcctctctctgccttccctcaccagcaaatcaaaacatagactgagcaaacaaacaacaaacagaaaagaagcccccaaaacctggagtttcgaagaaaatagagaacactggcttcaaagggccttttcgtttaaattaccttctagtgcagcagggagccgatagagggcgacgtcggctcccttcgaccttgatcgctggagagaggttctgcagcagtgaatgaactgtaacgtgattgtaaatactttcagtactttcagggccgtgattgtaaatactttcagggccgagtggagtttgttctggtggggttttatgtgttctccttttcttacaaaaaaagaaggagaaaaaaaatagtgttcagtgacgaaatggcagcaagaaacagattctccaagtacagtcttgcacgctcctcagctccttagtccaaaacaagtgaagccacggacgagctctggttttcaggtgcttgacccagtccttactggcaggagtttcatgagcagcgatggagtaagagttagtgggattgtgccttctgtttagtgatggacccagaggcgtggatgagacccgggaggcctcgggtgtggcctaattcaggaggaagttgagctctgagctgtttccttgggtgtggccggttgctcagtaccacctccctggggcctcctgcgtgggaacatcggcccttgcagggtggctagcagaggtcaggatggctggacccctggccctggcaacttcggtgctgttctaacacctaggccggtgggttccagagtgtttcatacacagaggcttaagacaaggaaagccctttcagggtgtgtgtgtgtgtgtgtgtgtgtgtataggggggatggttaatttctaataaatggtaatttcgaataaatggaaactgtgatattgtgatgtagccagcattccaataggctggagttttttgtgttatgaatatggcatttttaaagtttgacctaagggtgggacctttttcctttgggtccctcaaagcatatcatattcatgttagtgtagaggtgctctgtctgctctggcctaaggaatcttttcttggagtaagttggcatttttgtggaaactgaagcttgaacctccaaaccttacactgactacttcaagtttttgcttcccactgttagcaggggagccattagccgaaatctgatatgtatgaacattctctctccctcctcttgctccccctcctctctctccctgtccctcctctcccaccaacccccaatatagcttgatacaaactcttgagggctgctagaattaaaaaaaaatcctgccacttaatttttcttttcttaccttcctaaaataacatattgcttttttgttcttatcccagttcacacttcaacaacctcagatcagtcaaatgtttattaaaatttttttaaaaaacataacaaatcagaattgatatagaaaaaaaattcaaaaaagcaaacctatcaaagcaaaacaaaaacaaaccagcatcataaaattcagagaaccccctctaccatgctcccaaaagaaaaactctatttagagcctgaagtagatggagctgattgcctggcttggttttttacatgaccctgaataggacacctcagtgtggggtccttctccctgcctctacagcttgtgcaaatgaagacttcctccccttattcggaatggaggatcaaggatattaatgatgcattgttcctcttccagtgatatttgtgaggatgaaggaggaaagcaggagagaaatgagtgctaaatatattttaatcacctctgctgctttgaaagaattcccacagataatcttcagctcttcagcaaaaagcagcctccaccctcgagcctccccttgtccctgtgtgatgtggcaccgacctgcagtgtggaggggtttgcacagtgctctcattgtgtaattaaaagaaatttcctgatgctgatgggcctgggctggcttgttagcactatcagtgcaaacacagagacattaaatttaagtgagggcccggctagtttctgggctgattggattgtcatcctgaggctctgtttatagagtggggcccttttcctcccccacctctggactcaaggagctcttgtggggctttcaggagaaacctccccaaggagctagcctgggccagcgtttaaactgacccagattaaatcttcaggaaagaaattctgttcttcatctcactccagaaacagggcataagaataatgttttctttttcccccaactgatctcaagagatcaacttatagaagaaaactcaaatatccttctactaaaaaaaagttttctgctcgatgtctctatcttccttttgatgtcattgggagaaagtgtgtctgcctccttcttcattaatgtattctgtgaaatgtgagtccatttctttccatttgtagaacaacagaattttctacttaaaattcacatggagttgaaatatatcatttgtatgaaaaatgagatgggccatttggaaaatgtaattttaaaatatgcaacctacaccagcatatgatcaaagtaatgagttaattttaatttctttttcttgttcacagatgtccttgaaggttataacgggacgatttttgcgtatgggcagacttcatcaggaaaaacccacaccatggaggtaagattacaatgtgctctaatgcgaatctctgagatgactgaatggaactgacgtttccagcaaaacttgaggtgcatgtggctttctttactgggaaatagagacggttatgtttggccaattaattatgtctttgagaagttttaaaatagcagcaaaaaataaagtctcaggaattcagtattttaaaaagtactttattgataactttgtgacagtaacaatacattctattcagaaacaatcattgattagctaagcagtagtgtgaacatcattctggacttcagcctcattctaactgggaaagcctgttgggaaaatcatttaccctgatgaaggcccccggggaggttcgtctcttagaataaataaaaaactgtaggtcagagatttttaaaagttggcttgtgggccacgttcagcccacagacatatttttgtttggactgcacggtatttttttttttaatagtaagcaatgttaaaaattggatgatttcacacaattcaaattttccatcttaggttgaatattctgaagatctggcagcactgggtgaatttcaccataatataaaattcaagcttcactgttcacttcattgtcctgttcacctttttgttaacatttctagtgcagggaacagctgctgtcacctaggagaagtttggtaaaatatttgttagtatttgtgaaaatggtacctgtggtactggctctggccaccccacgtacatggggctggactctccattgtactcacacccagcccacttcatgcacactggggtgaagacgaacttatatttggcatccttccttattgacttacatacctgctccctgaaggcacttcagggtatgaccccagctccagttgttggctgtggaattttgtggcttcagtctgttttccaaacaaggcaggtctgcagacaaaattgaacctctttgcctcctcttttccttttttttttttctttaaatcaccaaatcctatagggccttcagagcctgataattcttctaaaggtgaggcccacttgataggtaaggagaggtggtaagcgtggttattataagaaactgcacagaggaagtttggggaattcagcagcagggtaagatgaatccttaatccttccagcttagtgtttttcatttacgatgccctcctgggaatagcactgagacggctgctgcagaatcggtttagcttatgaatcattcctattgaagaggagatttcaaaggcacgaggctaaaatcctcagggctctgatgttctgctcatactgatttcaagtgtggggtacagtgccggggatctcatttctgcggtgttgactctctttcacctgttttgctgaagacaaagtggttcagagactgcacagattaaaggaagcatgaggtttatttatcacttctttctgactaagcaggtctttcccctgacacctgagtggcatcagcccatcttctcctcctctcacactctactgcagaacgtcttggaaacgccaccctgctatcctcacgctcctgtcccggcccctcgcctttccctctcttactaggcccccgactcttgaccttgagactatagaaaagttgcagttctacatttcctgtgtcccacctagtccagtacctgtagacaaaaactccctcctaggtcagatgacacttgaaagagagatacggtgtctagtgaggaattcaatcagtctagaggtttttttgtttgtttgttttgttttattaccaaactatatataatgccaaacaacaacaacaacaacaacaaaaacaaaagcaacctgcattatttaaaatcccccaaaatctcttggaatgcttacaatagtgaccttttaagctttgggattagaaaatataaggtacttgctaaatgccagaaatttaagctgtaagacatcaagagagagaatgctccccagtgtaaaatcttatttccggagaagagatggatgtagggtgatggcaaagagctatgcccgccctttaaaactaatatgggaggccaggcgtggtggcttacacctgtaatcccagcacataggtcaggagttcgagaccagcctggctaacatggcgaaaccccatctctactaaaaatacaaaaaaattagccaggcgtggtggcgcacatttgtagtctcagctacccaggaggctgatgcaggagaattgtttgaactgtggaggcgaaggttgcagtgagccaagattacaccactgcgctccagcctgggtgacagaacaagactccgtctcaaaaaaaatagtaataataaataataaaattaaaaaccaaaaccaaaaacaaaaactaatagaagagatattttgctagaggctctcaagccctctgtgtcttacagtgtaaacttcacaatgcctgaccagtgaggactcatgggggacctgaaaggaactgggttctggacaggtttcacctccggttgcctcttcatctttgtcagttttaaaaggtcagttgtaatgagttgctttcctttattgtgacttttgcagatcacatacttgtgcctacagttagaaatagttgatgtggatgggagttttttcctagtgccacccaccccctcacttaatcgagttctttctgtagggtaattatagattggagaaaaggtaggggatattttcagaggaagacagagggaaggaggagccctaagctgaagtcatagatactgcgagagaccaagaaatccaggatcctggaatgcaattaagtcaaaaaagccctacagggtctgcattctctgaaaggaggattttatgtattcaaattacacattgtgatcttccaaaggctttcggaaggggatgttaactccctgagtgtccctgagtggaaagagaggtcacattttaaagatgtttttcactttaatccccctatttttggtctgacatccagtggtgattccattaccttgtattgaggggaacaaacagacaagcctacataaaattggaaatattagcttctcaagatggagcatttaaggtaggttttcagtaaatatatgactcactggacagtgttaatgctaagctcggtggacaccaccacacagaaggtcctgggcttgtgcagcccatacccagggttggcgctggggaggacacagggggttccagctccagctgaggaaaaagagactgttcttttgttactgtgagtgatgctgggaagggnnnnnnnnnnnnnnnnnnnnttgtgtgttgctttcaatacttctggaagtcttcattaggagttgctgtcagatcctaaggcatcttttctaaaatcttcaggggtggcaaattctggaccttaaaaatggatttggtaatatccaaatagcagaagaatttacctatccctatccccacccacttaggtgaaatgagtaaagtagaaaagcggggaaagaagaatataagacgatcttaaacatggatttaggtattagaaacagctaaaaattatttggaacaatttggcctgggaaccacagatttttaaaagaagttgatgaaatgtattttcttgattgatctgttaaatgatactgaaagtgttgccagaataaggttcttagaaattttggaaaattttggaaatcagttctagaggtgatttcattaaacaagattgccttacttggaactccaggctcaggtcagtttgtaaatactcaaaacccaaacccatatattctcgttccttctcctgctcccttttcctcctcctcctcaccccacactagccacatagactctgattttgtttccttgagtggcagctggaggcaataatgtggggcctcagaacttggcagaacaagtgctcccctgctggataaacaggccaacacaatgagtttttccaccaacttctggtctgttggcaagtcaggtagatgcccaagggagctggcaggcacacgtgggtgcttcctgctccaccgggttctgtctgaggaacccagagatggttctccctctctctcatgtgtctcccagcatgctttaactgcccgtgtttgtattttcgcccactaggggaagctgcatgacccccagctcatggggatcatcccacgaattgcccatgatatctttgaccatatctactccatggatgagaacctggagtttcacataaaggtacgtattactgattggtccccagagaagacactgggccccagataacgtttcttatacctcctcctttcaagaagatataaaagatgatcctactaatttaaatgacattcttgtggtaagcagagccctctttattagtgacctaggctaacaggtgtctggagggtttgcttgaaatatccacataatgaaagcaaaagccttctttaggaggaaatcatcttgattgttgcccaaattctaccctttatcctctggatttctgtgggtatgactgaaatgtgtttgtgtttgggttagggcagcattttccaaagtgtgttctgtggaacacagtcccttgtgttattaatggtgggctagcagggaaaagggctgtaaggccaaatgagctgggaaaatgctttcttgaacagtgttaagtttatcacaggtttcaatatgctctgcaaaggggacatgcattagattacatttcccagcttatttgaatgtagacacatttctcctcctaagagtatcacagacttgtgttttgagcagagtgtcacagagcagaactctgagaaatgttgggaagaggaattctcttcctttttatcttcccccttgtattttgtttttgttttaaaccaaaacttgttatatgacttaaattggcattaaaagagagatttctactctcttactgtagctgttaaataatcaaatttgatagtagggtatattcattggaacacctcttttgcaagtggctgaaaggcacttgtttaagcaaatagaggatattgtttataagatacagaatctgacagtgggcattttgtggaggatgaagtgtggagggcaggaaatctaagccctgtttttctttttaaactttttaaacaattgagatattgttcacataccgcaaaattcatccttttaaagtgtatagtttgatggtttttaatatattcccaaaagtgtacaatgatgatccttatcctaattcttgagcatatcgtcacctccaaaagaaaccccaaacctgttacagtccctgcttttctgcccccttgcttgacttctttctcttgttctggagcatctttctctctttttggtgggagaaggggttggcaacatggcagctgctgctccaccattcccttatttccaactctaaattcccttgggcagggactcattggcccagcctacataggtgccccccttgcccgatgagctgtgtccaggatgcacatgctgtctgggggcccccactgtggctggggagggtgaaggggcagttctaagaagcctcgctaagcagatctgctaagagatttcccttcaggctgggatcttagtgcaccaggcccatctgttcagagatgaggaaacggaagtttaaagatgcagggttaggctgggcacagtggctcagacctgtaatcccagcactttgggaggttgaggcgggcagattgcctgaggtcaggagttcacgaccagcctggccaacatggtgaaaccctgtctcaactaaaaaaaaaaaatacaaaaaaagtagccaggcatggtggtgtgtgcctataatcccagctactcaggaggctgaggcacgagaatcacttgaacctgggaggcagaggttgcagtgagctgagatcactccaccacactctagcctgggcgacagagagagattctgtcttaaaaaaaaaaaaaaaaaagacgcagagttacaaggcccaacttaaacaccaagttattgataaaactaagaatagaccctaggtctgaccaaccgcacatgcgataccttttcaattatattaaacttctccccttactactgtatacctttcgtaaatgacataaaaagaaggcaccaactgtttgcccaactataaattacatctagcaaatcacttttccttaggattccttttgttggctaaagcctgcttctccttcttgccaaggttctttatatctaaggatacagaagcttgttgctttgatgggatcaagatttagaagcttagtgcttctttagggctgtttgcatttaaatagcttaaactactgcagggttcttatgtgataatcctggaataagatgttaaaccaattactgccctcaaaatagggtcttgtgttagaatcttattaagataaaaacagccctagcatgaagttaggggaggagaggaacaacactcttaagtctctagggctgaattttacagtctggatttctgtgttgcatttgtacttatgcttacttgttttataaataataagtgggcaaattagttgctgactactttgtattctgaaccggatagtgagaggctaaatcaagaaaaagaggactgactaaggcaatatcgaaaatctgctccttaaatgagtcccacagaggttttaaactttatttctgaacgtcctatttcttaatgccaaacaatgcctatttatttttcttccgcctagtctcacaaagtattttaaatgacaaaacaacaaaatcaccaccctcgcacacacaccaaaagcagaaattaatgaaatcagaatcctgtttctacttacattaaatgtgaatatgattctaattgccagatttgccagtatctagtttgtgacttttttttagatgtaattaattttctctgtaatctatggaaataaggccatatgtttaagatctcaaaaataatagacaagtcttaatgaacatcagacaattctgaaataaatagaatgcgctgaaccagggtggagttggctgcaggaaggactgggttagagatgtccaggattggaggtcagacagacccataaggatgtggggagtgtggcagcatgaaagattagagaaagctgtaggcgtgagtctttcaaatgtcacataagtgtgtccatgagagatgggcctcagggacagggaagtctgacaggtgttcaagtaggcagatgttgctagggatacaggcagccaggagagatgcccagcagtggattccagggctcaagctaggaccccacatctcagagtagctgggatggttccagtcaggtagttccagaccgaggcacattaaggataatggatcagggctgagtcagagctgggaccagtgctgggttagagtctttgcttccccttgactggtccagagctgggatgtagggatgaggttttacctgagtagtcacatcccagctttacaactttacaactgttttcctttctgcccactcccttgtttagatttcaaaagcacttatgaacatagggcagataagtttattgggtaggcagacagcagatgtaaacagagtacagaatcctagagggggatttttgacatcgtaaagccctatggctttcatgtgacagatggtacaattgaggcctagggtcttggttatgtgtgaattgagtccctaagaccacatatttagttaaagcaggtctcagacatcagccagcataagaatcgcctgggcaactgagaaccagattcctagttccttttatctgggattcggattcagcaggactgtagtagggttcagggttctgcagttcaaacaggttcttaggtgatgctgatgaaggtggtgctgtggctgagccttgagactaatgggaaggcctccttttcttctcacagtctaaccatcttttatcaagtcccattttgttcagatctttcctggatgcaccagagctggccaccattaccagctcttgctcagttacctttctgagctcttgtagttctaaacacactgcccttgccctctcctggcttcttgcatgtgaacatttgggctaagtctccttcatgatactgtcagtatcatgcaataaggtgaggcctactgagtgttttctaagcgtgcttggtgctcatctaacttaaagcctagagtcctcctgtaagtgtctagcacatgatgttaagaacacttgaatgacaaccaaagggagctgtgatgtgtgtaggtggagagtggtccacacttagggaagcgtagagcaagcgggaagtaggggaatcccagtagagctggccagattttaagtcttcactttgaacccctcttcttactcttcttagccatgcatgatgaaagctttcataagtactaataatggcatttttgaaatacactgcggcatgtctattccaagctcaatttgtttttaactaggtttcctattttgagatctacttggacaaaataagggacttacttgatggtaagtaacctcagtgcttgtcctttatttgttctgtaacgaaagtccggggaggttgaaatggtttatcacacttctgcttaaggaattaatgaaaatttatagagatactctgttgccttcagggtatatgtttattctcagccaaggcttaaacttgcatattgcaaagagattagatttgactgtctttgtaacaaacttccatttttcctccaatatagagtctttaacttttattttcttctttgcctgctgtcattctcatctttttagtatccaagaccaacttggctgttcatgaagataaaaacagagtcccgtatgtaaaggtatgaggaagatttgattggtgatgcaattaatttctctccagtctctgtcataataattattacataagatgtgcagaatattatctgtaaagagcatataggcatttattcaggctccttatatttaatattcatctggttttaaaaattgacatttactttcttcaattgtatctttcctttatgacattattatttaatattgttcacatttaaagagattttgatattgagtgcaactgtttttactttgcagtaacgcctattatagcattatctgtggaacatcaaagtagctaatattggtggccatgatcataaataaataaagatagaaggcaaagcaaaacttcatccatttcttcttctctcattgattttcttctttgattttctgtcttcttaaagtgttgctgttcagtatgaatatgtactcaaaaacctaggaaaatttgacagttctttttttggtttacgtctatatttcctagggcttgctcagacttctctttaatgtagaattcaagccctgggcaaggaggaaaagttgttggatcgatatttcagcctttctatttatctgcacctctagaagataaacaggaaaatgtttcagcctttcaaaatattgttgcttttcaactctttcagtggtgaacctgaactgattctcttccaggggtgcactgagcggtttgtgtcgagccctgaggaagtcatggatgtaatagatgaaggcaaagcaaaccgacacgtggctgtgacaagtaagcatggtgggggtgtttcctcccctgcagcttgggagacagatatctgcccaccaaccgaggggggtggggaattaggtacaaatgaaagaatgcatgggaaggtgattaaagagcagtgctcggacacagacgccagggtatgtgtgctatgagtatgtctaggcagtcatgggaaagggtgccttctgctgtccacaggactctgaggtcttggagatattgggtgagacttactggaccctgataacagcctaagcctgaacattaggaaaaataaacaaccagccaaccaaagggagggaaagagtaagctcatcagtttatttattttgatcatgttattgttcaggttaaaaaaaagttccaaaccaacaaattctataatatgttgcagtcacacacatggaaataaaccatgttggatttctgccttctgtaaaaaagaaaaagaaagggaagaaggaagtcagaaagcagagccaggagctttagggaaagccttccgatatgttactagcagacacattcagatcggctcattggctctgcagttccttcctcagtatgttcattgcatctcagggaagcagtgcatatgggatttgggcagcagaggatccgtgaaaaaagacagttgtctatcttattaagagggatgtggacaaatgacagtgagttcatatgaacagaagctgagagaactaagggtttatagcttgcatgagggaaaaaaatctggaggagggtgtgtggacaatgtaatatatcttaccgtgttgaaggtgctgacactaagaaagagggtcagcttgttctgttccatctcaatacttagaatacccatgattgttggagctctagggaggcagatttcgacccctgtgaggagaactctccaacccttatagctgccccaagtgctgcctgctacctagagaggtagtgagttcactgttatgttgtaaaagagattcaggcattggtttcctgactggtctaggctctttaagtctcttctacccaagactctctgattctgtggtccagaactgtaattctcaacattttctctatctgagcaatgtatcagatgatatacatgtatatagcaactttcataggtgagcctattcctggatgaaatgttggtcaagctccacttctttttctcttgcttaaaacatgcacacatacctgaaagaatgtaagacagatattcttatagtagtagcatctctcatttacgttattcactctgtttctgaagctgtttttaatcacaaattatttatggcatacctgataatccattttgatgccttggtttggaactgctaatctaaaaaaaaattgctattattcttatcattctggtaaggtttttctttattattgcaataaaatatacttaatatgaaatttgccatcttaaccattttaaagtgtgcatttatgtgatgttaagtaccttcacaatgtgtgcaatgtcaccaccttccatctctagaactttatcttctccaaccaaaactctgtacccaataaacaccaattctttattctcctcttgctcaacctactttatctctatgaatttgactgctctaggtacctcatgtaagtggaatcataaagtgtttgtccttttgtgacttatttcacttagcataatgtcttcaagtttcatccatgtggtagcaagtgtccttcctttttaaggctgaacaatattccattgtatgtatatacaacatttaaaaaattcgtttaaccattaatggacgcttgggtggcttccacattttggcagttgtgaataatgctgttatgaacataggtgtgcaaacatctatttgagtccttgatttcaattcttttgagtatatatgcagaagtggaattttcggatctcatggtaattctactttcaatttcttgaggaaccgctactatttgctattattacgattttctatagcagctgtaccattttctattcctaacagcagtacatcagagtttccatttctctatatccttgccacttgttattgttattatttttataatagccatccaaatggtgtgaagtgctgtttcattgtggttttgatttgcatttccctaatgattagtgatgttcagcatcttttcatgtgcttataggccatttgtatatcttctttgaggaatgtctattcaaggtctgtatttattttttaatcaggttaatttgttgttgttgacttggagttctctatgtattctggacatcaatcccttattagatatatgatttataaaattttcttctattccatggattgcttttttacactattgatagtgtcttttgatataaaagtttttaattttgatgaagtgtctatttttattttgttgcttgtgctttgggtgtcatatccaagaaattattgccaagtccaatgtcatgaagcttttctcctgtgttttcttctaagagttttatagttttagtttttatatgtaggtatttgatccttttggagtaaatttttgcatgtactctaaggtaagggcccaacattaatatattttttgcatgtagctatccagtttttccaacactatttgttgaaaagactgttctttccacattaaatggtcttgacactcttgttgaaaattattcaaccatatatgtgaggatttatttctgggccctttattctcttctgttgatttatatgtctgtctttatgtcaataccacactgttttgattcctgtagctttgtagtaacttttattttttatttttccataggctattggggtacaggtggtatttggttacatgagtaagttctttagtgctaatttgtgaggttttggtgcacctatcacccgaactgtatgcactgcaccctatttgtagtctcttatccctcaccctactcccacccttcccctcaagtccccaaagtccattatattgttgaagtgtgagaccttcaactctgttcttatttttcaagattgtttaggctatttggtatcccttgagatttcatataaattttaggatggatttttctgcttctataaaatatgtcattgaaattttgatagagattgccatgaatctgtagattgctttgggtaatactgacagcttaatgatattaagtctttcaatcaatccctttatttgtgtcttctttcatatctttcagtcatgttttgtagtttccagtgtacaagtctttctcttctttggttaagtttattcctaagtagtttattctttttttgctattataaataaggttgttttcttaattttttgggttgttcattgttagtatatagaaatgcaactgattttttacatgttgattttgtatcctacagctttgctgaattaattattagttctaacagttttttaaaaatgaatctttagggctttttacatataatctggtaagatggttttgagaaatgattgctggtgaaggctgaatgggatggttgctggggtctctgtctgcttggcagacaaagacgaggatttgcaaggatttttatttccagtaccccatcttaatgaagcatatttaatttttgaaaccttctttgctgttagcataggttgtagaagtgtatgtcttaatccttccttaggaaagtcttaatccttgcttaagaaagcttatgatattactgataaggcaaggcttatgcacatgactaagatagactacatcatgtattaatcatgatgaagtctgaggaatttaaagtgaggcaggggaggaggtagtgaattcttcaaggggaaagtcatgctggagtaggaatttagaggatggggcttcaggtagagctagaaaatctgatatcttaaactgttgactaagatttttagattaacttctttgctccttgaagacatttaaaatcttgtatttctagaatgagcattgtttttcagaagaaacaggggtctcagataatttttagaattgactggacttacttcaatgaaatggatctattaggcatgacttgttatgctttttaaatgagaggattgctacctaaacctacatgttctttgtagagcagtaaactattttccttttcagacatgaatgaacacagctctagaagtcacagtatcttcctgataaatattaaacaagagaatgtagagactgaaaaaaaactcagtgggaaactttatttggttgatttggctgggagcgaaaaggtaatttgttctttatttgtattatctataattttccccttttatttgcttcattgtgcaatggtataatttttatgcttttctattttcctgctttaaagagcttttaaagtttctgaggctctgccaaggtgttattacatttaaccctttgtccctgctttcttttctggtcctgaggtctcctattggtgtcacaggcaggtgctttgcatgccaactctgatttatccctgatgggcccttatgatgatatgaggcaacagttggtttgacttagcctgtggcagaggcagctgcacacatgtgggagggatatgaacttctgagaaaagagaaaatcccatgttgtacccgactctaataggccaggaacgagctttgccattggaatgtggcagtcctgcctctgcaggtttgttttgctgatagaaggtctggaacctggggcgctccctgcattccctggttctcccagcagtaggcatgggctgacggtgtcccatgtggaaggccttggctctctcatgaagtgtggcctgtaatcagcctcagcggcaagcctttactgttctctggttttgtccggattctcttttgtcgtctacaccctgacccatgccctcccaggccctggctggggctgtactccagagcaataggcttcccagaatctccagtctcacttccatagcaccagtggaggcttctgctgccacaccctgtctggaggcactgacctccctcgagcaacatcatagagcaaggccatgtgcacaatgccctctggcctccatcatcactgacatcatgctgattgtccccatgaaggccagccttgaagcttggtcagtctccctaactgtatgattgatccccacttattgcactacatcactgagttcccgtatgccaagttatggccacttacatccacgtgagtaatggttacttggattgtcctctagtatgcatttgtaaaacctgagcagaaagtcatccgggtatttctagttgggaatctaaaattttactagtatggggccgggtgcagtggctcacgcctgtaatcccagcactttgggaggccgaggtgggcggatcatgaggtcaggagatcgagaccatcctggctaacatggtgaaaccgtgtctcaactaaaaattaaaaaaaaaaaaaaaaattagccaggcatggtggcgggcacctgtagtcccagctactcgggaggctgaggcaggagaatggcgtgaacccgggaggcggagcttgcagtgagccgagatcgtgccactgcactccagcctgggtgacagagggagactctgtctcaaaaaaaaaaaaaaaaatttactagtacgggcttgtaactttagttaaacagacgtacaacagatggaaataatggaggattattgttatttagagcctaaatacacctgaaaactgcttaatactgacagactggagtggaggcctgcctctgcacagtgtcagtggttattgctaatgatatttatgaggtgtttgaaatcatgtccttcacgtagtttcttttgctcacacacacctgttttcctttgccctagatgtgtccatatgactgtgtcagtgtgatcttgtagaaaagaactctgggctttagttcccgtctcccctgaatggtgttcttcccttaggctggcagtttgacatttctggggctcagtttcctgtctgtcgaaggagggtgatagatggtacctgccttgtatatttcatggagttaagatgctcaaataagaaagcatcttaaaataacagtgcttaaaataacatagactgctactatttgtgacccatcagctacatgatttctctatgtgtaagcaggggtaccacacaaacaagtccaagggagttgagaatctattctatttggaaagaaacctccccctggacatgaattcatttctgtcatcaggagtttctcctttatatgtgattcgaatttgcgtagttgaacattgcttccccacttcctttcttgagagagcagctgctccccctgcatcgtttgtccagtcagcagagacatgaatcatgttgagttcccttttttctagcatctgtaaactgccctctacctagaataaatgctgtcaagatgaaattaccagcaataacgcagcaaaggagaaactatgcatggtccctctggctgcagaggaaaaaagacaaatttacgatgcagtatacatttgacttttcatttctctcccaagttttttgctttttggatatttttcattttttccttgctatgagaataagtagggaaggaacggactctagataaccaaccctaccgcctctagtcatctgcctgaacttggagcccgtaacttacatttttccaatatgcccattcattgtggctcaggacaatattttctcttcatgcttccctctgggctcccttcggcatggggactgcggctcagtctcccagggcccgagctacccatggtgacagcacttctggagcctggtttccctggatggatggcccctggggaagcatctgcagctccaccatttgaggtatttcagctattccactaaaacccaattgagaggaaaatgatggcaggagagaccaaatccccagcctcatacacgaaggatggttttttatcactgtgggtcttctctacttttatttttccttgctttccaggaggctgtccccctttgccctcgtgtgaatttgaaatttctactttgtgcttctgccgtcctgtgctgctcactgctttcttttctctctggtaggtcagcaaaactggtgccgagggagctgttcttgacgaagctaaaaatatcaataagtctttgtctgctcttggaaatgtgatctctgctttggcagaagggacagtaagtgatcctgcccccatctattaagtaatattatgagaaaccaccttttggggcctcatagtccctttgccacacaccccaaaggctggtttgtttttctgtttggaagaggacagagggaatcctggctatggatgcctgcttgctgggagttcccatctactaaaaagtatgaatggtgatgctaatttcctatgacataggtcaaagaatgggcattctaaactttggcaagatccaaagacccagccacaaattcttgttttactcggtttctaagctcagtgtcttcatccctgacttgcttgcctctgtgtttttctcagaatgggctgtcaaaaccaatactttttcttttcctaaatagaaaacacatgtgccataccgggacagcaagatgactcggattcttcaggactctttgggtgggaactgcagaaccaccatcgtcatttgctgttctccttctgtcttcaatgaggctgagaccaagtccacactgatgttcggacagaggtacgtgtggtctctcaggacccatcctctgtgctaggtcttgggtcttaagagtgaatggcaaggctgggtgcaatggctcacacctgtaatcccagcactttgggaggccaaggcgggtggattgcctgaggtcaggagtttgagaccagcctggcccacatggtgaaaccctgtctctactaaaaatacaaaaattagccggccgtggtggcatgcgcctgtggtcccagctacttgggaggctgagtcaggagaattgcttgaactcaggaggtggaggttgcagtgagccaagatcataccactgcactccagcctgggcgacagagcgagactgtctcaaaaaaaaaaaaaaagaatagtgagtggcaaggggctattgtcagagaatcacaaagtaagggacaaacagccttttactaaattacatctagcaggtgatatgtaaacttgaggcatcacttattgaagccaaagcaataattatattttaaaataatgggcaagaacatgccagtcaaatgtatggtgtttaaaacaaaacggaacaaccaaactcatttcagatgtgaattggaaatgcattggggtgttacttttgttcttcatggcactggagtctaccttttaggttcatattatttcaagtgtgtaaatctcaagattgataactgcctttagctccggtatttgcgatccattgcacagttgctgataaaacacccagaaaattaggtgaatgcagaagagaggtataaaaggaaaagaaggggaaggaatctttaccagcactggaggtaggaggtctggactgtatgctgagaagagatgcagatgacagcttcctacttttaaaaattcccacatgagacttcctagatccctgggaggtgtccataggtgggcagcaggtacgactccataatcgtaaagcaagagttacatgtgtgggtttggttcatatctttttttcttgtcactttcttttttacctaccccctcccactgtccaaggcctgacctccttcaggcatgtttcctcagttccagtgtttaggttctatccttcagccctcgtgcctcagtgttcattcccagagtgcttgcggttctgtggattgggcgatctgaacatcttcagtgctcagcgagctctgatgttggatgagggctcagagggctgaggttggatgtggattctgctgccttcggtttgtttaattctgaacaatcatgtgatctttagacaagtcaccagtgctctgtgggctttaactagctcatttgtacatggatgcacagagcacttccctgccttctccctgggagtgtgtgttgtgtggttatgcctaaggaatagtttaagatgagagaaaggacagatgggggtgggcattctgtctgggaaattgttatggcttgtttaaactgcattaagccccagtcatttcctgagccctcaacagaacatagaattacacagccgtggcacctgtgggatgtctaaataaataataattatattgaaatgttgtagacctaatatatcttttaaactggatttgggtcctttacttcctcccaaatcgcttccttgattagttaaatgcttaggccaagggggttgcagtaggataacacctactttcctcaagggtctcagaaacccacaaaccagcatctgcttatggaaaacaagatcgcatcctgcccagtgtcttaaacttgagctttaacaatttcctctgaagacatgtttgagcaaaccagctctaagtgcatttataaaggaaacatctcttcaaaaaaaatccttaccagcaaagcaaaaatattctggctcttctcaagccagagtcaccgtggggcattggctatctttgcaaggcccagtcaccttggggcattgctgttatcaggaggtatttgcagctgtctacaggaagcattttgaatatcagttagtgtctaatatatgtcaggtgtgtcaaaattatagcacttctgacagcaattatctcacctttgtacagggtatgaaatcaaggcttaggtgcaaagccattggataccatacctgagaccacacagccagtaagtgactaaacatgtaggatgtcctaggatgcagtgtctgagcacagccctttgggtcagtaagcccagtgttgaagctaattctgctattgacccattctcttgtttacctctcccctctgagccccagtcttctctcccacagagagatatataataatgcctactttcaagaatattgggaggattatatgagttgcttcagtttttacctagcacaagggctggcatgagtccaggtaaaaaagtccgtgaccgatggcaggctatcggtgattgcaagttctgcttttccttcgtcttaaataatctcacagtattgcggcttgaaaaggtcatagtagtagatgggactagactgaatataatgcactgtaagggacagcactgtcatataagggagaggattaaataaagtagaattagaattacattttgggaatgaacaaataaaaaatgctgcaggtaatttgggcttccaggaagtaaaaagtaatataaattatgttttcaaatgaaataggtcggtctacattcttttatcagagtcatctagattctgctctctgtgacagcagggactgagtttgtcacagacattagtttctcatcaaccactgcacaactagttcacagtaggtggtcaataaataaatgcttatcaaatgaatgaacagatgaatctaaagcttattgtgtaaggttacttggaaagttagggcagttgctgaacattgatgccattacgtccagaagtttggttgggtttggatctggtttgctttccaaactattattggaaatgtgtgaggtttcgttcctttccctttatccccaagttagttaatggattatttaaggatgctgagctattctatggggccaatacctgctgtattgttaaatatactcattgaacccaattatacagcagacacaagactgaacatcggattagacatggtatgtgatagctaatgagattaagcactttgaactcagaaaagactgccgggcacatcccaaattcattgtaatgagtgttcattatattcttactgcagaggtggccaaaccttagggcagcatgaggttcctccgttattcctttgtggttctttcaaggacgtgaagagagtacacgtttgttctgcttgactgtactgatgttctgaataacacagtgtagtatgtgtttcgaagcagttcaatctgcagatccctgaaggcactctaccaagagtcctgttagcattcttcaggattataggttagatactggaatttaaagggaaaaatttaccatgtctatttctatttttgttttttaaattatacttttaagttctgggatacatgggcagaacatgcaggtttgttatataggtatacatgtgctatggtggtttgctgcacccatcaacccgtcacctacattaggtatttctcctaatgctatccctcccctagccccccaccccccgacaggccccgatatgtgatccatccatgtgttctcattgtttaactcccacttatgagtgagaacatgcggtgtttggttttctgttcctgtgttagtttactgagaatgatggtttccagcattctggttcttccattcagtcggggttgtttcctttagtttcctgaatgcccagcatcgtgccattaaagaagtaagtgctgtctcctgtgttctcaaagagcttttaatctagctgaggaggcagcacttgaattacgaggcagtagaaagtcaaaaagccagactcaaattagagcacttttattgattcttttcttctggcttccagaattctattttgtagtctttaattactcttctcaactacttttacagcgctatttgaaaaagatatttatgttttagaagtgtgaactcaaatcacccaattgtgttggaagcctatttaatgtaccttgatttggggtggtaataaagggaaagaggccctctgagggggcagaccaatgtggttaggaagacctgaatcggcacatctttggcactgggagttttgattgatccagcatgaataatttgaggctttgtttgtatgttgaatgtggaaggagaattgatatcttagggaaagtaataatcttttttcttttcctgatgtgcacttaaaaaagtcgtgtcatcattttaattgtgtcatctgccagtttagtggtagctagattaggcagagcctgaatagtgtgcatatgaaatttatgtcaccagaacatgagaacacattacctacgagagtagaatgagcattttggccaaggcagacacttggctacactttgacatgaaagaaaaaaaggcttaaatcattcctgttggggggcctgttgctgaaacaccagtagggttaatttttgcccttggagggaagaaatactgtgggtgacatacatttaactagatgccaagtccttatccatgtcatttctgaatgtttctcaggagactagaactttttaaagacacaaaattttcatttctccctcctgccctccctccttccctcacaagcagggaaatggcctcaccagaagctgggaaggtgctttggagcagtggtcctttcagaagaaggtttgggtgttttagatgggaactaggtctcagagcagattggaaggttagtttctgattagttttatatgtcagcttggctaggccatagtgcccagttacttaatcaaatacaaatcgaggcgttgctgtgaaggtactttgtagaatatgcttagcacttacaatcagctgactttaagcaaggcagattactctcaataataagggcgagcatcatccactcagttaaaggccttaagagctaaaatggaggtttcatggagaagacaaaaattgtgcttcaggatggtaacatcaactccagcctcagtttgcagctgtcagcctgccttatggctttcaaacttgccagcccccatagtcatgtgagtcagtttcttaagtaaataaaagagtgaggtatatcatatatatgtatgtatgtatatatagtaggattttatatatacaataggatatataatatattatctatatttatctatcatctgtctttatctttctcctattggttctgtttctctggagagctctgatagtgaagaatgctatactctctatcctctcctgctcccacagtgggagaatctccgtttctgtctctcacacaccattcacagtgcagaatcacacatgacagatttattctgtgtgctgaaggtgtgaggttgtctagagctccttattcaaatgccagcactatcctgaacacctggtgagaaaagaaggatgctgaaataaaaggtatgaaggtaccaagaacaaatatctttgtggttattccagggaagccaaagtaaacagaagaaacgccaaaggtaggcactcctcgtgtcatttagaactgactgtggccaggaaatatgagtgtaggaaaccactgggaaagcaggtggggatgagactcatcagaatgcagtggttctaggtcttctccccactcaaggagggcttcgttcaagtgccaacttacgagggtgccttcagtgtcatcacatgtgggtgcttaacctcggtggtggagatgggtagcatcagcagtcttggaagctggccatgtgcttctgaaatgtaaactgcaaattcagtgatggaaggattgagtggtgctgggaagaaaataacagaatgctcgacaatggggaggtagtttcctctttccattctttagtagaatatatctaagagaatctttactgacttaactgtctctgtagcagtatctagatggaagatgtactgtggcctctgatctttgtccactaggcttggtctgcctttcctaagggtggttaacattcattagctttgaggtctttaaaaaatttggtcctggttccctccctgtggggagaagagattttatacctggggcatgccctagatcatatatcattaaagtagtgcttgacttgannnnnnnnnnnnnnnnnnnnnnnnnnnnnnnnnnnnnnnnnnnnnnnnnnnnnnnnnnnnnnnnnnnnnnnnnnnnnnnnnnnnnnnnnnnnnnnnnnnnnnnnnnnnnnnnnnnnnnnnnnnnnnnnnnnnnnnnnnnnnnnnnnnnnnnnnnnnnnnnnnnnnnnnnnnnnnnnnnnnnnnnnnnnnnnnnnnnnnnnnnnnnnnnnnnnnnnnnnnnnnnnnnnnnnnnnnnnnnnnnnnnnnnnnnnnnnnnnnnnnnnnnnnnnnnnnnnnnnnnnnnnnnnnnnnnnnnnnnnnntggattaatcaaatagtatcacagccagtttcacctttaaagaggatgagtgagcagtcagtaagtggctagaataaggcttctatgggtcattgacttgtttctctatatcaaagagataatgtcctggaaccataaggctggttggtatcacaattgctgtatatagcttctgctagacaaaatcacaaaacctgccttaagagcacttcttaatttctgctgtcttcttgattttgtgtctccctgtaagctacctgaagttcttttggaaacaaggctgaacaataaatgcacacgtgtgggcctgtgcccaagttccggatcatgttcactggcagcctcacgccctagatccaaaccacaacaagacagcagaacactgtgtaaccgcattgatggcaactagctagatattaacaaaggaggaaactgatttttttttctttttttcctctgaaatcagttaaagctaattaagggaaagtgaattttgaatgtccaaatagaaagaagctagtgatcattaggctccttcattctctaaatttgccaaagttgatggtaaaaagaaaaagaaattgtagatattctatatccttttactcttagtctcttgggagaatgagagactgagaccctctttatttcactttgcaagattgtttttaacatcctagataggagaatgtttgttctagtaaaaaaaaaaacaaaaaaaaaaaaaacaataaacctcagggcacaaaaattcagtatctctcttagtaaccctagtttattctgcatctggaaattcttgtatctgacttgatttctttctccatcagtttgtttttcttaactcaatttttattgaatataatatagtaaaatacataaacttaagtgcataactaatttttttttataaatatatatacacatgtgaccaccacccaggatcttggaagcctctctctttgaccctctcagtcaacaccgaactctcaagggtaattgtcaccctaacttccatcaacatagattgttattgcctgtctttgaattatttgaaaatgaaatcacccagtactgttttgtatctggcttctttcatacagcgttttatctgtgaacttcatctacattgttaggtgtagtagtagttcatttttcacagttatatagtattctattgtatgaatatggcttataggtatccattctattgttgatggatatttggattattttcatgttggggtgattataaataaagttactatgacattggttgtcatgcctttgggtgaatatatgtcctcatttctgttaggtgggagcaggtcataaggtgtgaaatattctactttagtagatactactaaagatttttccaaaacgacagtaataattcacactctctccagtagtagttgactgttatagtcattgctcattctcagcaacagttggcattatcagttttaaattttttagccattctattgggtgtgggaaggtatctcattgtagttttaatttgcattccctgaaggctaatgatgttaaacaccttttcaggaggtgttttattggcacttcttttataaagtgcctgttccaagtctttgcccagttttttcttattgatttaaagcagttattttgggtaagtcctttgtcaggtatatgtattttatatatcttctcccaccttgtaacttgccttttaactgtcttaatggtggcttctaatgaagacaagtttttaattttaatgaagtcaaatttattttttcttttatgttctatttaagaaatctttggccaggcatggtggctcatgcctgcaatcccagcactttgggaggttgaggtaggcggatcaccagaggtcaggattttgagaccagcctggccaacatggtgaaaccctgtctctactaaaaatacaaaaaaattagctgggcgtggtggcgggcgcctgtagtcccagctactcgggaggctgaggcaggagaatcacttgaacccgggaggcagaggttgcagtgagccgagattgtgccactgcactccagcctgggcaacagagtgagactctgtctcaaaaaaaaaaaaactttgcctaccccaaggtcttgaagatactgtcctatattttctgtggaagctttattgttttacttttcacatttatgtctgggatctctctggaacagaattttttacatggtattgggggtgaggaataaagttccacttcccctcagtgccatgtattgaaaggactgccctttccactcttctctatggacacttttgtcataagtcagatgactgtcatctgagtgcctgtttctggacaatttattctgtttttattccaagatttctgacaatttgatcagttttactttataagaaagtgatgatgttcaatcctctaactttgatcttcagaactgtccttgctattcttttttttttcatttctattataaatttcagaatcagcttgccaatttctatacacatacacaaaccccttagggtttttttgggggaaggtggggattactttaattctctagagcaattttaggagaattaacatctttctctctcagtgtaagctgattttttcatattctacctttagtggatgtgaaggccccgcttgccccatttgggctgaatgaagtctcgggctccagtgtgagacacagattcccactgttatttgagttccaaatggaagttgggttgcgcatctttagctactcctctggatcttttctgcaccatctctgtcctgctttgtgacttaggagggtgactggtttgggctcatgcaatgggctccttttcctctggcttccagttatgttacacccgtggggaaggaacacaggcaggcgatcagaaggagagaagagcgtgaggtccgggtatttatttcctggcttcttccctgccagatcattttgggttggctgtgtccctaccaatggctgtgacaattcatacctaccaggcaatcttttccttctagccttctctctctggctccccttcagcttaagggtagtaatggctccccagtccctaatgtgggtaccacattaacccttgttatttcccaacacctttccaaacctttgttaagcactcttcaaatcatgcaatttgagcaggtggtctgtttccttccaggaccccgattactacagaagtggggatttcctaggcaattgttaaaagtattttgagaatgaggaccagttacaccaatggtgataaccttgctgagtctgctcacaaaatatgcctctggctaaacctgcctgagtatagcatagaggctttagctttctctttctggtatcatgtgaagttatcaagggactctttatgatttaaaaagtaagattagtagccttgaagtgtgcccttaagtgtccataagcattttagccatgagttatttttcactttttgccttactaagttgataatggatgcttgtaatgtttgtgcttgcatctgagaagcatccacagtactgcctgaggatgtcaggaggagaggtgagagtgtcaaacaggaccagactttaaagtagtaataaaattgctgttatttgaaaaattagactcaaagcacttctagggattgcagcctcaagctacagtgaacaagagagagttatcctaattcttaaatggagtcttacattgaagttgttaaactcctcttttgacagttgggttatttagttgtctgctttagcaatgaatttttggaatgacatctgtagtgctggtgaggactgctgaatttcttgcactgaaatagaaatcaggatgtcatttgctgacaacggtaattaacccgaatcacaaatcagattgtgctggcaaatatgacggtgtaagaactgttggaagttcaaaatgaaaaagtcaatagcaaataaaacaggatatcacatattttttaatgaagctttaccttcttgaaagtaagcctaagtggagtttcctttttaattggacaaggccacttaggtgttcgtttctgtgcatgctgagctgagtcatggcttttgtttttggtatcacttggtgcagctactgatttgctctccacagttgcccctttgggttactctccaggtacatccctgtggcatctcaaccccccaggccatgtgccccagagatcgcatcatctcttatactggaagtggcaaaatggtggccattaggcatgtttgtttgtcccacacattgtttttataaatagtttaaaactgggagacacaaattaaagaaaaaacagtttctgatttttcttggaaaataggatgatctgaatactgtggggcctcctcaccgcatggtgatgacgggctgtgatggggggggcgggtgtgtgctcagcagggagccatggtgtcctctggccagccttactcagctgtgggacccacctgacctatgaggcatgtgttgatgtgataaatacatcaggggtggttttgggtaccacaggtgaggaagagaaataattgattctattatttctgtctgtgtatcattggtataagaaactgcagtctccaagaggacagagacctcgtctatctgtcttggtgtaccccaaattcataaatgttaattgaactgaaaagaacctcaacttaggcaggtaaatctggtgatggtatgcagggggcttaaaggagggtactgaacatttgaaaaaggctgtaaccataaggatggctgagaacacagactaagacagtggcagagggaagagagaaagaggaaaccctgagacaattcgaataaatgttcattagatttagagaccagtgggatgtgaaggagaaaaggaaaggatgagcttgaggcctcaagggttagtggtgccgttagtccaattaggaggatggttggtgaaagccacaggatcccttctgcttccctatttccagtcttttgacatgaggaatcttgggcttaatcatattggtttagctaatggtaataattagctgaattgtccccttatgtttttaatcccagagctaagaccatcaagaatacagtctctgtgaacctagaactgacagcagaagaatggaagaagaaatatgaaaaagagaaagagaaaaacaagactttgaagaatgttatccagcatctggagatggagctaaacaggtggaggaatggtaaggaaaagtaaggaggaagagtgaggcatgagtgtgtgctttttttatttttattttttttgagacagagtctctctctgtcactcaggctggagtgcagtggcgtgatcttggctcaccgcaacctctgcctccagggttcaagccattctcctggctcagcctcccgagtagctgggattacaggcgtgcaccaccacacctggctaatttttgtaatttttttttttttttttagtagagatgaggttttaccatgttggccaggctggtcttgaactcctgacctcaagtgatccacccaccttggcctcccaaagtgctgggattataaacgtgagccaccgtgcctggccgtgtgtgtgctttctttttcttgtgactgttggcatcctgggagacacttgggaaagttggggcaatggtgcagcttgattcctcctggcaacaacctgtatgaacaagcagatgttttcttagtccctaacacaggcaccatccccatcccatcacttggctagcatgcattgttagtgtggaccagtgattatctgcaaggctgccttaatctgcttccaatgagatgcactctatctaatattgtaataacttgctggtacccctatttgtaggttagaggaaagtgcctgagacttagtggctcagactgcttttgacttaaatgaaaaatgtcattctctcctatgtgagttttattactggtttggggttaaaagtctacctctggcaaatacttgcattttttggctgaactcatcttcatgccagaaatatagggctctcaaaggagccctgtgctaaaatggagtcttaaaggcttggttcgtgactcgttttccttcttccccaaaacattttctttggtttgttctactgggagaaaatatctcagagagctgacatgcagtgggtgggtgggttgtgggtgaggtgttaagaggggtttccagatctaagtgcagacagattattttagtgattttagcattgtgacgtaggttagaaggtagaaggctttttttttttttctttttaactaaaataaggcaggttggtgtgtgtgtaggggaatggcggatagttggaagttgttcttcaggtcctctgctgctgtgttcagtattttaggtgctgcagctgtacctcagctttgggtaagggtaggagcccgggggctgttgtgcaggattgggaggtaatgctgactgtaactgcagcagattgtcttgtgattacacgtttgccactgctttttgctagtaagggtggggtgtcaatgagctattgtttaatagaaaaacaattacgtggcaaacgagaattcaagacaggtttcaaaaatgacctagtagtctaaataacatgattcttttatttttgaaagattttctagcagcacacgtgtttggaaagctactagaataattgaataattcagcacctgaggctggtggatgattctttgcaatttggcaggaatgggagagtcgggagcagtagttggcaaggtggggagtagccatatgaagttttatttcgggaatcctccaggtcagttctctgttgggtgaccaggacattcagtaaagccttttggtaaaggattgggggtgctggctttagaaacattacagggtgggcaatgaaccttttttcccccatcattttgcatctcttgccaaactttaaccttgcagttctccatccctcatcaaatgccatcctctgggatctgcccattgccttgtttgcctgactcaccatcatgcttagcatcttttgggcactcagtcctgtttttggcctctttacttggacatcattttaactgtcactcttcgaacaccttgcgaatctccttagaaatgtactgttttctcccagctctttgggtggccgaggtgggcagatcacctgaggtcgggagttcgagacccgcctggccaacatggagaaaccctgtctctactaaaaatacaaaattagctaggtgtggtggcgcatgcctgtaatcccagctactcagtaggctgaggcaggagaatcgcttgaaccctggaggcggaggttgcagtgagccgagaacccaccattgtactccagcctgggcaaaaagagcaaaactccatctcaaaaaaaaaaaaaagagaaagaaatgtgctgttttctgtgccctcttgggtgagatcctacatgagcctttaagttacataatttggggaaaataatgtatgatgatatactctggcacagagtagacctccaataaatgtatgggaagcaaacatatgcttaatgcaggtgctggagattaaagggtgggcagtcagatgtggtctcttccctcaggacggtctgagcggggaggaaggtaaatgccagtcctcaccaataaatgtatgatggtagtccacgctgcataccaagaagtgaaagcacaggtgccaagagttatacaacagggggccctgaccttgactgagaagccagtgaagggttccttgaatatgcaatgtagagattagtatctgtgagaagcgcagttagccaggcaaaatagggggcatgaggtgaggtgggggctccgagaatggaggacataggccagcagggagcactggcctgagatgggctcgagggataggcggggctctcctgtcttcaggattttggtcaagggtgttaagctgcaagtcataccttcgcatttttgaagatccattggctgtattggagagtggactgcaggtcggagaggagggctgggagctggggtggtcttccagggatgagatgatggtattgaagtgacagggtagtaggaagggagagaaatggatgaacctgagagatatttaggaggagaaattagccgggtgtggtgaggggttggctatgggagagggaggtttcaatgacaactgtgttttctggcttgccgagttggatggagggtgagaccattctctaagactggggatgctggaggagaaccaggggtgagggaggagggagtttagggtccccgtggaacatccaggggaacattattcagataagaagttaggtctgagggtctggagctcagaggatctgcttgagttggagtcatcagtcttttggtagtaattgaaggcataggtaggtgtgagggccctttggactacagagaaagaagagaagacagagagagtctgagaggcccccagcaaccccattgccacgtcaccactggttgtgatgggagaagggaattggagggattccgcagaactctcctttcctccccagctaacatttgtatttaaaggtgatttttctaggggcaaagttcttaaaggtagagaactgactttagtgatgtaagtttcaggcgagaaggagagtagtgaggggcagtgaggaggtggggagaggtcctttgtcccatggagggggcagagctacctcaaacagtaactctgtgtctcatgctatgtgccagtggacgttacagggacaacagaccaggccaggctttttgttacattctgaggctgggcatttaatcctcaagtagctcttgtgaccatgaatgacaggtctgaaaacgtccccaagtggatcagtctctggtaaagctgcgatctgaactgagtgggcctgactctaaagttcattctctttctactgtctgcacagcctgctcatcaagttagcagaatgatttgtgggcagggccagttagatgagtgtaataaatatcacgccaaaaaaaggggcactggaagcccttccatggtctccccacgtgtcagtcctaattcttcagagcagaagataatgagggcatagctggtgataatgagggcatggctggtgtgtgtaaacgtgagagctgggcttttgagatgtggactgaaaaagcagaagtgcccttcactaaaaccagagtggcaggatattgccaactttcctttgaaacttgacacgcacattggttctaaacttacagaaggtggctacttagctcccctcaacatttcctgggtattgatatttccacatgggcagtctccacgagttaaagaggccttgtcaattgtgtgcagtctcctgggaaaaagatttctttctttgcatggtatttataatttaagagtttggctgctatacttcagctgctggagagcaaggaaggggtatnnnnnnnnnnnnnnnnnnnntgggctgatgtatttgaagagagcaaggagcagaatggtacaatggggtgatgggggaagagccaggcagagcccagtgctgcaaagcccggtagcacatacatgtgtaacgtaccttgaagcaaatgaatggcctgatctggtttctgttttggctgctctgtggtgatgtggtgcctgggaggcaaagaagctgggaaagaagcggtttttctcttctaggtactttaaagctctataatatatgctcaggtgaaatttggctggtattttcagggacttcactgcttttgtgccatactggcctcatcatgtagataacatcacggattcattccatcttattattctgtaagagtgatgtctaatttttttaaaaaagaatcagctttaaaaaatgcaaagtctcatagaaagtaactcttttctattttaagcaagcattcagaatacacacacatgcttgtgctttttcctacttgctgttacatagaatgaagtaacaatacaaaggagtaggaaatcaactacagatcaggtgcaggcagataatggagataactgaaaagaggtaagtttgatccagctggcagtgttgggactgtgccacaggacagggcatgccctgccttatgtcattcaaaattggtgaaatactgcactattacatgcctagaggttgctctcgccctcccccacacctccacctgtaccaattttcaaccctttgtagcttgatgcatgctatagattgaatgttttgtgcccatccaaattcatatgttgaaatcttaacccctaaggtggtgatagtaggaggtggggcctttgggaggtgattgggttctgaggatggactctcatgaatggcattagtgtcctgtgagttctgagagagcttccttccctctggtctccactatgtaagactataatgagatgccatctgcaaaccccgaagagggcccttaccaagtgccaagatcatgttggcactctgatacttggacttctagcctccagaactgtaagtaataaattctttataagccacccagtctatggtactttcttatagcagctccaggtaagacaggggccacttcagaatgcaggcctagcagttttctcctctgggcactgttgaaccttgattctcagaaggcggcttgtggctcatatcacatatactacactaagctttaattcctttctgacattgccatggaggcaggataactccgggcatgtgcatgtggctaaggagagccacccactggcctggttccgttccccagggtgctagttaggatccttggattgcaaacgacaggaattgacactgcctggctaaagcaaaaagagaatgtgttagaaggatacgaatgattcgcagactccaaagcagaggcaacaggctccgacaagtgtaggctggggctgcttcagggatacaggcagcagagacaggcaggtctcttaagtggccacacctggaattaatgctttttcccttctgtatgtgattatgttggagaagcagaggcccaggatagaagtgggaatactgtgcttgctggtgtgccttggctggggaagggcagggcactttgatacattgtctgatgaagactgcatgcagtttagggggctaattccttaaaaggaagttgaggtgctattttctaagaatgggtgtcgagtggctgaaaagcaacaaatgttcaccacaatctactagtgacatcttgtgggccgatatcgatggctggtctttcttcgaatctggaggctctgttggctctttagcctcacggagatttgttcagcctgcttgcttaaggaacagataggatggagtggggcagttgccagaaaatggaattttttttaaagctctattgctttgttgctcatatgtgcgggagagactcgaacaatcctatatatggagatagagttaaatagttggattcagagtgaattacagctccagctcatgctaacctcctcccaatccatcaggaaaactcttgacaggaggatggggagggcggggtgaagtctggatgcatggcttcctgttgctgccaggtcagtcttcacacatgctgtcttctgatactttgaattttgcacttgaaaaataattttttacagtgatttaagtcagaaaaaggaggacctgaaaatccaggtgtcagaacaaggaaatgacctgacaaactggtgtatctgcagattttcttctcttgaataattgcctataagattaaaaaacagtggatatagatttaccttatctgctgaagtcatgcaaagaaatgatttcatcacaggctgagaaagtgtggaaaaatcggcagtctctaacgcagatttgttcatccagttcaaaacctgtgaggccagcagacatggttcagtaactagctaaatctgtagcctctagtctgatttggggctttgtggaactttgggaccaccacaattggaacacaatttgctcttttagcattaaatcttcgaagatgctggctcccttcttagatccatgattataatggactctcagaaattagcatttcattggagcgatctaatttactaggccctctgcttgcttttgagaacacaaccaaactctgtaatagaaataccgtctgtctactaagagaatgttgtggcctgttcaggtggtcatgaatgtaaggaggatgcagagtcccaggtgaccagtttattagaaaatcgctctagaagggattagaggatgttttaagctgcttacagtgtttttaggaatgagggtgaaagatgctatttgcatgcaaaataatctcataaaagaatgattttttttttttaacatcacatttatataatgacatcttgtagccagctgctctcacccatctggcaacttaaagatttccttttagtttctttgatacagaaattacctaccattaggtctgccactgggcctatttaattggaattaaaagaaagcacctcgtttgccagatctgctgtggttcctggcggaagctgtgagtaaccagcaaatctctgctctggagttactgagagaatgcaattacctttctgtgttctcctgaggctttaggaactcaacttatgaaaaggataactagcttgttgctatttcatgtgtgaagttttaatgaattactggcagtctaatggttttctttctttaaaaaaaaacccaaaaacctattttagaaattttaatagccctaatgagaatttttgattagtgtgtcattctcatctgttgccgttgatggatttctattttttgtagaaatgttatttacgccctctgggagtttttattttataattagaatgctctgtaagccttataggtatgcttcagtgaatgctcctatgtaaacacaaatctttttagtccttaaaggtaattacatctgacgatagtaaatgccaggatgcttatttaaagaaggggaaggtttccagtgtgtgtgtgtgtgtgtgtgtgtgtgtgtgtgtgtgtgtatgtgtgnnnnnnnnnnnnnnnnnnnnnnnnnnnnnnnnnnnnnnnnnnnnnnnnnnnnnnnnnnnnnnnnnnnnnnnnnnnnnnnnnnnnnnnnnnnnnnnnnnnnnnnnnnnnnnnnnnnnnnnnnnnnnnnnnnnnnnnnnnnnnnnnnnnnnnnnnnnnnnnnnnnnnnnnnnnnnnnnnnnnnnnnnnnnnnnnnnnnnnnnnnnnnnnnnnnnnnnnnnnnnnnnnnnnnnnnnnnnnnnnnnnnnnnnnnnnnnnnnnnnnnnnnnnnnnnnnnnnnnnnnnnnnnnnnnnntgtcaggtcttgcctagtgttgggaaatttacaatcccccagacgtgtttgtgagctggacagtgtagttaccaggacgctttctggaagtcattttctcggtcctttgaagagtagtggtgttggaaaacctgcccttggttcctctctgggcaggagctgggctgctttagttcctgcgtgttgcggctttgttcttctccgttgaaatggctgctgtaaaaaataatccttactgcctgacctttagaatataaactgaaaagagctggttgtttagatgtagctttgtaggagacatgttaatgctttgattgagagaattgttcaagagaaaccacaaagtctgctgtaggtttcaaatactgttttaataataataaaaataaacctgaaatggacttgcatggctataccatgttttatttttggaactgagctccagccataaaattatcgtaaagatctcagaaacacaaatcacagaataagtaaaaataataatttatctgccaagcctacaaagttgcaaatttgtcagggagaggaggggataagaggtggactttgaacaatattgccttttgtgctttttacatatactatcttcatttatctttagaacaaccctgtgataaaggcattgttatttcttctcccttacagaaaggaaaccaagagggtaagcaggagatgggcttgtgattaatgagacctgttaaaaggtacaatgtggctttagcatcctgccatagcactggagatgagagagtcccttgactactttcacagtgccttacagcagcattggctagcttgttgaatctctgccatctgggacaacccttctacttggtgacgctatcattccttaatgggagaagagggcagctttaggggaagtcaggcctgtgactttggttagaacaggtcacttgctgctaaggttatagaagtctatccccggcccctgcccactcagctgaatcaaaacacacactgggcagctccttagcttaccctagcctcatgataccattgcctctttggccatttgaaaccaaagaacacagggaatatatctcttccagatgtttttgtatcttacctctttacttggagtgagttggcctgtggataatatgaccatgttctggttggtgtctggtctggtacagctaagaatttcatctttgtcatgcgtaagctgaaagattaaattcatactgtactggattgccctgttcccaaatttcagaagctagagctcaaaaattagagatacagtcacaatccaagaagaggaaggatatttaccaaagtgttagtggtgaatttctctggggaaggaacagaattagaagggaggggtgaaggaggactttcaagttttagttgtatactccacattgcttgagttgtttatgttaagaatgtatcctgaattattgtgtgattagaaaatctgtctgtctgtctgtctgtctgtctatctatctatctatctatctatctatctatctatctatctatgtctatctatctctaatatgtttaagaaaaaaaaagaacatggtacagcttttatagcccatggatttagcagactgtagagaatatagatcctttaattggatgaaatccagtctgcacactaaggttgttgatggatattttaagccaggaattggaactgaatgaaatattgatttggttcaggttctgttcaaaggctactctgatattctggttttgtttaaggtcaataattttagaaaaaacgcttaagtatagcagtcttgttggaaaaggaaaaagggttggctcaattttgtattcagcaaggtaatagtttattctatgttttgcttcaagttgctgcttcaaacggaactgtgatacaaaagtgaaagcattgggtgttaattttacttaacacggaggccccatgtagtattttgtggttatgcagtgagataatggagtcataagcagcagaactaaactatcacagtgttttgtttatattgagataaatgtgtacagtgttcaggtgggttccttgaagcatgatatatattgttaatgaagccacagattgaaatctcagttactctattatttatttttatttatttatttatttattgagacaaagtcttgctcttggcacccaggctggagtgcaatggcgcgatctcggctcattgcaaccttcgcctctcgggttcaagcgactcttgttcctcagcctcccaaatagctgggattacaggtgtgcaccaccacacccagccaatttttgtacaaatactaagttttgtatttttagtagagatggtatttcaccatgttagccaggctggtctcgaattcctggcctcaagttatctgctcgtcttggcctgagccactgtgccctgccttctatcatgtatttttgaaaaactctctgactcaaggcagttttcctgggcaatttttacaaaatggattttgtgggctgggaactggggtgaggcttggaatactgcagacactcttactactgactgtagcaagatgattgtggtgttgatggtaaacattgtgatggaaaagtatgttgggtttggttttgctttccaggaagatatttgggagactcagtggggccagtagttttcttagaatcctttttatgcactttatgtctttgatgttcttgttggagatagccattggccagcttgcaagctgtaccatttctatcaatttgattgacaaatttggcaattcttcctttgaaggccccaacaaatgctactctgcaaactgagaagttgtaggtaggatctctgcaagatagtctagattggctgcttttctttcctaagactacctgatatcacagtaggttattctatttgaactttccagcagagccaattaattctggcttcctggaggagacagtggtattgaaatgtgagcttttgcagctctagtcttggatccagggctaccctgtcttctgacctcagatttggagattcttgaattcagaggatctgagccttagagtgttctatcaaacaatgccagtgtgtttctttatttggctgtttctattaatgaaacagtgacataattaattcataattaggatgccttagaggtctgtttcctttttaatcaatcactagagagaatatgactctagtaaagccccaggatattcctcaactaaagcaaaatgaatgtaaagaatttaggcatctctgcaagttggagtagcttggaaccagtttacttcagggatgcatcttgagaggggaggttttacatagttctcttttttcttagactagttttggccaattaactaagacctttcttgtcaaatagaaggaacacaaactctacccacactacagccctttattgtgtcttctgtgtatttttcaccaggactgattatttttggtactcttcctggagggttgcatactcaatttctttaatccccaactctgctcggctatgttttgcaggagaagctgtgcctgaggatgaacagatcagtgccaaggaccagaagaacctggagccttgtgataacacccccatcatagacaatattgctcctgttgttgctggcatctctacagaggagaaagagaagtacgatgaggagatctccagtctctacagacaactggatgacaaggtctgtggccagagattcatagttctcattctgctacaaagatgaaagatggcaggtcccagctccctatggggctgatgtagggctacagcccgatctttgtttctggtttcctaatacctaccctagcactttgatggtgcagattcagggagtttgattcatgtggaatagaaatgttaaagggaacttgactgaaaaagcagtgtgttggcctagatagacaggcgggtgctatttagagtcttgtcttctagaaattggactgggctgattactgcatgaaaggtggggtgtgtgagtgtctatgatctttaagtctccctttcttctctgggcctatccttcacctcttggaaactccagcagtagcctcagctaggggcaagggttgtgactcccagaattcaagcatgtactttaatcatataaccataaggccctgggatgagaaatcgatagcagtgtggtctgatggcttcacctaattggtgaagctcttttcacgggtatattcttgaatgaagtagtttgtacatgctaattggggatgtccaattttatgacaagcttttgggactcaaatagtcatgtaaatgcacaagttggcatagaggaaaagaggccttggagaacactgggagaatcaattaaaggttgggttaggaatcccagaggcatgagaattgaattgatgttttatatgatcttggcatgttgcccttggaatattctaaatcctttcagttgatttcatcagggttgctgatatttttagcctgatttaatcttttctattgtggttcagctcagagtgcttagggacacctctggcttgtatgaagcagctttgttatgttaaccttgccattaatcttacaggcttctctctttgaggtaaagctcagagactggtatgacctttgcaagctgaatgtgactggttgccttaaggaagctagttctgcttgtttgtgattccaagagcttgcactataaccaaagctttattctggggtcatcctactcttctgaaaacacatttaataaaatattcgcacccacgagatgggttacttgccctttaggctccacgcataccgttatcttccatttctatctatgtattttatgcaaaacaaagagaaaaaggagatcaatagtaagttaacagtatatgcaatttcttgatttctccaaggaattgctattgtttaaacagtaaagaagattagaccatatgcattttttttcctcattttagaaccaatgggctcatttttagtaatcgcagagaatcctgggtgagagggtgagaagctgtttctgtgctcagttctctatgaatagacgcctgcatggcggaatcgggatcatttaccttggcagcacagggaactttcattgatccaagagagagactttagagtctcaaatcagacatacgaaatgtagtgattaggacagagagatgaaaatgccatgtccaaagcattcagttggtagctgaagagctggcttgagagtctccgtctcctgatggtcagcctaggccattttgttatgtcattttcctacagcatgtgctttgaagattctgtaaggcccgctgttggaggctagtatttgtggtccctcacatgatgatgctgagagacgtgggagaggactgagcctagaagcctcagccttagggggcaccagagctaatggtttgccctcagtgacccttcccaaagactgcctgattatgtcttaccaactgtcattcttaggggtcctcctctgaaatgttctaggaggcacttccatgtttctgttgatgtaggtggtttgacgcttgaagaatacatgaggtgggatatggcaccttcttagtctactgaaaggtagaacaggaggtatttaggtttgggtgaggcactagcccagggtggttatgtgacttacccaagtgtatatcacatataggtggcagagctaggatgaagttacatatcttctgactcccaccccagtgctcatctcattttgccctcagccctttaaatgaggacctggtcaacctcagtgaatctatttagggtgtggagggagaaagaccacacggtttcctcccagctgtcccttctgttcctccgtgctgccccgccagggctccaagcacaggtactctcccaaggctatgctgtgtgatgggagagcatgcactgtggactcagacctgtaacaatgacactgagacctgggcagacctgtgacaataatgctgagtcctgggctggcgcctggccctgctgaaggtgctttttctcatctgtatcatggggcttatatctgttaattcaaaaggctgtggtgaggattaaaagtttctagtacattgcaggtgcccagtaaatattagcttccttctttctcctgggctgggctgggctctgcttacttccctgtgtggtgtggaaggggtggtgccaagggggccaccagcagagacacaatgtgaacaagttggcgctggcactccttgtctcttagtctctgtccctctacagtactgctctgctcttggagatcctgacacgaaccaagcttaagtagaaatgaaagttgattatttttatgcagattaccattgcaataaaaacatttttatacttaaaggtgaacagtgacctgttgacaactgaggttgaccagtttctcatttataagggtgtgcatattattttgttttatttatttatttatttatttatttatttatttattttttgagatggagtctcgctctgtcactcaggctggagtccagtggtgcgacctcagtgcactgcaacctctgcctcctgggttcaagcaattctcctgcctcagcctcctgagtagctgggactacaggcgcacaccaccacgcctggctaatttttgtatttttagtagagatggggcttcaccatcttggccaggatggtcttgatttcctgacctcgtgatccacctgcctcggcctcccaaagtgctgggatttcaggcctgagccaccacgcctggccgcatgttattttttttttaatttttgagatggggtcttgttctgttgcgcagactagagtgcagtggtgaaatcacaactcactgcagcttcaaccttccaggctcaagccatccacctgcctcagcctcctgagtagctggtactacaggcacataccaccacactcagctaatttttttttttgtatgttttgtagagacggagatttgccatgttgctcaggctggtctcggactcctgggctcaagtgatcaagctgccttggcctcccaaagtgctgggattataggcgtgagccactgtaactggccttatgttatttcatgtataagaaaattcaagtataaaatactttctgaaaagtgctttaaaatctgttatccatggacaagatctttagaaccggcatcagagtgagcgtgcttatgcatgttctaagagatgcagttgaatgtgtagatataagcacaccttattattctggaggttttgaaagactttaaaaaaaatcacagtagagctcattaattccttagataagttgccttaataaagggtaaatatagtttgggaaatgtctctgatacaagtgatccacgtcttctgtagtatcatccttgttcttcatccttcccaggtggggccaggggcccttggtttttcactgtaccttaaaaatcactgcatcccagcttgtcatctgttgggaggaagcctgcatcttcaggctttgaaatgagcacagcgtaaggacagagttcactccatttctctcctcttgtggtttatatcacttgtagtgcttgtccatttgtcccaggagaagagatggtggctctccgatggtaaattctttgaatcctttatgctaagttgtctaatatttaagtgctcaggaacataaacacaaaatcgttactggtaactgacgtgctaagtttataaagtagaagagaaaatatatctacaaaatagtcttctagttgtagaagtgccagtttttggaggtttcattctggtataatttccctaatatgatttgtgcaggaaaatagaaccattaaagaaacattggtgtaaagggttcagtagaaacaggatctctttaagtagaaaagcaaagccaaatgatggtctacataaaggacaaggagattcagatcctgtatggctgattttagaattttctttctccatggaaagcattagtttgtgacattaaattaacatgattcaaatgtatgcatagatatcaccaaacaggctggggaatatcccgtggaacattgaggttctgtgacccaggcccttaagtttgggttagatttcacccctggaaaaggcaaaaggcacagtacagggtgtgtttttctgggctgctgatgaaaacacctagacaggacctggcacgaagaagtgcccaaggatgctcaattgaatctgactctgtttggtgtttagaccctagaagccaggttgtcatcttcacaggctatgtttcaaattttatttgaagtcgtgaaaataatgcagtgaagactgtgttttttatgtagttaggcatcatctgcctgctgctttgcctgcactgggggtggactgagtctaaggggaggtggggagaggtgggcagcgaatacccttgcttttgtggcagcaacacctagtggcagaaaaagagtgagaagagcgaatttgcctttcccacttcagtgacagcccagaaagtaagcatgaatgcttctgtccctcagctgccctgaggtttttttttttttttttttttttttttttaactgttaagaaaattaacttccaatcgagagggaggtcttccaatgccaaatctccagttcatttttctctggtctgagaggtttgaagtggaaacattggctctccctgccgatctggtggcagcactcctgcttactgatgcatttgacaagatttgggataataacatatgacagtgcagctaggtagaaattcactcctttattttttgaattaggaatttcactgttagcatctttgaattgggagggatatctctaacgtccctttcagttcccaaaccgtagatctctgatttctcaatgagcaggaattgggttgaatgtgcaggatattatatttccagaatagtcagctgtttcatctgctgagaaaggtgggtgaggaggtattttaactgaatgagatctcggaatctgtctgttttctgtgcagtaacaccacactattccttccttcttatcagcaagcttatggtagctgcctgtcactgggagactgggatatcaaaaatgacataactaaccaaaaaaacaaacatgatgtttcgtttcaggatgatgaaattaaccagcagagccagctggctgaaaagctgaagcaacagatgttggatcaggatgaggtaaagaatgcaatatatttttttttccacaaagttcttctattactctttgttgttgatgtttgttccaggaatttaattggcatagaagcttttcataattacagaatcatgtggaaatttcttggtagatgtcccttcactgcctcttacaagctgattatcactgaatttagaaaataaatgtctgactttcaaaaacccctgatgttttgagattgagtagccagtggctacagttcgttctggaagggcagagacctttggttgggtgatcaagcaaggatgatccttttttatttttatttttttgagacagggtctctctgttgtccaggctggaatgcagtggtgcaatcatggctcactgcaacctccagagctcaaatgatcttcccgcctaagactctcaagtagctaagactacaagaatgtgccaccatacctagctaattttttaatattttgagacagagtttctctatgttggtcagggtgatcttgaactcccggcctctggcttggctcctgccttggctcccaaagcactgggattacaggtgtgagccactgcacctggccttgggcaaggatgattctgcctcctaatacccagcaatgctgtgacctgttgtttgagtcctacttcagttttgcaatcagcttgctcagatctttgatatacaccatgttctcctgctgtcctgtagggatacacaaacaaaaacaaaactagaaggtagaggaggggaaggcaaagagaacggggcccgagtactgcgtcagcatgtttgatacactaaaaaggaggcaaattgttttcagtctctccccaaaggcattcagttcttcagcaagtgtttttactacattgtgtgttgccaagtattttacaaacaagaacctaagcaaaggatagccagccaacttatcaaacatgcacaattaataattcccttgctgaggaccgtttaagtgttgttttcttttgtgctttaagttgctttctgcttcgttgctgaaatgctatggattggatcccactgtgcaatgacagcaggtgcctgggtttctgtcctcaatcccaggcctctgtaggcataaaggactctgtaaccatttccttcctctttgttccctttcatctctttaggacaatgattacctcccctgcccaaacacttcccttggtagggagataatctacacttttgtaatcaggtgaaccatatttcgttgatctctctctcttagctatagtcgaggccttccatttgcttgagtttcctgccctctacctcccattctactccagtttcacccacattggcacagctgcctgggataaactttacttcttgttactgttaaaactccttaacatttttctttttctatactatcaaggcagtatctgttcaatataggaaaatcaacttaggaacaaagataatgagagcgtcggcaagcccagacattcgcttttaactaaagatactgtttggggtacatccttctatatcttcatgatggatgttaaaaaaaaggtgactgaccactgttgtatactgttttagttgattgtgaagtcaaccagtttacaatgtgaaatcctgataacacttaaaaattatgtaagtgttattccttgtcatttccttggaaacgactctcagatcctttgcttatttatttatttatttatttatttatttatttatttattatttagacgaagtcttgctctgctgcccaggctggagtgcagtggcatcatctcggctcactacaacctctgcctcccaggttcaagctattctcctgcctcagcttcccaagtagctgggattataggtgtgcaccaccacacccagctattttttttttgtatttttagtagagatggggttttgccatattggccaggctgtttgtgaactcttgacctcaggtaatccacctgcctcggcctctcaaagtgctgagattacaggcatgagccactgcgcctggccccatcctttgcttaaaatatggaatagctataaaatgcagtgattttttgatgtgtaattctttctttgagttaagggtatacagctttaaactaacaacaacaacaacaaaacatacaaaacaaaacacatgcacacaaaacagatttttgcaataagaacatatctgtctttttcttttatttttttatcgtctggaccatacagtggggtttcccatcatcctgaactttttcaacttgttttcttatatctggtttttaaattacttacttttggatacagcatagaacataaacatttgaacattagattcacaagttccatgccatctcatttccccagcttttagcttccacaagaagagactatgagaagatacaggaggagctgacacgtctccagattgaaaatgaggcagccaaggatgaggtgaaagaagttctccaggccctggaggagctggctgtcaattatgaccagaaatcacaggaagtggaggataagacccgggccaatgagcagctgacagacgagctggcccagaaaacggttggagcatttgtgtctagggggtgggacttccttggctgccgttcctgtactcatattgatattcattgacagacatggtataaggaggcagtggctgaatagttattcagtgttagatgcattctctgaggtccctccaacaattgaaatacttcgtgcaagtgacttttgttcactcttcctggaactgcatatcatgactgttttatatccagagaattaataacattagtggggatgctttgtgggaatagtcaaaagagtgcagactttggagccagaaaagtcttagttacaagtctgacttcataactcttagaccttagctgagacagttaagctttgtgagtattcattcccttatctgtaaaaatggtgacgatcatatgctgcttgcatggtgtgaggattagtgacagtttatgtaaagcacttagcacagatctgtgcatatgctacgatatcaatacatacatctcaaagcattgctactggcaagagcagggtcccatagaaggtatggacttcactcttcttgcttataccctcctgaatgaattccattccctcccgtcagctttttgtcctagctgttaccttcaggagcctggaactaagctgcccttgtttgtttgtttgctgttctaagccagtgcttcagcctgcacattcccttatttccagattctccaaatgaaagatgccataggttctgcagtgagctagcggtagcaggagcagtgaatgtttggcatggcggggtgggatgtgtccttttctacctggaaaatgggtggtggagaagctgactggctctaacctgctatccttagcacctctgcccaatggcctggtgtcctgggcttgtgcccagcctgctttgtggaaagcatccagtttaaaaagaagtagcagatggcgcaggagagtgctggtctgctgactgtgaggctgacaggaaatgctcctcgcggcatacattcagctccatggaggaagacttttctagcagcttcccaagatggggactactgcctctgaggattttaaaaacaagatgacataagcagttggcaatgccaaacaaaataaaacaaactcattcagaagtcacttaggaaagggggcgacttagattttctctgcttagtgttttctatgagattcttttaattagtccttcatgttacttgcttcttaaaacaatgaaacatttttcataatacagtttttaatttgccatgaaaccaaagtattactagattggtttagaagactattattagacagattgtttaaaaatgctctagctgcatatgggagaattgtataaatagataactgttttactgatgttaaacgttagttaagaatacataccttttggcaagatacatgaggatgaaaaagagatgggtttattaaagtttgacaagaaaatagagcttctgctatatagtaagaaaccaactattgaacgtaacctaattttgaaaaaaggtgaagggtgtttaattcagcttcactctgaaaattggaagacttttttttttgaagttgttttctaaacttattaatgttcttctgggccatctattctagacccatctgtctttatcaatttaggtgggaatatggaggtggcccagggagcaggtttgtttaggagtgaaggtggggacccttgcaggtaagtttagaccctgaaatgaaacagataggactgacatagaatatctggtaagtaggaagatgcaattacatgttataaatttaaggacttcctttttggcttaacttatttccctgacttggaaattgtcatctgatatgtagacatataatgtatcaggccatgtgatacaacttgttgataaagagttccccttcttatccaagaatgcagtgctatgcgagagtttgccttaaaaggattcttaggttgaagtcatgtaaaagaaatccattctacatgatggtgttattctttgtaatgtggagtgtatgaaattgatgggcaaccctttgaatttgttgttgaaatttgtttttcagactacattgacaaccacacagagagagctgagccagctacaagagcttagcaaccaccagaagaaaagggcaactgagatcctgaatttgctgttgaaagatctgggggagataggtggaattattggcaccaatgatgtgaaaactgtaagccagcccttcttttatcctctctacctgctcctgtcaagttagtagggtctgtgctttactcttttaagcattcaatgcttagcactgtgctttgcatctgccatgtgctggttagtgtttgaatgaatgaaaaaagggctaattgaatgactgagtgaattgtttgttggggtgaggaggaggagaaaaaaaattatctttcaaatctaggcagtgtcttcaaatgttggttggctttgtgtaaattggtttatttctcaaattggtttatttctcaacttatttcctaatgttgcagaagtttggaattaaatagcttaagcaacagttctagtctcagaattgtgtttttccttttctgaaagaacccagtgaagtgaaaattctccaagtcagtgtgaaagtgataggattctaacagtggcttaagaaataaaaccacatttaattattcacaatatgagaagtctaaaatcttgccactcagggtgtgatctgcctcacctgggagcttattggaactacagcctttcaggccccacctcagacctattgaatcaaaatctgcactttaacaagattctccaggtgattctttatgcttattaaagtttgagaagcaaattttgttttggtgccatggctcaacaatgtcaagttctcaggctttttctctgtttcctttctcctgtcctcagcttgtttccttttcataatccagaggattatgcctcatggtagcaaaatagctgctgtagtaccaatcatcacatcctcactcaaccacatccaaggcaggatgggctgaaaaggccaacttctttaatccaggagggaaacatatcccagaagtccccaggagacatatccttacacttcattggccagaactggatcacatgaccactccacatttctgggaaagcaaaggggactgggattactataattggcatagaccaatcatgatgaatcccttggggttgtacatattggtgctcttggttatttgtttatttatttatttatttattttgagacaaacttttgctttgtcacccaggctggagtgcagtggcgcaatctcagctcactgcaacctctgcctcctgggttcaaccaattcatgtgcctcagtctgccgagtagctgggattacaggcatgtgccaccaggccctgctaatttttttattattattatttttttaagtggagatggggtttctccatattggccaggctggtctcgaattcctggcctcaagtgattcgcctgcctctgcctcccaaagtgctgggaatacaggcgtgagccaccacacctggccattggtgctgttgacagcgagaaagtaagagatgtggggataataggggtggtataaagttgtccagaaactaggaatagaaggaagagatagagttaaaaatggtatcagcccagaacaggtaacaatttgctggaatatagaaaggctattgttgttattaaccaaaaagacagggtagagacatttttaaaacaaaacaaaaagctttattgaggtataatttacataaagctgcacatatttaaagtatacagtctgagaaattttgacgtatgtgtacagtcatgaaaccatcagcaccgttaagataatgaatgtccccatctcccccaaaagtatgtgggggcagtttctggtctctctattttgtttcatggatcaaatcttcctgccaataccacaatgttttgatcaccatagctttataataatacagcatcttatacaaaggagtcattgatgaatatatgttgattttgttgagctggggaatggtattacattgcttaccttacatgtcacaattccctgaaaccaaattctttgaatttagccattttatctttaaaaggctgaattctacatcagtctgcttagtggggacactcaggtcgtgagctgggattgttaaatactggaaaatgctcccaagatcaggcttccttttgtagactatttctgggaaatgttgaaagccgtttttggatggtgtaacaggtcccagcttagagtacatgaccgctcgtaaatgtaaccattctttcatggaacctttattgtaactgattatttcataaatccttgtgaatgaatctaattctagcacagacttctcagatactatagagttaatcttattaagcttcaatttggtgattttatatttgaagatttaattttttgaaccatacattggtgttgagcaataaaattcgatgtgaggtgattaaatggcctcacaatatgaaggtggagttgatatatgggaagttgatgcttgctgctgataacgataaaggaagaaggtatttttatgctaagttctaaaatagagctgatgaaaatgctaatgaaatcaggagtgtctgggtgcttcagtattgaaaaaagagtctttacctttgggaatctgaactatgattgagattgagattgtttttaaatactcaattggatatttttgagattatttttggattccagacattggatgtcctagttaatttcattgatagccatcatttctatcattctggtttttttcatataattatgagttcatcattagggtgataagagctaagggagtagttgtatgactttggatgagtgactgtacttctttgggcttcatttttctaatttataaaatgacaagataagctcagacagtatcaaaaattgtcggctcagaaattacttgacttctgcacatttgttttagatttatccttataggtacaggtacttttcttattggtcatgactatgaattgatatagtaattcttttgatataggaaaatgaacagatcaagggaatttgtttcagtggttttgtatttttattcctaaaatgccatttaattttcacaaggtccctcctggtagggctctgggatgggggaaaaatatgactattggagccttccccagtccacagttctagaatatgacagctctgaaaagccagaaaacagaaaaacccatatatccccagctcaatcatgtcttgaaacatttccagagtccagtcattttgtttcatcaacaaaacaagatgagtccagcatataacaagatgagcccaatgttaactttatcgaagtttatgagtgagccttctcttcctttcatgtactggtggcactgaactgtcaacagaagtatgatgaggtccatacatttggaaaggagagctttatttttcataatgggttgcagcctgcagggtggccactcttacaggttgggaagtgtagcctttggccagaagccagaaagaagcactttgaggatgggaagaatgacagggacttatgtttttcacagggtggccaaataaacttattcaacaggttacaggaggagctatgaagattcatgaaaggagtggcatgtgcatgtgnnnnnnnnnnnnnnnnnnnnnnnnnnnnnnnnnnnnnnnnnnnnnnnnnnnnnnnnnnnnnnnnnnnnnnnnnnnnnnnnnnnnnnnnnnnnnnnnnnnnnnnnnnnnnnnnnnnnnnnnnnnnnnnnnnnnnnnnnnnnnnnnnnnnnnnnnnnnnnnnnnnnnnnnnnnnnnnnnnnnnnnnnnnnnnnnnnnctttggttggtggttgtgttgaaattgcaaaagagaggggcaggggcaggctgtggttatcagcagtgaagcagtggagtgaatatttcaaaagggctggcttctgtttaacccttggggaagaaagcctaatgctgattggcgagggagggtgtatgaccaggcgtttccaacttcccaatctgtcctgggctggaactcggtatttaacatttctctggggtctccttggccacgagggggtctgttcagtcattcggggggttaggattttatttgtatttcttggggcctaccttaccttgctaccttcaaaggaatttagccagaacctgaatagaagttgaggtagagtaaatgaactgaattggactggctgccttattttcttttggcccacactgacttctttttgtcccattctaacttttatgactttaaatgtgaacatgcaccttacttaccttgggtgtggcctaggaatggcagtagttcatcatcgtgcacagccactccatgcttgagagatgggggtagggaggtggagaggtagggatgactccctgtataggcaggtagaagcagcaggccacatcttccatagatttcatgacggtgtggtcttttctcctgggttggtcattgatactggatcccatggtctagtatgtactactgggggcattatcagactctgggacagttataaataaaatttcagcagcaaactgattttttttttttttaaataacagtgtcctgaaattactggaaacttttgaacatgaaaccactaaatatatgaactttgtagtggtaagaaacctcacagttaaaacccctttgttaggggtattgtttttatccatcaggcacaaactcaaaatctccttttagatctccaaggacaggaactggcttcagaagttatagctctggtttgggagaagaaatgtctagctcttattttggaggaagcccatctttatacatatctatatttttactcttcctcaatttacatgggatctaggcataaaagacaaagtgtcctactttgacagacctggaaaagaagaggaattcattctcttcccagggtgccagagcttctggctcagcagcgttttcctaccaggagctggtgtaggctgtgaattccatgtggaagagatgggttttactttgtctttctgcagaggctggacaagatgtaagatacacctggtcaggctcaggaaggtgtttctcatccttctcctacactggactaaagacagtggcagaacacactcaacttaaagattgcatgcttttctcacccagtgtctccatgccattagaatagaaaaggaatatagtgaggagtggttttggtaggcagatctttggcagtcggaagtaaaatgggtttaacaaggacctccatgaaggtagagtcagaaatagatacttgtcaattttcttgctgttgacatacattctgcagtattgttgacactggagtcacttgacatgtactattgttgaacttttttaatttttaatttttatttcagtaggtttttggaggacaggtggtgtttggttacatggataagttctttagtggtgatttctgagattttggtgcacccatcacctaagcagtgtacactgtacccagtgtgtgctcttttatccctcaccccacttcccaccctttcttccaagtccccaaagtccattgtatcattcgtatgcctttgtgtcctcatagctagctcccacttatgagtgagaatatacgatgtttggttttccattcttgagttattaatacttcacttagaataatagtctccaattccacccaggttgctccgaatgccactattccattcctttttatggctgggtagtattccatgattttacacacacacacacacacacacacacacacaccacattttctttatctactcattgactgatgggcatttgggctggttccatatttttgcaattgcaaattgtgctgccgtaaacatgcacgtctttttcatgtaatgacatcttttctttgggtagatacccagtagtgggattgctggattgagtggcatatctacttttagttctttaaagaatctccacactgttttccatagtggttgtactagtttacgttcccaccagcagtgtaaaagcattccctgttcatcacttccatgccaacatctatttttttttattttttttattatggccattcttgcagaagcaaggtggtttcacattgtggttttgatttgcatttcactgataattaatgatgttgagccttttctatatgtgtgttggctatttatattgttgttgaattcttatggtaaggttgatgccaaactacaggcactcagcagtttctagtgtacttcatatttgctaccaaatttcagggctgatacctggttccatttttttagccctcaaatgtttactgaacagatagtgatatgatgagtgaatgacatcaataacgacataggtgggcactcagagtgtactgtggaacatcaaaaaaccacggttggagtcattgtctttcaaccagtggaagcctgtgtttctgcgctggattctggacagggctctttgttttctcttaaggtgctaggctgcactctggtggctaaacaaaatatgcacacagttacttgctcatttggtcaattgctcttaaagaccatgtttgcatttcagcggatgggtttctatcccaagtagcttgcttcaacttttgtttcaagtagagctttgaaacttagaaactaaatatagatcatgcgggaatgctggctgtcagaatcttcttttctaaggtggatttagactgttgttctcagatgatcttaaataatgagctagattactgtctgtttggaaggaacaggtgtgaaaaggcaaaggaaaatagactggtagtagtaatgaaaagttatgctgagaaaccttcatcaagaagccctttggtaattcatagtacattcttatttattcgattttctgtttaattgaggactacatagaaacacctttttatttcaatccttgtttatagaaacatattcaaggcattacactacttgtctacctgaataagcacactatagagaacattaatgaagttttgatttgagtttttataggaattcagcatcacctttcggagcattgggtgtcgctgctgttacagagatgtaaggtgtaagacattgaatggaatacctttttgaagttatctccttttaaaaatcttcagtgtttcttcttatgctgtcatttctctttctaaaaattgatggtaatgaaaaacctagttaattgaggattatatttagtagggggtttcaactgaaagtttcacctgaggtgtaggagaacttggggttgaatgtttagtactttccgcttgtcctttaattaggattctgaaccagaaatccatggacaccttggggatccaggggcaggtttccagggagtccgtgaacctatggaaattgtgggcaacatttgagtgtgtccccttctttgctcagttggcagatgtgaatggagtcattgaggaggagtttaccatggcccgcctgtacatcagcaagatgaagtcagaggtcaagtccctggtgaaccgcagcaaacagctcgagagcgcccagatggactccaacaggaagatgaatgccagcgagcgggagctggcagcctgccagctgctcatctcccaggtgggcccttcccttccccatcattgcactcttgttgtcttgagatctgctccctccatgcccttgctggtgctgatggtgcaccttaggcttagttgagggactgctttgtgtaagcttggcctccccaggtgatggcagcccaggtctattcctagggctacattttgttgtgtgaaatagatgaattctgttgagtccgttccctttttcgaggatatatctatctacccatccatagatggatggctagctagctaatgaatgtaaaagattgggtggaatctctaaaactcctgtaagtaaggcaatattccctcatcttttaatctctaccataggtccactttaatatggaaaaacagaaactactactaatagtagtagtagcaggtggcattttattgagtgtttactatgtaccatacactgtgctaagtacttcacatgcattttctcacttaatctgaaaaaaattcctggtaggcaggttttattattattcctcagataggcagctgagatttagactaaatgtctgtccaaacacctacagcccgtgaatgacagagctaggactcaaaaaaatgtgtgtgaacccaaaacccatgtcttcaagggcttttcaagcccgagggtacatttcacttgcctattgagtaaggctgctcttcttcctattggagtggcattttcagtttaataaggtagcttcagaaaacagcaacccagtttctgggctaccactgatatctgagcttggtatttgggtctgacgtttccaggaggggtctagttgtatactacttgctgctttatgccaggcattaaaataggctgtcatttggagtaaacaggaaacagataccaacatggattggtgtgtcaaataatactgaggcggacaaaagcacactttattctggtatgcttttaaccataataatgtgtaatcatagaaacatctccaacctctctgtctaaaatggatccacaaggttccattttataaccagcataataagcagaaatgtattgaaaagattattcagtgctaatatgtgatagtaaaattgatatattcatacattgttgataaaagtataatttggtcagtccttttgggaagcaccgtggaaatcagaaaccataaaaatgtaagtataatttagtccagtaatttcactgacagtatttttcattgttaatgaaaatgaaaaaaatttatttcatatggtattctcatttcctgattaaaaatattaaaagcttttatgcaaggtattgaagacagtgttattttgcattataataaaataaattgcccaaatatccattgatagactaataagataaagttacatggaataatattatgcagctcttataaaaaatgtaaaaacctagccattgggaaagtctaatggtataaagttaagtgaaaatgaaaatgctgagttggatttatattgtgctttgcattcctgcagctaagaccaggaatatcagggggaaatagtccatagattggtttatggtttacaccactttttctggatttgctttagaactttatttttttatgattatatagttgttatttataaaaaattaaaataaaaatgatatgcattaggcaacagtgtacctcatctgtgatttctaggtcatctatgataccaaaagcatgtgttttggccagcctgcctctaacatttcggggccaaggcaagggtactcatggagaccccatggcctgcagcccaccctcttctctttcaagctggacataccagctccatgtccaactcccttttgcacccggtgtgaactgatggaactgttagatgccggctgccatttgtttaaatgggtgaggaagaggtagtgccagccctggccttcagacctggagtaggaagtttctaggtccccagtactctgagggtggtctataggggacataggttcagatggacatgttcctttggcctgtgaactctttgcttagtggagtagggtgtagccagaggagggcccagtggggtgctctgaatcgtccaggtctcagactgacactgactttgctgtatgagatcagagtcgagaatattatgatgtgttgagtttaaagagtacctgttctaaagttctctttctgcatcagcaacaaacacagcttccattaggtggaggtttgcactctgctacaattcatgcatagcaaagattcgaccattatttcctgaggttcaaaagtaacagaaaccatggctgtttatattctgatgtgatctaaggaatctgacacagtctttccagctgaaatgctatcttctttgtttacattcatcctcgtcaccaaaaactgtgcttataagatgactgttccaacggaggagttgtgttttctggagaggttatttcattagattaaagctcagtctccagggtcttcctgcctaaagctgagctccccagatctggagaggggagtgttctgtatatattttccatctgcctagaagttaccactgtccctgttcagccaacaagctctcattcatccattcatttcacgaatatttattaagcacttaccctcatggagctagcaagtaaaaaagacaagacaaatgatgtagacattaggtgctgtaagaaagtgttggggcctgagtgataaggagctagccaaggtagtgtgtgtgtgtggcatgtggtggggtggtgatggtggggagggaaagcttccagggagaggaaaatgcaaaggccctgagatgggaattggtgtgtctgaaggacagaaaaagggaagacctaataattgaatggtgaagatggaatccagaggtgcatgttcaatgaatgaggccttcagccctgcacttttcccagcccctttctctcatgcatgcttttctctgagnnnnnnnnnnnnnnnnnnnnnnnnnnnnnnnnnnnnnnnnnnnnnnnnnnnnnnggagaagcagaggtctgtcttggtatgattctgaacaccaaggcaagggtaaaatgggcaccatttggttgtggcactcagaaaagggactcaggaacccctcctctctcgcattttcctaccagacaattccaggccagcctggatgaccacttgctagtcattcactcttcctttttgcttgtttaaagcacgaagccaagatcaagtctctgacagactacatgcagaacatggaacagaagaggaggcagctagaagagtcccaggactcgctcagcgaagagctggcaaagctccgagcccagggtaaatatttgactaacgtgcaggtgtcaaacacctggcctgagtcagacagcctctggttggctggaatcatgatgtttagtttcgttcagttaaagcatttctaggtctactgcaaacaaaaccataactagaaaaaaaggagcgatttcttttctttctttctttctttttttttttttaagatggagtctcgctctgttgcccaggctgaagtgcggtggcataatctcagttcactgcaacctccgcttcccggttccagcgattctcctgcctcagcctcctgagtagctgggactatagatgcgtgtcaccacacctggctaatttttgtattttttagtagagatggggtttcaccatattggccaggctggtcttgaactcctgacctcgtgatctgtctacctcagcctcccaaaagtacaagagtcagccaccgtgcccagcctaaaaggagagatttctgagagaccatccccacactgaatctgctcatcttcccatttcctcacagtccacccagttacccaaatcagaatcccctgctccccacctcctgactctagttggtcaccagagccggtccatttcacctgccagaggcccctctggttcactgtccaggttaactaaggactgtggctacatccatctacccatgcccaccctcagtctgctctgggccagccactgtgtggcatcctgagggatgattctaaaattcacattctctctctgtccaaacggacacttctaacccttccatggcatcctgttgctcttaatataaagtttgaactgccgtggcttccctggcacccccttgaacaagctctaccctttgccagccagccttgtgatctcctgagcttagggaagtgcctcgcacataggaagcacttcataaatattaatgaatataagcagaaattcaagagaagggtctagaaatgcagaaagtagaacaggattaagaatgtatgtgccatgcaatgtgaaactagaacatatatattatgggttgcaatgaaaattgttagaattttctcagaaagccatttgaaaatacatattaataactgtaacatttttcataccttttgatcatcacacctcagatattcattgcagaattttagatcagcaaaaaagaggaagccatctaaatgtctaatagttaatacactatggcgtgttatttaatagaactttttcttcacatgaaatacatgaaggtgtgcagcaatgtttatgatgcaatgttaggtgaaaatcacaatatatcattgtattcttactatggttataactattaaaaatgaatggatgcagctgggcacggtggctcacgcctgtaatcccagcactttgcgaggctgaggcgggcggatcacgaggtcaggagttcgagaccagcctggccaacatggtgaaaccctgtctctactaaaaatacaaaaattagcagggtgtggtggcacacgcctgtaatcccagctactcaggaggctgaggaaggagaattgcttgaatccaggaggcggaggttgtaatgagccgatatcgtggcactgcactccagcctgggcgacagaacaagactccatcttgaaaaaaaagtgaatggatgcttgtgttcctaaaaattcatatttaagataaaagtggttgtgatagggtagttgggattggtgatgctgttatcagtatttatatcctttattgttgttttacagtttgctcagtaaatgcaatttgtgtcagacgccaaggcaaatttaaaaagaaagaacatacccactctctgctctaaccttgtaacatgttctttgtgtggtaacacatggcatgttaggagtaggtgcaccatcaaaactgcacatggaaaatcatgtttctctcttgcatccggtggttcctgcagtggggccactgagttgaaataaaatagaggcaagaaaacctgaagtggaacagactagagagaaataatgaattgaatgtcactgtcgtaaagcactctgccccctggcaccccagctccccagctggggctgcccattgcacctggctggcatttagggagcaccatcgaccaagcatatgctgagacaggagtgccacactgcagccctgccccaaacatggggccttctggtttaatctcaaaaatgttatgctatctttctgtttcccgtgttcccatcctggaaacagagtatgttttcctgccccagattcttagagaataaacgcctacccatgggaggtaaattaggtcttcctagaactcccatcatggcatgggtccacaggccacctaacagtcacagagggctttatcatctgtaaggcccgttcatgcacatgaccttgggctgctcacagagaccaggtgggaaacaagccctcccaggtgtgcggtgacataaagccagagtgcagtcctaggagggccgcccccagtgagcattgtcccccagtaagcattgtcccctgcagttgtcgcgctcccccgtggaaggaatgcttcaggagggggcagccttggctttagccagaagtccttgcctgttcctttatgccatggttgtaattgctgatataagctgatgtttcactctgttgccatttttcttgctttttgttttttaatttttgcttttgggtgtgagtcccaccagttaagtcttaaatcatcatttaaaattcaaaacagaaaaaatgcacgaagtcagcttccaggataaggagaaggaacatctgacgcggttgcaggatgctgaagaaatgaaggtgtgtgtggctgccccttccatcaagcccagtgtgcatttgatgcatttggattggaaatgcttgttctaggaaaatctgtcaccttcagatccgtatatggcaagggacaggggaggggctgttgttgggcattcagagtcgatctcagagtatagcctggcttagaaatgaacaagtccagaaaccccaagatgtctgtagagaatggttaagttgcgttaatacctttgtcttcaccattcctgatgaagagggaaagggtagcacccccaatcactgcatgggctcttttgtcggagttaacttctaaggatttcttcctccaacctttacgcagaacacaccaaatttgagtttctatctcaaacatagagatttttcttttggtcacattttaaactgtaaaggaaaattgattgtggagtaagacttttaggtgaataaaatgagacaggagaagatgtaggattttgattagttgtaggcaaactatgagcctcattgagtcaaggtccacagttaaagacgtccacggcatgcccttgctccagccagcagaataaaatcatgcgtcgtgggagtccctttcctgttttcagagtgctgttgccaaaaggtctcctttggacatcatcataaatctgtgcagtgggcagggcaggggcttttatctcagttttacatgtgagggagtgcagctcacacaggttacaggcttatctggaggttacgtggatagggagaggttggtgccctctgactgacctggctggagaagctcaggctgggctgtaaaaggtcaagggaacactttttatttagttggtgggctaattggcttctagggccaacttggtttgataacagatcttgggttttgttatcccaataaagcaaggccgggtcctgggggcaaaacagccagaaatgcccccagttttgggatctgacatctgagggacacagggaaggaggtaggtccagatccagggcttgtcacagagtgggctgagtgccaacgagtagatgacatgtttctcttggcctgggatgcagaaggcgctggagcagcagatggagagccaccgggaagctcaccagaagcagctgtccagactccgagacgaaattgaggagaagcagaaaatcattgatgagattcgggagtgagtcggcccagggcaccaggggtgtgggggtggtcatgcctcggtcctcttggggaagcctggaaggatgtggctcttagtcgagggccctgctcaccttgccctgtgggcactgccctggtgacacagcaggctgggcgggctgcttccaaggtctgttctccgatctggagctgagcctcctggagccctggcatggcaggtggcaggcgggcccagctgcctctcctagtccccgagggccagggtcacataggtgattccgctggatggacgcatgccccagtagatgggggggagcatctgtaatgaaagcaccaaaaaaaaaaaaaaaaaagaaaagaaaagaaaagaaaaaaaaaaaatttggtcctgactacaggattctagtaggttaataaacactcgagagaagacagcaccaccgcctccccttctccccctacacatacacgctcactgggcaacccagccacctggttccatgtgctcacttcttagggccccacactgtcatgtgtctgtgcaggtagaggtgccagtgacctgtggcactgccaccaggatggcatcattgcagtttctctcaggtgacaccccctcatgttgtgctcctgccttgtcgcagcctctgacatgccctctgctccttcagaataatgttttcaaatgctctgcataaaagacctgggattacaaagaaaaccaattatattgaaatgctgacctccccacccccaccccacccagggtctacactgttccctcccctcccgctttctgtagatgaagaaacagatttctatatgggaagcaaggcgaaatgatttacttaaggtcacattgctaaataggaatcagattggagttagactttaattctccagactactgatccaagtcccttttcaatgtgtgtgagccgctcgaaaggtgcatttgcattttaaaagaggagaatggtaacccaagcaaaagtctaaatggtgtgacccaggctcggtgcccagttcctgaaggaaggcacttagcctcctccctctttttctcctcttcggccatcccctgctgttgccatgttgtgcttttccccttcagggatatctcacattcgttattctgattaatcaccctcacagattcgactggaagggagggggaggttggagggaaggaagagggagaaagagggttggttggtgagtgagttaggtggagggggaagcttccctggcttgtgcctttcaaatggactctgggttttccttctggtagtgcatagctgttcctttacaggcgcttaggcgtggctctaggaaaggttttatgagtcctgggctgatgtaaatgttgaccaaacaccctcaaccagatggcgagtttctgtttgcagcagagcccaggctgtcttttcttcataattctctctgtgcccactcctcgagggcaggaactgtccctgtatcagtgaggcattcggacttgggagatgtttttagaacatcagaccagaaatgagggaaggtggaaatggccaaatcaggttccccaagtgactgcatgccatccgaggggccgaggaagcagagttcttctgacatgggctctctgttttaaaatatcagcccttctcccatctcattatttttcccctgaagctcttgcacaagcaaactataaatacatcctcaaagccttatgtttcatgactcttagatgcaccccagaaattagttttcacttgggcacggaggaagctgtgaggctgttctgtgatccctccaaatcctgcagaattactgcctttattgtacagagctaatagggttggaacagaaccacggttttagcctgatgactcagaatttcagactgatgtggaatatattgctttttcctctcaatttcagtttgaatcagaaactgcaactggaacaggagaagcttagttctgattataacaagctgaaaatagaggaccaagagagagaaatgaagctggaaaagctcttgtgagtgcactctaaatatttcctctattttctctcatccccatgatattctggttagattgggctaatttaaaaacagacaatggctatttgtgtgcttgttggtgggttttgttgatttatctgtggatgcaaatagtatctgctgaaatctctgagtcccctgtggtggtctatggttcctttttgtttttcagattgctcaacgataaaagggaacaagccagagaagacctcaaagggctggaggagacagtggtatgtcaagatatttcccgatttatgtttgtctccaagaccggattcatttgtgatttgtcggattatttcaaaattttatccatgcacacctttctgtgtaatgttttagataagacattctatggaaaagtaggatttgtagaatttagtcctcaacttttcacagaatcagtcaaccaatccatctatccttagagcagtaacctggagcccctgagtgaggattaagctgaattgcaacttagcaattttacagccctgcactttgtgacatacttccactcaacattcaacagatatttattgagcatctcctaacggctggcattcttcaaggtgcttgaatatatccataaacaacagagataagatccctgtcctcatgaagcttacctttagctgtgggagacgataaacagtaaggaaacaaatcttgcactctatcagattgctatagaatgtgcataggttggtgcctgggggaggctccatgaggatgtgacctttgagcagggactcgaagaaggagaagaactgagcacagagatgtgttggggagagcattccaggcagaggcaacagctcatgccaaggccctgagataagcccgggactgtcctgttgggggccagcagggaggtttgtgtggctgcagctgagggaaggacagggatataaggtgagcacagagaggtaaaggcttcagtgattcaggccaggtaaaaccttgagacctgcagggctttgggtggaggagtgatgggcccaacctacctttggaagggcttgttatttgaaaccctggttggttttctctgtcgtgtgtctgggtttgttggcatcatctcctctggtcggcttccatttcagctgctctgtgggatagctgcctggctccgtgccccacagcctgcgctttaagacagaccattctaacatagcctctccatttggtgaaaacacgttcaggcatttcacatgattcaatgacagagagaaaccgttggttagatacagtcatccattttggctccgttcatgggtcatgtggatctgtgtgggactgatccatcttcaaggacctggtgaccccacattggtgggaactggttgcttgggtctggccctgagattgtgctctggcccatggactagtcatatttgttggacctcaaagccagggagaggaaatgagggcaccagccattggagacagaagatgcctgtgtccaaagggagctgggcctttggagcatggaggaggagcctgtggagggggctgctgccggggaacccgaaatgaagccatgaaattgcttcatctacatctgttttaccagagaagtgataatcctaattatagataattatagaaattcagaaaaatattgaacattaaaatttcactatatttctaccagccagagatcagtgatatcaatgaaatattttgggatgttttcttcctttatatccgtgagctctcaggcactctcaccctactgtccctagccatccacgctctctttcagtctcactcacacctacaactcaagcatgtgagcacatcatcacacactcacaccggggctcacaagtcccttgcccacacacgcagtcagctgctcactctcctgttctcatgcctctgcgcagccgcactcactcctgcatgctcctccatacacaagtacttacaacacacactcttgctcacacacagaacatgcacacttgcattcacacacacaacttgcatgcacactaatgatcgtccacactttctcactcgcacattcacacaatcactctcgtgcagttctcaccctcactccccttgcttgccttcactcacacccacacgcatgttcacactcccttgtacacttacacagatgctgtctcaggacactccccctcacacgcacgcaggcgcattcacacccgtcactcatacactcattcactgtcacaaccacctccgttcacaggcacactcatttccatgctcacggactcacatgctttctcctctcatacactcaggagtgtgatatttaaagaatgtttcatcagctcttttgccttttttgaagttcgagtggtcttttgcgtcttttgaatgacgtattttcctcactagctcctcccgtctccctgctcgtccgttctctctcccacgctgggcgcggttccatgcgcaccctcccaggctgctccccgctctcaccctcgcccagcccatgcacgcggacagacacactggcttcgtggcacccacattctctccctcactctcaccacccacacgcatcaaatgcacactttaaaaatccaagagtggagccctgcagtgtatgccgttttagactcggatgttttcactcagccttggaatcctccccgagccgtaaatgttcttcagaaatagacgcactgtccttggctgactgttctgccgccctcctcagcgcagggcccgttctgcctcctggagtgtttgggtgaggtgggcggagcatggagcctgctggccagggggtgaatgcccgggaagcccgctgcaggagacagtggtggaaaaggccaactggccgtcggggcatccctggccccgggcagctgactggctggaacaggacactgtctgggctttggggcgggagccctcctctgggtgcgttgatgagacttgtattccctccttgctggtcccacccttgctgtccactgtgacaggaagctgagccttgagctttggcatggagagtcacaacctgtgatgtgaagagggacatgtgtggggaggcagagggatgataatgaatgtgatggaggagaaagcattgccacaggaggctgaatgatagttgcctaagcacagtgtgcataaataaaagggacaagtgattttaaatgatttatactacccttcccaaactgtttattgttgaatctccctaaaaacaaacaaaatgagagaaagttgccaaactcaggactctatatttagtatttacaccccaggagatgcctgggccttggacaaagaactgttctcattcccctttggtgtggtggtgtttttatgaaaaatgtaaactgtgattacggttcaatcagtaatgaaaccactgacaagaaacagagagagtgcatgcagggtgggcgcaggtgttaaggagcagggtatctgggctgagctccctccggcagggcctgggacagtgtgtctgtaacagagtgagtgctgcacccctgcccctgggctggaaggcagcacagcctcaaacaggtcctgtgtgcacattattcataatcacagatccatttggtttcctgcagaaagtaatttacctcatccgaggacacaattgacttcaggtgcttcttatttcaacacagaattggacccagtaataagaccttaaattaacagagaacctttattgcaagaaacttagtgtttccgtagctttatagtctgtttcttccttttagatgtgagcgtgtgtgagttgcatcccttgaaattctgtgttaaagtaggtcaatttagacaaagtttgcatgcagaatttagctctctcctcttcctctataggaaaatattttgcaaggaactgatcatatttcctatggtaaatacatggagacttgagcagacagaaatgtttgatcttctgatcttgttaacaaagatcaccagatttggctcaggctcttgtctcagtaatctaattcctaaggtttcatttgtagaaaataatccaaaatgaagggaaaaaatgcccccaagatgacagtgaaagttttaacaacaacaataaaaggaagcaatacaatcctaatgaaaaaatggcttttatgttatgaaatatgcatcaataaattcatactagtcatctttattgggcacttaatatgtgccagaaaatgttctaagaacattataaggttcatctcatttgatcttgacagcaatgataaggcaaccactgtttttattctcatgttaccaataagaaaactgaggcacagaaaggttagataacttgcccagggccacccaggaggaaagtccatgaaatgcctcatccgtaagctcagtgacttaaaacaagcaagtgtgtggacttgcgtctgaagcaggtgtggagacaggaaaaatgtgagtcagttacggtgagatattgtggctaacttttcatttcagcttgttggtattacattgtaacatttacataataaaaaaaagaaaaaaggaattcaccctgatacaacatagcccagtaggaatttttgtgaggaaacctttgaatttttgtgggtgaggaaatgtgtggttccactgtgagcagatgggcaggctttgttctggtttacaatttgtggtctgggttctcaggctctgcacctcaaggtgctccagtaatgacactaggtccaggggtgggcatggtcagggtgggggtgtcacagggaagggggtgcaccagcggcgtccatggcaggcttgggaagtgtcgggggaatgatcatggtgccaaatgtgtcataaattcagtgaattgctgcacttaagtggcctttaaaaatctcttccagtctagagaattgcagacactgcacaaccttcggaaactctttgtccaggatctgaccacccgagttaaaaaagtgagttctctttgtctgaatgggactgagaagaaaatcaaagatggcagggaagaatcattttcagttgaaatatcacttgcttaagtcggggctggttatgcttaaaaattaattactgcacaccagagaatgttattaaaagaatgtgctggaggcaaaaaatacttggtaacattttcccatctgatttttccttcttggtaaaaggaagtcagaatactttctctggccttcatttcaaatgaacgcatatttttctggcccccactgtgtgagggcaactgctcttgacacagaaacatttagagcagtcatttcagaaagcattgcccagaagcctggagaagtcggacagagagagcctcttatttgtttgttaaaaggccattaggggctaggtcagagtttataaagcacgtcaacatccagtattttatttgcttttcccagcaaccatgtaagtggtgcttagtgttcctgtttctgcagatgtggagataggctcagatgttaaataacttacccaatattgcactggtgggaagagccagagataggtctggaacccaggcctgcggggtctctggatctgagcttcttccatcctcgtgctacagcagcagtctggagacactccataatggtgactcccccaaacagcttgcagaggtttaaggaaggagtctgtttaagaaaagtgggtgcatatgtgtgtaaatgtgtgtgcatatttgagtgtgtgtacgtgtgtgtgtgaatgtgtgtcagtgtgaaggagccaagggaaagaggtcaaatgtcttacaaagatagagtcgggtctgagagggagagggttaatagtgtagatggatgtattagataggcttgctaaggaggagggacacaaattcctagaagggaggagtggagaagtcaagttggaaggatcggcagggaaatacatgcgggtggaaagaagtcacatttgatgacttgggtcttcttggtttatgtgaaggctcagtccttggtggggaagtagggaagagaatgggaaacccaaggagactagacatggttcaggctgccaaggtaggggatgtgctatggaagagtagaaggattgctgagcagtggtgttggtgttgagttagaagcatgggcttggcgtggcccctgacagcatggtttaagtgagtttcgaatcctggaaatgaaaataaagaaggcagaaaatgatgggcaatttcaaggcctgcatggcaatggctaggcgattaggtagtaagcacagaccaaaacacaaatgaccatgggggcctggccctggcaggagagtgaagccagagcaaaggtgatggacagggaggctagagaggggagggcacctggccagaggttatgacatggactgaaaaggttcagtccgaggaaggaggtggaagccatgaccatacatgggaggctgtggtcctagggagggttaggagcttgagatcagacttccagatttcatgatagaaaactccctaggaaagccctgcttttagaccagtgtttttctgccggtggttctctggccatcagcctcagcatcacctaggaaactgtttagatatgcaaattctcataccccaccccaggtccactgaatcagagactagggatggggcgtggcaatctaagtctcaacaaaccctcccctggagagcccagtgctaaggctcaaatttggggagctcagttttagactgaagagctgcaggtttgagatgctcatgtagccattacctttgagaaaaaggatgatgatctcttctataatcagacagagcaaacctgcttttccaccttggaacactgggatgtgttaggacctgtactttccaatttatctgtgccactcggcttgccaggagtgcagtgttttgccaatttcaagatctgataaatttcaagaatttacccagcacccggatgctatgattaatttgagcctggttcattaattaattttatagatttggaagctgaagggacaagcagaggccattaagacttcccagtgggaccatagacacttgcttacaagtttggtgacttgttgtcccaccatgatggctgaaatcaaatttaggtcctgggtttatgtttttgcagttgttgtttcttaatgagttttggaatgctttcttttgaaaagaagtctctatttactacatgaaaggcagatgtatattttactgaagataaatcatctacaactttcaaaagcagatttgaaggagttttttttttttagctctctaaaaattagctcctcaaatcgcttttcatactaataagggaaattaattgggggatttcttgagtctaaacttttagaacctctattttcactttcagaataccctttggtgggaatggggattttttttttccatccacattatcctggggcggagggtgggtgggtgacagcctgtcctgctgaccccttggtgtcaatgcagagtgtggagttggacaacgatgatggagggggcagtgctgcccagaagcagaaaatttccttcttggagaataacctggagcagctcaccaaagttcacaagcaggtaggagagttctgcccgctcccctctgattccctcctctctcctggaaagaagccccaccaggtttggccacagtgtgcggagaaggcactgagattgaaggtaaaagaactgtacactatcagaggacatgagggctggaaaggtccttacaaatcctttagttctcagtgacttcccgtatatataaaggactttcttttatcaaagccaaatataacgcatagggtttgagctctctggggttggagagggaagtgttcagaggcctgtcttttcatcctgcctccacccctgactttggacaccatctagcctctgtgtctcccatgacacctctgaggtacctctgtggacctgaaagtggacaccactgagctggttcaagtcctttatttttacagatggggaaacagactggtgccttgcttcattgcaccgtgggaggaccgggactggaaccagcaccctctctgctcagctgcccattcctagcgatctcagatgctctctcggatgcctgcgatgtgctggcatttgtctagagtgacagagagtgataactgtgtccaaactcaccagtgatttcagcaggtcatttgtcttggatactttctttttaaatgttggtgtgtgcatggctgttttccctctttaggaattgggatgtgatggaaacggcccaagtttttagaccacatggccgaggagatgtcatttctctttgacttgttaagtcttcttcaatattactgatgatggcattttttccccagagagaggatgatagattctagatagttgaagtcactcaaacaaattgtcgatgagaaatacgaaagcagaaactgtcagggagcttgaaatagggctctgagatgcatttttaaaatttatttttatttatttttgttttttttaatgttttttttttttttttgaggcagagtcttgctctgtcgcccaggctggagtgcagtggtgcgatctctgctcagtgcaacctctgcctcctgggttcaagagattctcctgcctcagcctcccgagtagctgggattacaggtgcgcgccaccactcctggctaatttttttgtatttttagtagagacaaggtttcaccatgttggtcaggctggtcttgaaccactgacctcgtgatccgcccaccttgacctcccaaagtgctggaattacagacgtgagccactgcacccagctgaaatgcattatcttattcatggattgaacgagcatttattaaaaatgtactctctgccaggcactagagctggtgctaggagaacaaagcaggagacccagcagtagctcactttggtgtagcactttgtgattttcaaaactccctccatccatctgggtcccctattatgtagtacacttgtgttatagatgagaaacttgagacttgtggtggtcaaatgacttacaccaagtcagatggccaggacataaagagctggcccttgagcccactcctacctagggctgggctgttgcttcttcaatcagcaaaaaggcgcagtctcctcctcttaccttagcctctggatgtgttgcaaagctgggtccaaaccccatgccagtgtaaacagcaggttctgcatggaaggaagccctctgagagctcaggaacatgcttgtttttcactgagtcctttcaaaccgactttaagtgtttcagctttctcatgctaatttagtattctcatatgtggtcgattttctcacacaatccccctttcctctacacacacccaaacagaagaggaggtaaatcctgcctcagatggaaagtttcttgtggtgggaaataggttttaattgtatccccaccccaccgttccttgcaccctgtgaatcacgtgttcaggaacctggaccccacagtctgagttttcctttcctttctgtggttgtacggagtgccaaggacaacctagcaggggccacctgttcagcagcaggggctgcttctggctgctctggtttgtgcaatgctgcctgcctggtagtaactcccttcctttatcctcctgccccagctggtccgggacaacgcagacctgcgctgtgaactgcccaagctggagaagcggctgcgtgccacggcggagcgcgtcaaggctctggagagcgcgctgaaggaggccaaggagaacgccatgcgggaccgtaagcgctaccagcaggaggtggatcgtatcaaggaggccgtgcgggccaagaacatggccagaagggcccattcagcccagatcggtacgtgcgtgcacagtggcgcccggggtttgagaagctactgcggcctctcagctcagatttgctaaaaggtgaagacagcgctggcccactctggaacatctgaaaggctgggttggagcccgcaggacgcagccctcaccgcaccctgtgctcaccctgtgggaatgggaatgtcaggcgcccccgttatcctactctgagatattccagcatacatcgtggtctcaaaacttctgagctgggcagagagaagccagccaaggctgtaggcctaggtcttgggctataaatgggtacactcttagaaatactggaataggaggatatttctctgcaaggtgtgaagggccctgtgttctgcacccggtgggagcatgaaggagcccatatgtagccagagccccagggaaagcctccaagtgcaggtttggaaatacccctggaagagccaggctggcatccatgacagggtgtggctacaggctggcacagaacctggggaggtctggagtctcagcctcttcaagacctgtatggatttgggcattttgcccatgtaggaaatgagggtgtagccagagtcctggttcccaggatagccatagggacaaaaacaatttaggaatattctctaaacagcttcttctccttttttttttttttaaattgaaacatctccaataacatgtaatttatttcccatcagatattgctgtgtagatgtattgcaaaccagcagtttcacgtttctagttttaaatcataccttagaatagtggttcattgcatgtgtaggatttcataccctttgagaatctattaaaagctatggaccctctccccagaaaacagcatcacaggcagaattctgcatccaatttcaggggctacacagatatccttgaaagtcatggggaacctacgatccatttcagatgaaactgaaaatctttttttctaacttttcttggcccaaattagaaatgagctaattgatgtttaagttctttctgtcccctaaatatttggatgccttggatttgctaagtatactgatagttttcccattttcagagagatctggtggttgataagaattgtactgttggtaagaattgtgacttttagttgtcacaggtgacctgtagatatcagggttgctgttaagacttttctaaatgtctgttctctcttctttctgttggttggatacagccaagcccatccgccccggacactacccggcctcatctccaacggccgtccatgccattcgagggggaggaggcagctcttcaaattccactcactaccagaaataaatacaaagtgagtcccatgtcaagggtggtttctctatctggaggcagaggcttcttgcctttccaaagcccctgcctggcagtggaccttgagtagagaggagttctgctctactccagcacacaccctgggggttccaggtaaacagagacccagacctgtcctcacttagtccagagccctggggtcttctagctgaggctgtctggggcccatgggacctggagccaggcccggcctaatcccctccaggggtaggggtggtgagtgattcagccgagctttgttttgcctgtgggactcccctctttaattggcatcccaaagggcattacctgtttgtcaactgctttacccacagcagacagaagttgggggttgctttaagtctcaggaacagaatataaagaaagagccagataatagaaagtgatgtttttatgtttactatctgaactcaacaagtggggattttaagaagatatctagatgagtccaggatgcttttttctttgagatggtggtctgcaagcttctctacccacaacccatgtgcacgacatttctctcccagcaaaaagaaaaggaacgagtgatattctttccaaaagagaagaagcagagagcgaaaactgtcatcctgatggaaatggagaaaagaggttactagttgggcgggcagacagatgactaggtgaccagaaaactttgtttagataaactctgactttgaacatgcagatgggaagaggtggctctgaacattgtccttggactctaagcccttgctagggtagctggctcccaaggcaggcaagcatgcaaggtgtgaagcctggacccctcctcatccagtcctttctgcatcaaggcaagaaggtgagcaggaggggctggagccatcactcagggtcccggcatcgcccaggcataggctaaaacttccaagggaaatgctttggtagttgcccccacacaacttttacctgtgctgccccaggcagtgccaacgagcaggccaggggctggtcagagtagtgggaacaggagggaaggcggaggcagcccgcgggcgggcagtgtgcctgccatcatctgccatcttctagacaggaaaatgggaaatggtcttggcggtgggccaccccattcctatctaatctctgcttccaatcagaaatagaatgaaactggaagttagaaagttgcttttgactacatattgtcagtatcgaggctgatacctgaagggaactctaagatccagctgggcagcttagaacagaaaagcctgaagcagtggtcatcgaactttggtggatgtgagcatccttgagcacccagaggcccaggctccttagaagaggaagggcctgggctttgtttgtctttttaaccaagtactccaggtgattctgatattcatcgaagtttgaaaactctccatggtttatacaggatggcggtttacgtctgtcttatgtaagggaaatttgaaggtggtacatcagtagttaagaatctccacagtgaaaacagaaacctagcctcttaactaggttaagcacgtgcctgcctcctgaactcaaggccagctcaaggtcaccaaatgacttcagtttcagccatcatgcctacattccaactttagcaaccagagaggaagcagagaagaggcaaaagcagccgtcctgaatgaatctcctttaagtagccttcctgaagccccatgcaatgctgatgcctccctttccctggacagcactgagccacatggccacatctagctggaaaaggtagtcttttagctgggcacatcactaccccaaagaaaggtaatgcttttagagcaaggacagggagagtggatgttgaggtgggcagctggcatactgtgcattatggaccacctaatatgctgcagcactgggctagatgtaatataggcatcacctcatttgatgaaagcacacatagaggtgtatgtgtgtttcccagcaaggccttactaaatatactggtccagggattctggggtccagagattgtgcagtgggacagtcaccttcttcatgggttccaacaaaggtctgccagtcccatattttatgtaggctccaaacaaccaaatgctggccattcatcaccagtgtagcctcttctcatacagaagagtgaaaatcagtaggtctggggagactttcaagaccttcggagtgaaagaaccaccctcacccattgtggcatttttttttaattttactttaagttctgggatacatgtgctcaatgtccaggtttgtcacataagtatacatgtgccatgatggtttgctgcacccatcaacccatcatcatcttttcgagatggagtttcactcttgttgcccaggctggagtgcaatggcatgatcttggctcactgcatcctctgcctcctgggttcaaacgattctcctgcctcagcctcccgagtagctgggattacaggcatgtgccaccatgcccagctagtttttgtatttttagtagagacagggtttcaccatgttggccaggctggtcttgaactcctaacttcaagtgattccccccacctcagcttcccaaagtgctgggattacaagcgtgagctactgcacccagctggcaatttgtttctttactcaaagtgttacaagtggttttgatggttttatctgaattcagagcctccttgacataccttctccacacagcttcagacacagcttctgtaactaggtgcttctctcaccaggttacaaaataaacaggccccctcttacagctctcaggatggcagtgtggctgaggggactggcattggacaagggacctgggttcaggtgttaggtcttccacttccttcaagttacttaaactcaggtctgtttcctcatatatgaaatggggaaaatcttttatgttggtcattggcattgacagaaggcttaaatgaggtcatgcttctaagcccataacaattgctcaataaaaatgttagctgctagtatagatgagcactgcagaaggtggtagttgatacatgttggtttatagtgtcctttaattcatatagttgttactaaatggtttttagttcctctatagcaataaatcctggcgactggatagggaaggcctatttctaactgagtatcctagttgttgctatgaactgacataagggcttttaaagataatattggccgggcatggcgggtcatgcctgtaatcccagcactttgggaagctgaggtgggcagatcactttaggtcaggagttcaagaccagcctggccaacatggtgaaacatccttccctactaaaaatagaaaaattagctgggcgtagacatgcacacctgtaaccctagctacttgggaggttgaagtggagaattgcttgaacccaggaggcagaggttgcagtgagccgagattgtgccactgcactccagcctaggtgacaaagtgagagcctatctaaaaaacatatatatataatttacttatctacaagctatgactatttttaagaaatgactgggcatttgtcagtggagattaaaaaggggtagtaatcaacagattcaggaattgcaattgaaaagtaaagaaatgctaaatcctttttgaaaagtaattgaaaatatggaattcattgcttagatgagagcaaagcctttttgagacagtctttcctgacctttgggattttcattctgaagtatctcttccctgggtagaaatgatctcaattgtgtcttcccagccctcctgtggagtcaaagcacatattcttacagctggatatctttggaatttccttctgcttcatttcagggttcaagaattatagccataatgagtattttggtttattctcaaggtttcagagcctatgaagatgccaatatacaaaaatcaaaagaacccaggataatgctggctttgatcttatctggttcaaatccacagggggctgcctcaggaggagatgatctttttcaaaccccagagctacatatggggcagtgcagtgcaaccatgtgacattgggcaagttacttgatttctgtcagctttaggtttcctaccggctaagtgggatcaggcattgagagcctagctctgtacttggtttcacagtgaatcagacaagaaggctgtgttcttgtccagtgatatgcttgttaggggaagatggacagaaaataaggtaacttcaagtagtggtaagtgctcagaagaaaacaaaaacaggctaatggaataggaacactgttttagaagagggggtgacatttaagttgagaactgagtgatgaaaaatgccaggcacacagcaacctgggagaaagtggttcgatgatcactcaaaggtaggaatgaatgagggttatttgaggaatgttaccaaggctgataaggcagtagctcatggatctgggagaacccatcttcattagagtggatggggagggagttgagcccaagtaaatgaaggtgttgaagctgtgggcaacttagattgtagcctagtgtgaggggccactggggctgtgggcgtggaagcagtgggagctggttcatgattagacaaggccactctgggctggaccctgaagaaggggtaggaatggggtaagcactgggggttgcctagggcgtcactgtaggtggccatgggggagggtccggtaccagacccaggtggtggcagcaggggagaagtggcctgagtcagtgcctgcttagagctgattcagctgtcaggcttactgatgagggttgagagcaagaagaggaggaaggaagggaatcaaggtagttcctagatttttgtgggctctagcagttagggaaacattggtccctttttaaccatgccagggaaaatcgggggatgagcaggttttgtgggaaagcttggtttccatcatgttgcttatgtgctgcctctcagacatccagctgagcccaccacgcaagtgggtgtgtggaacaggtggctggatccgtgggtctggagcacaggagagaggctgaggtgaggccagggctggagagttgtgacttgtagattgtgtttatggccacaggtctgaaggaggcaacctagagaaaaggtgggcacagcagagaggggagctgaggggcgagttggaccaggcccaggcactggaaaatgggaaggccagagaaaagaggtggcaccagcagaggggcctgaggatcatgtgggggcacagaggtcaagtgaagaccttgaccctagaaggaaggtggtcagctcagagcttgagtaagatgatgacagagactgggtggttgaagaaggccaggtggcagtgaccttagcatggactagacagactaggtgaggaaatagagccggcagctgaacccactttgggggttttatttgaaggagatcagagaaatggagcgatgtggtggtaaggtggggctgcgttgcttttctgttgtaagatgggagatattacagcatagttgtgtgcgatggtgatggtatagctgagctgggcagaggaggaagcacagctgtgggtgggcggtagatggggtgcattgggaggcaagatccaggtcaccttagagcttgttttctcgtgcaggcaagaagccagatgatcagctgagagagagggaggaagcagggtctcgctcttgagaccagagacggtgtaaaatcaacctctcaggcagtgctgagtcttctttgcagccccacacttaatgtagacacctgattaaacatctgcccagctccctcgttttgagagccctggagatccacttcctttccaggcagtgctttggcaagccaggggacttgttcaaatgtctccaccagatggcgccagtagggcattgctgaaaccttagatgttttctgaaagacggaaggcagaatggtcttttttcttggttttcctatatttagaccattttatctcaaacttgagtagtaaatagagtattttgaaaggaatacaattctcacagatccccagagttgatttaaattattttattataatacaatttgcacattgtaaacagtatacattccctacttacagatcttatacaactgtcaagtcaaaacaaatttagaaattaaatcgaaataaaaccacaaataaaaagtccaaaccaccaaacttcacataatttaatgaaagaagggctttttctgaaaataaagagctaggtgcaatgcgaccccggagtgcgttgcttcttgtagagtttgggatgcctgttttttgtgtgtcgtggtgtgactcaattctttcactcctgtactcccagcactctgagaggctgaggcagcaggatggcttgagctcaggagtttgagacaagcctggacaacttagcaagaccttgtctttactaaaaataaaaaaattagccaggtgtggtagtgcatgcctgtagctccagtgacttggaagggtgagctgggaggatcatttcagctggagagtttgaggctgcagtgagctgtgatcatgccaccacactctagcctgggtgacagagtgagattctacctcaaaaataaataaacaaataaaaacaaatacatgaagattagcctagtgcctggcactgaacaagcactccgtgctcatctgtgttgtcctcatcacctgatcctgtctcctcattctacatcccaaagaggcgggatgagctgtcaagatcccataactatgagtggtagatcctgggctaagagcgatgatcttctctgcaacagttctcaaagttcttggccttaggaccttttctcctcttaaaaaggatcaatagactgggtatggtggctcacgcctataatcccagcactttgggaggccaaggcaggaggatcacttgaggccaggcgtttgaaaccagccttagcgagactctgtctcaataataataataataaaataaaataaattaaaaattagctaggtatggcagcttacgcctgtagtcccaaccacttgggaggctgaggtgggaaattgagcccagtaatttgaggctgtggtgagccatgtttgtgtcactgcactctagtctgggtgacagaatgacaatctttctcaaaaaaacaaacaaaaaaggatcaatgagtttatatatatatatatgggttatatttattgatatgtatcatattagaaattaaagcaaaatatttagaatactgccgggttcatttaaaaaatagtaataagcccatacatgttaccacaaatgtgatttgtaatgaaaataactattttcaaaacaaaaaatagccaaatggcattgttttacatttttgcaaatctctttgatgcctggttatttaatagatggcagctggattcccccagctgtttctgcattctgtctgttgcggtgtgctgttttggttgaagtatataaagataatccccctttgtcacaccagacaagattcttggccattggacagctaagaaaactgtggaatggggaagttgggatcatagtgcccgtatcacaggcttgtctgggattgaatgagagaatgtgaaagaagagagaaaaaagtcttagaagaatacctggcaaaaattaggcccccgtgcatgttagctaatgttaaagtggtcatggggacagacctgaaaagacagctgaggtgggactgcagggagagaggacagaaataactgtaggtaggtgctgctatggcagaggactttgaaactggcaatctcaacccaaagaagggaattgtggagcacccggaggcaagaattcctgattccatctacagcacagtaggctcctccactttaatactcctcagcttcatggttctcagagtcataaattcagagcaactaaaattgttcctccacagcagattgtaccaaagctccaatgagataaatccacttctattcagcagtgataagtagagtacaattggtaattcttataatgtggggattgaattataaaaaggcaaaagaaaaactaaaactatgtactgtttggattaagcttaaatccactgcaagcaattgcaaaagcccaagttgggtgtgaaaacggtctctaaatacttcttgcaaaacccttgtataattaacttccttcattagctttccccaccccttctaaagaaaggtgattttatttcctcctaaatctggtcacacgttgccactttgaattaccatctccagtttggcagagtgccaggggaagtcctagagcaggtcagttggtccagtcccctgcctctaagtgagtgagtggctacttggaagagagtcaacaggactgggttttaaagattctccagactcctcagtctctctgggattagaacagacagaaatgctttatctcagggcaaaaccatttacctttaaaatttatatctattttctcccatgaatttatctaaggatatgaagatccagatagtgggaaggatggatgagagcatcctgctggaatccatgtttcttgggcctgctggaaagacttctcagcagacaggcctgtagagatccttaactggggatgaagaggaacgctgcatcctagtaaagaaaggacccttcattggcagagttcctgtgcttttcctctcctttctcactctccttgaggtgactaaactaagcaggtggggcctcctttgtggccccgtgtttcttccaaactatgagccaaaacctgctgaatcttgcccagcggggatcgggggctttgactgagaggccttccagggggaaattgtgtcactttatggtctgctggagttattgaggccgccccattgcatttgtgtctagtgcttgctgggtcaacacggtttggctgcaaacattgcgtcaggccataatcccacaatccaaggtatgtgctggcacctctctgcctccaggcacgcagaacggccatctcatccgaccaaggggatcttatctgaccagggggatagcgtgcgtggagaaatgaacctgtgagaaagtgaaatggcagtttcagtggtggcattcaggcaggcactcctattggttttcagctcagaatgcattttaaataacaactatgaccatgcttttaggtttttcacttctaattctggcaataagcccaaaatttcaccagaaaggccatgttcttcccaaagacatcttactctctgtgacttctaaaaatgacagaaatatcaccctctagggttgtttaagcccttcttagttgtgtagctttgccactgtgggtgattataccaaatgagttctgtgaatattttttcttgtcagtgaagaggtggttttgtttttgtttttgtttttttgagactgagtctcactctgtcacccaggctggagtgcagcagcatgatctcggctcactgcaacctctgcttcccaggttcaagcgattctcctgtttcagcctcccaagtagctgggactacacatacaagccaccatgccgggctaatttttgtatttttagtagagatggggtttcaccatgttggctgggctggtttcaaactcctgacctcgagtgatccacccgcgttggcctcccaaaccaaagtgctgggattataggcatcagccactgcacttggccaagaggtggtatttttaaaaagaatgtgttgttctgtttttttttttctattcagtttctgttccgtatttcttctccctttttcacccactttgcttgtatctgctttaataacccctttctagactgagaatttttctatttatatgtaacttacatcctgctgatttatgcaaaatatgtgaggttgcttacaatattataacatataaatcagaagagtgaagaaaaaaaagagcatggtagcgggaatctgagatattaccacagttgagcaccaaatgttgatataagccttctagaggcaaaacagaaagcataatgcataatgtgtcaggttacagagggctttttttttttttttttttaatcaaaagagaagttgggcttttcttagtggctgttgtatttccagtaccaggtaattccatgtatttcttaaggataaggctctacctccctcttgtcatccctgtccccatcccctagagtaccatgagctctgcacaaaacctatagtaagatctcagagctagggcctccagccggtgacaggaaacagagcctttcagtgtcttctgaaagttgagcttactgatgttgggtgcaggctgacagaggccattcaggctggtctagacgttcatcctggagatgcgcccagcaccagccgaacttctggtgggaagtggaatgaaatggacaggggtggtcttttggagaatcttattatccgatggagacgaagcatacctttgggaactgggaacctctttctacagagagtctgggttaggggccttgttgcacctgcttgctatcctaagtgcaggcaaatgagaaatgttttaatttccccctaggaatgagaaaatgcattatgttactctgaatatccatagcctcaacagataccgacttatggaagagaatgttgagactgtcaggactaaatacttaaagcaaaatcaggaaatcggaggttgtgctgttcatgtgccactatccacatgtgtcttttgagctctcaaaatgtggctaagtccaaattgagatgggctgaaagtgtaaaatatacaccagattgcaaacactattgtgtgaaaaaaaaaatctcagtagtaatattgtaatgtaaacgatctcaacatgtaataccagttacatgttgaaatactatttaggctatataaaatatattacaattaatcttacctatttcttttcactttttaatgtagccactagagaatttaaaattaaatatgtggcttggccgggcacggtggcttatacctgtaatcccagcactttgggaggccgaggtgggtggatcacctgaggtcaggaatttgagaccagcctggacaacatggtgaaacaccgtctctactaaaaatacaaaaattagccgggtgtggtggcaaacccttgtaatcccagctacttgggaggctaaggcagaagaatcacttgaacccgagaggcagaggttgcagtgagtcgatatcgcgccactgcaccccagcctgggtgacaagagtgaaactccatctcaaaaacaaacaaacaaaaaatatgtggcttgtgttatatttgtatctgacagctctggtctaaacatctagaattaaacaaaacttttttgaggagtaaatttctactgtgttttctaattcctatgttctctctttggttctctttcaacagatatgactccacgtagcatgtcaaggactacattaatcaccaattcctttatttttccccccctacagtttccattttttttttatacttgcttactccagccatctgcagtacaccagtttcaggtcttttgagctgtgtagagtttctgtgtgtacagatgtgtgctcggacttttctctttttgagaaatctgaaggagatggttgcagaagatccacttactactgagaaccattaccaccgactcggcctccggggtgttgggtggtttctgggtggttcctggagcctcctctgggcagtgcactgtcccatctgtacgccctaatgtgccattccctagaggggaacaaccaagtgccgtggaggcagatgatcatggtctgcctcaactgtctggtttcctgtaaaataaacacattgttttatatttttagggaacaaaaagtgctgctatagggttcaaagttttccttctgaacacttttccgaaacaaattaccccaaagacacattttgaatatcctggtcacatctttggatctgtaaaatataccttttagtatggcacctgttaaaatgcaaagcaaatttctttggggcagaaaaacaatctgacagtagcagtgtagaatttgttcattcaaatacatctgtgtaaatgcaaaaagtcataaaattcacctccgagctgcttgcttttgaacctgcagcaactagtcttagccggcccggtttgaacatcgttctttcagaagtgctgaaaatgctgcaaagttggataagtggaaatgtggctgcccctctcctcactacttcctctctgatcgttctgaagcttgcattgggaatggctgctttctctaaccattttcagcttgagtgggtattgctgaagaaatccaacatcattccagcagttgaaaaaggaagccttcgggagaaagtgcttgtcaaaattttgttctttgtgcttgtgtatgagtaagttgccatgaataagttattattttaacccataattggcgactgtttatatgaattctttctttggcaccaaataggtttcatcttcttaggcacaattagaaaaaatccacatagatggatattttacatttagttattgctttatccaaatacatgaatctaaagctgaatcaacccttacttccagttgtgcttattaagaagatcaatttccaagtagtaaagttttcagggaaactgactgtgctgctatttgttttgacaaatttgggggtaagtcaatgacaaccaaaccaatctcggtggaaactcctatcctatcatgttgtgtgcccaagatgagtgagctggcactgtgccctgaagctttcaccactgtaatgaaatatatgccaggggagactttgggcttttctcatgactgtgtgggtcgaaggtagctcaagtgtgtgtgtgtgtgtgtgtgtgtgtgtgtgtgtgtgtgtgtatgtgtgtaaagtgctaagaactgtgcattgacatccaaacatttcttgtacaaaatttccctagcaaagcaaacctgctttgacttaatttatttgttaaatgttgcactttgtttatgtatgttttgtttttggtggggaataaggagagagaggacgacaaattctattgaagtatttattttgtgaagatggcaattttgcatttgtttaaatttttttcattctttaattttgttatcagtgccagcccaatatacctgctctaccattatttgcggtctgataaaagggtccttgtggggcaggttttgcaaagcttatcaggtaataacatatgccacataaccttgttgatatgtttgcttctgatttgggaagctaaacattggtgtttgagaggattgccaattattaattgtcattaccactactctccattactttttgtttggaaattgaacaaaggtcagtaatggtttttggctcttgttaatatccatcataaaatagattgttttagattctttccagggtgatttttccctgggtaccccgtttctacttctaaagaattgcttggcactttcatgtttcaaagggaaacattcgcttgtagttccattttacttgatctctacaagggactgacaacatttgctttacttttattcacagagaaagttggctttgatgtctcttaaagataattctgctagttgctgatcagccagtcagttcacctagcttcaatctttataggacttctaatctaattttcctatagtgtgactaaaagggaggcaaattattggaacggattattcaaatggatccttaaatattgctatgtataataagccagttattatatcaggaccatgttctctgtaggccactttctaaaaaagccacatatgtgcaattttcaggtttttagactattgctccctgtactttaaatgtaaaaaccacacttctgaacaactaagctcatgaatatgattttggttatatgcagcttttgactagcatgtattgtgtctttttctcctctatgaataattttatatttcatgctacttcttgaaagtttactctttgatgctctaagagaacagccagatggtttatatgaataatctttatctgcaggatggtggattggtaaattaggagaatgttgtttgagatatcaagatttatgtctgggaactaaaatatataatgccaaatgtgtttttgtcaattactagagaattctgtgcaaacatatcatctcttcaaatgctgcacactttgcttttgttaaacagcaggtagtagacagaacaataacagtttcgcgttaagacttttaaaggaaatagaatcgtgattaagaaatcagaatttatagatatattgggataaatgaagaaataaaaatgtttgtctagaatgtagcatctagtgactttttaaagccctaacgtttacataaagaagctctagttcttatagaaataacaaagcaaataaaagttcttaacaatcccctctttcgaagtgcatttttttaaagcagggcaggagacatttggactctagctatatgacatactgggaaaggcagagggtggagggaagatttcacttcattgtctagcccagaatcttgagcaagctaaagaaaccatcataatctaaaattgcttcatttaacactaacaatttagactttttaaaccaagcattgaataatggctggataactgccgaagtaagcgccgctccatgaagtctgcttacttatttaaaaattgtgtatcagttttaaatactgttcattgtgtgcagatataaggggaatagggcattctgtagaattatacatgtctagtttgtaaagtgtgtcctgtgtactgcagatgtgtgttctctgggctttatgtatctgtacagtagctttcacattaaaaaaattgtggacaaacttgtccggggggtttgaggggagaatggtggtttatatcaataacgatgctgtactatagtccatgtaacaaaagatctggaagtcaccctcctctggcccacggaaaattttggtaatcttctaggttctaaaatgaagatgtatgggtactctggcagactgcatgttgtataatttgaaaaatactaaaagtggaaaataaaattgaattaaactttggctggtctgtttctccttatttgagccaccctgaaggtatggtcattggagatgtcagtgcctgtgtgaggatgagccattttctggcctcaaaagagttcacttcaagtgagcaggtgccccaatacacagcataagcaaagtcaaccttgaccatttttgcttttactttgcttaaatatctgctctaatttttttttcatttcagaactaagaaaacttgacatttgtcacttcaattctgaaaagatagcagctgttgtaaaaaaaaaagtgtcttattagcttttttaaaaagtaggattgactgaaagctcaatagagcagtgtattcactgaatatctgaatttcttcttgcctgagaacggcattaattctccaccaaatgaattggagccctgtttgcatatgttgaaagattatcagcatcttttgaggattggggtgtttatattcctgtttaacctactgattcatagcgttaatgtacaggtctgagatctcgtgagaggacaccggagcatgaatcctttgggggctaaccagtgccaggacacaggataatttttttttctgctctcataacaaggagacttccctaccttaggacactagaatcgtgtgaccatgcatgacattgtgtatgtaaagcatcctcattcttgtgcttggtttgattaatggtgcatgagagccagacagtaaacctctttcccttaattgattaaaaatgtaaaggatagatgtcaagtgaatgtgtaattaagggcactgcaaatggtgtgcttttatgctgtcttatccatctttttcgaaattgttattctcccaagaactctgaagaagtttccagatatcagattgttaaaagtgacttatgtagtaaacttcaaacgtggtggttgaatattcagctgatgcctgtgtgttttagatgggaaagcagttgtctgaaagaaccagattacaaagcaaatttcaatatcaatgggaaatgacccccacagatcccagaacacagcagctctgcgatgcagtcagactgcgttgatgccagtgttctcttggttcctgcaagactttcttgaggtttcttgtttccgcaagctctgaactgggctctggctttgcctcagaagcacagagctggagcatctgtgggagaaagtggaaatggagcaataatctgcaaaggcaattactggtgatgtgtgtattggcaggtttcattctagcatttgtgacaggtcgtgtcttgttatttgtcttgtgtacataatacactgaacagaggtaggagtcacctcttggatgacacattagttgaaaatgtgggctaacttgacaaaaggcatcctgagccatggaattttcactttccttttggcgtttggtggttcttcgtccaatttgcaaagaaaacacaaatctctctgtggggttagttgggttcaaaataatttttaaaaatcccataccaaccactgttggtggtctttctgcctccattaccctggatggcaaaggctgggattctccatctgctttgcttcaacagcagtttgttctggacttccaggaggccctctttgccgtcgagcaccttttaacccttcacccttccccatgcccagatcacaaatgattctcatagtatagctgttcaagatttatctacaacaatattttattccttcagaatgtaattagagaaattgacaaacttgttctggatgaaacgaaacagcatcagaatctcgtaatgctcagaaagctgcaataagcagtcagctatttccagggcactattctggctgtgtgccagacactgttttaaatgctttacatgtattaatccatctaatcttcctaataaccccgtgaggaatgcaccattatctctcctttacaggtaaggaaacaggcgcagagaggttaagtagcttgcccaaggtctcacagccggcaagaggaggcgccaggattgaaacccacacagtctggttctaaggttcatgctctcaacaggtagtaatactgcctctctgaatagtgattgggatatacatatatatgtgtgtgtgtacctctctcactcactctctctctatagtggtaagcagcagccaacctcaaaaacccttttgtaaagaatttatacaaagctttatgcctttgcaacttctctgtgctctcctttcattggaatctgagacctcgttgttatttgaattactttaagcaatcaaatgcatctaggaaagaaataatagtgaaggaggatgcctcacagcaaaggtgcctgatgacactgaactctacaggaaggctgcgtttcagtagtgcccttgtcagaatctttttaatacatagcatacttagaagtgtagccattactctgtcagttttcaaattatgtgtcataagaatttaacttatcctccatgtggatttttttttctttaagatgctaattctctctgtctgcattaaaacatgtataacctatattcttctgcttcttcagtaaaaagctctcagtactctcttgccccacctgaaatggctctcagggaagggctgaggggcactggatgagtttcctctcattctgagggatgggtgaggcctcagacgaggctgtcccctacctcacctctggccccatcatgattaatgggatctcgttttagagctttaggttttagaaaaaagaaacatgccagtcataccacacatgcatgtgcaagtccaaccacagaaggctgaaaacagtggggttcccttacgagctcctccctttacctgtgcctctcctgtctgagggtgttctgatgggctaccggggagcaaggctggtggcagatgtgtctaggtgacacgatgctgactccatcagccagcgtccacctggctgcctgcctgcagaccgcaacctccagcccagtgtccttgctgccctgcagcacctttctgggacctacatgcaacagcaaaatacctctggagtactggctggcaggcagtggtactactgagtaattccacatggaaagaatgatgcatgcgggacctggatccgactctcaacttcccatccaccggctggctgggggattgtgttccagtggtttaactatgcagagtctcagtgagctcatctccatacctgaatttagcccacgatgctccattcttcacagtgcctttcagggatcagataagaaactgtaggaagacattttataacagtgctactcaaatataagggattgttattgtcaaaaacttcctaggagaatgtatgttcatcttgaaccccagctattgccttctacctagcatcaccaatactcagagtagaagaggaaagaatatgcggagacattgggaattgtctgattctacccagtgacatcaaatctctttgtagctgtccatgtagggttctttcttttcccactctcttggtcagttggggctgctataacaaagtgccatagactgggaggcttataaacaacacacatctagttttcacagttttggaggctggaagtccaagttcagggtgccagccagcgtggtcaaattctggtgaagacttcttcctggttgtggactcctgacttcttgctgtgtccacacatggtggaagggagggggaagctctctggggtcccttttataagggcactggacttattcatgactaatgactaataaactcatcgtgatgacctaatcaccccaaaaagctctacctgctaatatcatcacattggattaggattccagcatattaattttggggagacacaaacatccatttcattgtacccacttctccaccctctttcctcttgggggaaaacccactcttaggctatttcatgagtaagagaatgtgacataccctctgaagtatggtgcagggaatagggtttcaggctagtttccacactctatgcgttgtggcttttcacaccagagggctcaggtaagtgcccttcactcagtgtcctggtgctggatcatgaatcaagtccattcagtttcccatacgtggaggcagaagcccggtaatcaaggttaatgctgagagacgaaatcctggcagaatatttgtaggagcttaacaagttccccaaagggagattagagatgctcaaggagtcacttagccgaaccagcacacaaaagcacattcggcttctgccagcatctggaaacaaggtgtctgcttcccttccataacccaggtattggaaagttcgtgtcccagcacacacagcagaggcaggaacccactgttcagtgcaagctgactctgtccacatgtgggcctgctgctcctaaataccagatgactatgatcagggcctctgctttaacaagttttgtctccagactgtcataaacccatgagaacatcaaaatccaaagagttgaagtcacatgttcaagactactttgttcgttttgactgcagagctcaggttccgtctcttacagtcctctgcttgtccatctcagtggtacggattggaagctgctgtagaaccccgctcccaatcttccctgtgagttgttgtcaacaaatagtgctttgcaaatagctttccctttcatatattgaacaaataaattggagagttcttaaagaaataaagagtacatcaccaggacttagaagagaagactatgagggacattgggaatcatctagttccacccagtgaagtcaaatgactcaccttgcaccatgcacaccatcaggagagagcccaagcccggcgcgccacccgcttcctcagggctcactctgctgcatcaaccctcagcaggcaaagaccaaagctagtcacaagaatggcactggcaatgcaccttcctgactccattagcccaaatattgacattagttgtgtggaaatgttttgccacagtcatctgttgagtgagtactgtgtggcaggagccctgtgatcaagagtgaacttcagcagtgtagactggagttccagtggttccaactctttccttatccactaagtgcctcaaacaagtaacctaacctctcttagtgtcgtgcctggctcacagtgcattctggaatagctagtccttcacatgcattctggaatctcttacaaggaatgagtgagggtggcactgttattcaccccaaatacagatgaaaaaactgaggtgtggagatgttaaatgagttgcccaacatcacaaagcaaggtagtggtggagctggctccagagtccacattcttaaccaagaggctgagctctcctggggtcacatggctgctgaggagtgcagagggactgggttcacatcctgcctcacttcctgagctgagtttcctcccagatctaagctgcttcgtatggaagcagctgaaattttcatgtgatgaactgaaaaagccttctgtaaaaacgttagtgttcattcattatttcaataaatatttgagcacctatcttataccaaagattgttttcagagctggagagagatgtgaataagacaagacagagtcttcatttccttagaggcaaattataaacaaatgaacaacactttctaaaatgacttcgtatattcaagtgctgtgaaaagaataaaccagggtgctgtgatggcaagtaactccagtctagttttgactgggtggtcagggaaggccttagtgagtgagggagccagccatgcagagactgggagacagttgcaaacagatgaacagcaactgcaaagttcctcaggaaggattgtgcttggtgtgttagtggtaatagaactctgattttacacagataacattctccacactggcatttctttccctcatttacctatcaaaaggacaatgagggccaggtgcggtggctcacgcctataatgacagcactttgggaggccaaggtggtaggatcacttgaagtcaggagttcgagaccagcctggccaacatggtgaaacttcgtctctactgaaaatacaaaaaaaaattagttggatgtggtggcacatgcctgtaatcccagctacttgggagattgaggcaggagaatcgcttgaaccctggaggcggagtttgcagtgagctgagatcgcgctgtagcattccagcctgggcaccagagtgagactctttctcaaaaaaaaaaaaaaaaaaaaaaagacaatgagtatgtttgtgttgctttcagaagtaagaagcaaattggaataatcaacttcttctttcctggaaatacaatgccaaaggcatttgcgcatttttgtggccagcaatgttgtgagcagacccacacatctgtagcccgcgcttcagtgcctgctctgaaacccaggtaaaagaggacaatttcatcctggctgatgtgttttaaacagccaagcaaattcacgtggatccacaggccccaagagtataaaaaataatagaggggtaaatatggaaaagctgatttgctgcccaaactcagggtcaagcacaggtctgagcaggccacctgtatctttttagagttgtcttctcagtgaaatggagctgctgctacctgccaccttggaaaaactgcttgctggcctcgtacgtgaggggtatgcccaactcactttggggaggttatttcaactttttactacatcaggactctgcgaccggtgaacatcaaaaacccaaagaaacacgcacatccttgcctgcccttggtaagcctggagagaatttcactggtcaataacagatgattctgaattttgcctgattattctggagctgacatttttgggtgtcacatttaacatggacatttttgaagcataactttgataaccactcttgctgaggcagctgcctgccctgttcttgcttcagattcagttcctgctgagatctgcgtggaaagaagtatttcccactatggggctcacacaactaaatggcaccactgaaattccctgtcaagtcccctggttagtgtctaattagtgtgtggctttaggaagtgggacaacacatttacatttttgcaggctgttacctgaacgtgatcgctgaatagcgtcagctgttcaaatagtaatgctgcatacaatgagaaatgtgagagggtgtgtgtgtgtatgtgtgtgtgtgtgtgtgtaggaggacacacccccgcccgctggctggagtgaggtatctgcaatcctgtgtcaacaggggtctaggcttccttaagatttaagcagctaacacagaggtggctgcactgtttttttttttttgtgggggtcgggtcgggggtgggaatggagtctcgctctgttgcccaggctggagtgcagtggtgcgatctcaactcactgcaacctctgcctcccgggttcaagcgcttctcctccctcagtctcctgagtagctgggattatgggcacccgccaccatgccctgctaatttttgtatttttagtagagaagggtttttgccatgttgcctaggctggtctcaaacccctgacctcaagtgatctgcccatcttggcctcccaaagtgctggggttacaggtgtgagccactgtgcctggccagctgcacttcttactctcctcctaagagaagcccgattttgttttcagagtgctccttgtgtgaactggggttgtgggaaggagtgacatttcccttcctttgttcagacggggtgaagacttaacttacaggtaagggaggcccttgactgacgtggggtgggaactgtttcgagctgtccttatctctgggcctgtttcctgacctgtgagatgggcctgtttcctgacccgtgaaatgagaaggttgggtgggatcagtttcccaggcttgcctgtggtgagtagcccccggagtgctcattcaaaagccactctgctctcccgaatgagaatgtttaggagtgaactctgtcatgagcaggcatccaagtgatcctccccttcaaggatgtttgggaatggtggtctgcgcagtctctaacagatcttccaactccaaaactcctgtcccggctatgtctggaaggcagtgactcctaactattcctgagacccaaatggctttgcaagtcttacaacagctgtggatgttctgtttagtaaaaacgtatacagacacagaacttcaaattcagttgcagggtctgtggcttttgattaagaattcctactttaaggttaacccttgaaagagaatgtaagcattcacttgagccaggcatgaagcagctgctcactaaaggtcagttattatgctatttctgtgtctcagcttttctatgaaattctcatattattgtctcattgtataggtgaggacactgaggcatagagagattaacatgcattgtaagttgtggctgaatttgaactcaaacagtctgattccagagccagtgtgaacttaaaatctgggctgcctgataaagtggttatcagttttgcctacttgaattcatggcactttctgctcctaatatttctggccacttccctatacctccttatattagtcataattaactaagcagctactatggtatgaggccaccacttctcctgttgtccttcccagtttctccccaacctccccttttccctagtttataagacaggagaaaagggagaaagcaaaaagttggaaagaaacagaagtaagataaatagctagacgaccttggcgccaccacctggccctggtggttaaaataataataatattaacccctgaccaaaactactggtgttatctgtaaattccagatgttgtatgagaaagcactgtaaaactttttgttctgttagctgatgtatgtagcccccagttacgttcctcacgcttacttgatctattatgactttttcatgtagaccccttagagttgtaagcccttaaaagggccaggaatttctttttcggggagctcggctcttaagacacgagtctgccgatgctcctggccaaataaaaaaaactcttccttctttaatctggtgtctgaggagttttctctgcgactcgtcctgctacactactatgtgccaggaatgctacacacattgtctcattgaaaaatgtcctcagaaaatgatatacagtattttttattttattttattttttttgagatgaagtttcactgttgtggtccaggctggagtgcaatggcaggatctcggctcactgcaacctctgcctcctgggttcaagcaattctcctgcctcagcctcccaagtaactgggattacaggtgcccgtcaccacgcccggctagatatacattattaatacacatgttgagtcctaagtaaagacaggaaaaattaggaaggtaaatatatcctaaggctcagaagttttttggattgttgcttctttggataatttatatttcattatattatcagagaactagagatagagcagaaactgaagattttctagttcaaatatcattctcctagagaccagtagagaatagcaataaatagttatttgtaaagattaattaattcattctagagtcttatgaagtctatcagtggttttgtccctatttccagcattttaatgttgatcagaagtgggctggctctctttgcactgctaggcagagctactgttcactgagcaggtgctttgtgctggcgctgtgctcaagcactttacgtggattatttaacttagccacacaacagtatcagaacttcttatttcagataccccttttaagcaaaaaacttcaaacagaggtcttgtctgatttcatggctgcacattttccaagtaggaaaaacacacaattgaggaacatgcccaaggctgctcagcaagcacaggagagagagtggggtggggagggagagatcacgtgcaagcaagcaagcactggggcagaacctgtaccctcctgatgattctcaggcctgtctgggtggcatcacttagca

SEQ ID NO: 711 - DNA, 6433 bp, Homo sapiens
caagggaagccatatgtcttcgacagagtgctacctcccaacacgacccaagagcaggtttacaatgcatgtgcgaagcaaattgtcaaagatgtccttgaaggttataacgggacgatttttgcgtatgggcagacttcatcaggaaaaacccacaccatggaggggaagctgcatgacccccagctcatggggatcatcccacgaattgcccatgatatctttgaccatatctactccatggatgagaacctggagtttcacataaaggtttcctattttgagatctacttggacaaaataagggacttacttgatgtatccaagaccaacttggctgttcatgaagataaaaacagagtcccgtatgtaaaggggtgcactgagcggtttgtgtcgagccctgaggaagtcatggatgtaatagatgaaggcaaagcaaaccgacacgtggctgtgacaaacatgaatgaacacagctctagaagtcacagtatcttcctgataaatattaaacaagagaatgtagagactgaaaaaaaactcagtgggaaactttatttggttgatttggctgggagcgaaaaggtcagcaaaactggtgccgagggagctgttcttgacgaagctaaaaatatcaataagtctttgtctgctcttggaaatgtgatctctgctttggcagaagggacaaaaacacatgtgccataccgggacagcaagatgactcggattcttcaggactctttgggtgggaactgcagaaccaccatcgtcatttgctgttctccttctgtcttcaatgaggctgagaccaagtccacactgatgttcggacagagagctaagaccatcaagaatacagtctctgtgaacctagaactgacagcagaagaatggaagaagaaatatgaaaaagagaaagagaaaaacaagactttgaagaatgttatccagcatctggagatggagctaaacaggtggaggaatggagaagctgtgcctgaggatgaacagatcagtgccaaggaccagaagaacctggagccttgtgataacacccccatcatagacaatattgctcctgttgttgctggcatctctacagaggagaaagagaagtacgatgaggagatctccagtctctacagacaactggatgacaaggatgatgaaattaaccagcagagccagctggctgaaaagctgaagcaacagatgttggatcaggatgagcttttagcttccacaagaagagactatgagaagatacaggaggagctgacacgtctccagattgaaaatgaggcagccaaggatgaggtgaaagaagttctccaggccctggaggagctggctgtcaattatgaccagaaatcacaggaagtggaggataagacccgggccaatgagcagctgacagacgagctggcccagaaaacgactacattgacaaccacacagagagagctgagccagctacaagagcttagcaaccaccagaagaaaagggcaactgagatcctgaatttgctgttgaaagatctgggggagataggtggaattattggcaccaatgatgtgaaaactttggcagatgtgaatggagtcattgaggaggagtttaccatggcccgcctgtacatcagcaagatgaagtcagaggtcaagtccctggtgaaccgcagcaaacagctcgagagcgcccagatggactccaacaggaagatgaatgccagcgagcgggagctggcagcctgccagctgctcatctcccagcacgaagccaagatcaagtctctgacagactacatgcagaacatggaacagaagaggaggcagctagaagagtcccaggactcgctcagcgaagagctggcaaagctccgagcccaggaaaaaatgcacgaagtcagcttccaggataaggagaaggaacatctgacgcggttgcaggatgctgaagaaatgaagaaggcgctggagcagcagatggagagccaccgggaagctcaccagaagcagctgtccagactccgagacgaaattgaggagaagcagaaaatcattgatgagattcgggatttgaatcagaaactgcaactggaacaggagaagcttagttctgattataacaagctgaaaatagaggaccaagagagagaaatgaagctggaaaagctcttattgctcaacgataaaagggaacaagccagagaagacctcaaagggctggaggagacagtgtctagagaattgcagacactgcacaaccttcggaaactctttgtccaggatctgaccacccgagttaaaaaaagtgtggagttggacaacgatgatggagggggcagtgctgcccagaagcagaaaatttccttcttggagaataacctggagcagctcaccaaagttcacaagcagctggtccgggacaacgcagacctgcgctgtgaactgcccaagctggagaagcggctgcgtgccacggcggagcgcgtcaaggctctggagagcgcgctgaaggaggccaaggagaacgccatgcgggaccgtaagcgctaccagcaggaggtggatcgtatcaaggaggccgtgcgggccaagaacatggccagaagggcccattcagcccagatcgccaagcccatccgccccggacactacccggcctcatctccaacggccgtccatgccattcgagggggaggaggcagctcttcaaattccactcactaccagaaataaatacaaaatatgactccacgtagcatgtcaaggactacattaatcaccaattcctttatttttccccccctacagtttccattttttttttatacttgcttactccagccatctgcagtacaccagtttcaggtcttttgagctgtgtagagtttctgtgtgtacagatgtgtgctcggacttttctctttttgagaaatctgaaggagatggttgcagaagatccacttactactgagaaccattaccaccgactcggcctccggggtgttgggtggtttctgggtggttcctggagcctcctctgggcagtgcactgtcccatctgtacgccctaatgtgccattccctagaggggaacaaccaagtgccgtggaggcagatgatcatggtctgcctcaactgtctggtttcctgtaaaataaacacattgttttatatttttagggaacaaaaagtgctgctatagggttcaaagttttccttctgaacacttttccgaaacaaattaccccaaagacacattttgaatatcctggtcacatctttggatctgtaaaatataccttttagtatggcacctgttaaaatgcaaagcaaatttctttggggcagaaaaacaatctgacagtagcagtgtagaatttgttcattcaaatacatctgtgtaaatgcaaaaagtcataaaattcacctccgagctgcttgcttttgaacctgcagcaactagtcttagccggcccggtttgaacatcgttctttcagaagtgctgaaaatgctgcaaagttggataagtggaaatgtggctgcccctctcctcactacttcctctctgatcgttctgaagcttgcattgggaatggctgctttctctaaccattttcagcttgagtgggtattgctgaagaaatccaacatcattccagcagttgaaaaaggaagccttcgggagaaagtgcttgtcaaaattttgttctttgtgcttgtgtatgagtaagttgccatgaataagttattattttaacccataattggcgactgtttatatgaattctttctttggcaccaaataggtttcatcttcttaggcacaattagaaaaaatccacatagatggatattttacatttagttattgctttatccaaatacatgaatctaaagctgaatcaacccttacttccagttgtgcttattaagaagatcaatttccaagtagtaaagttttcagggaaactgactgtgctgctatttgttttgacaaatttgggggtaagtcaatgacaaccaaaccaatctcggtggaaactcctatcctatcatgttgtgtgcccaagatgagtgagctggcactgtgccctgaagctttcaccactgtaatgaaatatatgccaggggagactttgggcttttctcatgactgtgtgggtcgaaggtagctcaagtgtgtgtgtgtgtgtgtgtgtgtgtgtgtgtgtgtgtgtgtatgtgtgtaaagtgctaagaactgtgcattgacatccaaacatttcttgtacaaaatttccctagcaaagcaaacctgctttgacttaatttatttgttaaatgttgcactttgtttatgtatgttttgtttttggtggggaataaggagagagaggacgacaaattctattgaagtatttattttgtgaagatggcaattttgcatttgtttaaatttttttcattctttaattttgttatcagtgccagcccaatatacctgctctaccattatttgcggtctgataaaagggtccttgtggggcaggttttgcaaagcttatcaggtaataacatatgccacataaccttgttgatatgtttgcttctgatttgggaagctaaacattggtgtttgagaggattgccaattattaattgtcattaccactactctccattactttttgtttggaaattgaacaaaggtcagtaatggtttttggctcttgttaatatccatcataaaatagattgttttagattctttccagggtgatttttccctgggtaccccgtttctacttctaaagaattgcttggcactttcatgtttcaaagggaaacattcgcttgtagttccattttacttgatctctacaagggactgacaacatttgctttacttttattcacagagaaagttggctttgatgtctcttaaagataattctgctagttgctgatcagccagtcagttcacctagcttcaatctttataggacttctaatctaattttcctatagtgtgactaaaagggaggcaaattattggaacggattattcaaatggatccttaaatattgctatgtataataagccagttattatatcaggaccatgttctctgtaggccactttctaaaaaagccacatatgtgcaattttcaggtttttagactattgctccctgtactttaaatgtaaaaaccacacttctgaacaactaagctcatgaatatgattttggttatatgcagcttttgactagcatgtattgtgtctttttctcctctatgaataattttatatttcatgctacttcttgaaagtttactctttgatgctctaagagaacagccagatggtttatatgaataatctttatctgcaggatggtggattggtaaattaggagaatgttgtttgagatatcaagatttatgtctgggaactaaaatatataatgccaaatgtgtttttgtcaattactagagaattctgtgcaaacatatcatctcttcaaatgctgcacactttgcttttgttaaacagcaggtagtagacagaacaataacagtttcgcgttaagacttttaaaggaaatagaatcgtgattaagaaatcagaatttatagatatattgggataaatgaagaaataaaaatgtttgtctagaatgtagcatctagtgactttttaaagccctaacgtttacataaagaagctctagttcttatagaaataacaaagcaaataaaagttcttaacaatcccctctttcgaagtgcatttttttaaagcagggcaggagacatttggactctagctatatgacatactgggaaaggcagagggtggagggaagatttcacttcattgtctagcccagaatcttgagcaagctaaagaaaccatcataatctaaaattgcttcatttaacactaacaatttagactttttaaaccaagcattgaataatggctggataactgccgaagtaagcgccgctccatgaagtctgcttacttatttaaaaattgtgtatcagttttaaatactgttcattgtgtgcagatataaggggaatagggcattctgtagaattatacatgtctagtttgtaaagtgtgtcctgtgtactgcagatgtgtgttctctgggctttatgtatctgtacagtagctttcacattaaaaaaattgtggacaaacttgtccggggggtttgaggggagaatggtggtttatatcaataacgatgctgtactatagtccatgtaacaaaagatctggaagtcaccctcctctggcccacggaaaattttggtaatcttctaggttctaaaatgaagatgtatgggtactctggcagactgcatgttgtataatttgaaaaatactaaaagtggaaaataaaattgaattaaactttg

SEQ ID NO: 712 - protein, 911 aa, Homo sapiens
QGKPYVFDRVLPPNTTQEQVYNACAKQIVKDVLEGYNGTIFAYGQTSSGKTHTMEGKLHDPQLMGIIPRIAHDIFDHIYSMDENLEFHIKVSYFEIYLDKIRDLLDVSKTNLAVHEDKNRVPYVKGCTERFVSSPEEVMDVIDEGKANRHVAVTNMNEHSSRSHSIFLINIKQENVETEKKLSGKLYLVDLAGSEKVSKTGAEGAVLDEAKNINKSLSALGNVISAEGTKTHVPYRDSKMTRILQDSLGGNCRTTIVICCSPSVFNEAETKSTLMFGQRAKTIKNTVSVNLELTAEEWKKKYEKEKEKNKTLKNVIQHLEMELNRWRNGEAVPEDEQISAKDQKNLEPCDNTPIIDNIAPVVAGISTEEKEKYDEEISSLYRQLDDKDDEINQQSQLAEKLKQQMLDQDELLASTRRDYEKIQEELTRLQIENEAAKDEVKEVLQALEELAVNYDQKSQEVEDKTRANEQLTDELAQKTTTLTTTQRELSQLQELSNHQKKRATEILNLLLKDLGEIGGIIGTNDVKTLADVNGVIEEEFTMARLYISKMKSEVKSLVNRSKQLESAQMDSNRKMNASELAACQLLISQHEAKIKSLTDYMQNMEQKRRQLEESQDSLSEELAKLRAQEKMHEVSFQDKEKEHLTRLQDAEEMKKALEQQMESHREAHQKQLSRLRDEIEEKQKIIDEIRDLNQKLQLEQEKLSSDYNKLKIEDQEREMKLEKLLLLNDKREQAREDLKGLEETVSRELQTLHNLRKLFVQDLTTRVKKSVELDNDDGGGSAAQKQKISFLENNLEQLTKVHKQLVRDNADLRCELPKLEKRLRATAERVKALESALKEAKENAMRDRKRYQQEVDRIKEAVRAKNMARRAHSAQIAKPIRPGHYPASSPTAVHAIRGGGGSSSNSTHYQK

SEQ ID NO: 713 - DNA, 43256 bp, Mus musculus
  misc_feature (1)...(43256): n = A,T,C or G
gaagtctcctgacttctgcgagcgagaccctactctgggctccccaggcacgagaggccgggcttgcaacaagaccagccgcctcttggatggctgtggcagcctgtgctgtggccgtgggcacaacgtgctccggcagacgcgagtggagcgctgccactgtcgtttccactggtgctgttatgtgctgtgtgatgagtgtaaagtcacagagtgggtcaatgtgtgtaaatgaaggtgagcctcgcctaggcacgacgaggaggagaagcactgtgtgagggctgctctctttcagccctttgctcggatttctgtctagggtttatcgtggctcccggaagctcagagcatctgcctgagaacagctctgggggtgtagggtcaggtgaaatctgtaacgagcagccttttgtgggggaagtggccccacactctgttcttaaacactcgaatagactaagatgaaatgcactgtactgttagcgtcttctctacctacagctccctcgggctcaggttcctacttcctttggatagggagtctatcttttggccactcctcttcctcgaaggataatagcaggcattgtgtggagtcaataagacccgtatatatagcaagagaccacctcttcctatttgtggttctcaaactcctccactacagcccagaacctcctcttatgggacctcgggtgacaataatgagaggttttcggttggaaaaggacagagggcagggaagcctcagacagctgtcttgtcaggctcttgggaggcttctccttccgttcagttgttgaaagggtctctccaaaggaaaggttttagccataactcttggaggcccttttccttcttcagcaggaagggtgggaatggataatttattttactgagatgtgttcttggttcctgtttgaaactaaaataaattaagttactgaactactggactggcagtggcagatggtgatatgtctagccacactcggggtagtagcccgtgtttttttctctttctaggtgaagtctacactcctgtactcagtgactttttatgtatatcctgctgacttccacaaaggatttgaaatgatgctcaaagactgagtttaggtttttagtctgtacaaaccaaggtggacttctgggtgtgaaggacttttagattcaaatgtacatagaccctgttcaccccgagccctaggctccagggtcaccttcaccattactcagaaccaaagctggtgcttgtctcccctgtaaagggctagatggtagatacactaggctatttatactgtggtctctatgtcgacaactcacctccaccgtacttacccagttctgctgttatagaccccaaatagttatggcagggggtgaatgaaagcagacacagacctcacataagcggatggggatagctgtgttcaacacagctcacaaagctggtgtgcagggccagaccttgccctccgactgtcacttattgaaccctttgctatactacaaggtcatgtctgcaatgggagtttcagaacttaaacttaacaattaggtggacaattaaaggacaggtactgttgtctctaagtccaaaccagagaattgggcaggggttgggggctggagggtgggggtggggtggtnnnnnnnnnnnnnnnnnnnnnnnnnnnnnnnnnnnnnnnnnnnnnnnnnnnnnnnnnnnnnnnnnnnnnnnnnnnnnnnnnnnnnnnnnnnnnnnnnnnnnnnnnnnnnnnnnnnnnnnnnnnnnnnnnnnnnnnnnnnnnnnnnnnnnnnnnnnnnnnnnnnnnnnnnnnnnnnnnnnnnnnnnnnnnnnnnnnnnnnnnnnnnnnnnnnnnnnnnnnnnnnnnnnnnnnnnnnnnnnnnnnnnnnnnnnnnnnnnnnnnnnnnnnnnnnnnnnnnnnnnnnnnnnnnnnnnnnnnnnnnnnnnnnnnnnnnnnnnnnnnnnnnnnnnnnnnnnnnnnnnnnnnnnnnnnnnnnnnnnnnnnnnnnnnnnnnnnnnnnnnnnnnnnnnnnnnnnnnnnnnnnnnggtgatgggaaaaaaattgagaggattcctatgctcaaaatgcaaaatgtgtcgtttgtcagggaagagtctcactgtgtaccccaggctagccaggcggtcagtacgtaccctaggctggcttcagactttccactgtgtctcattcttgagttctggaattgcatgtaggccttaccactcccggctaaaaattagataattttagcaaaactagcattctctgccactgaattatttgcatatacattttgtctttctttattcaatgttctttttttttgtatttaatctgagtaaaataatttctttatcttttcaatttttctacatttatttatttgtgtgtgtgtgtgtgtgtgtgtgtgtgtgtatgtgtgtgtgtatgtgtgtgtgtgcacatgcaagtggatgcaggcatactgtggaactcatatggaagtcatgggacaacgtgcagaaggcagttcaccgtttaccacttgggttccagaaactgagtttaggtcttcaggtgcggtggaagcattctgacctgacctgctgggccatcctgctgcccatcccttgtcttttcagatataagtagagagacgagattttttttttttctacaacatctccaattcctagcctaatgtctttgaaaaggagcacctttaagatgccttaaggacagaggcaggaggacttctgagttcgaggtcagcctggtctacagagtgagttccaggacagccagggctacacagagaaaccctgtcttgaaaaacaaaacaaaacaaacaaagaaagaaagatgcaatgtggaggggctggggagatggctcagtggttaagagtattggctgttcttccagaagatccaggttcagttctcagtacccacatgtcagttgacaaatatctgcaactccagttccaggggatttgacagcttcacaaggacatacaggcaacagcaccactgcacataaataaattgggactggagggatggctcagccattaagagcactgactgctcttccagaggtcctgagttcaattcccagcaaccacatggtggctcacaaccatctgtaatgagatctgatggcctcttctggtgtgtctgaagacagctacagtgtacttagatataataataaatcttgaaaaaagaaaaagaaaaagtaaataaattgcctggtgtggaagctgacttaggcagagcccggtgagttcaaggccagccttgtctataaagtgagttctaggactgccagggctgttacacagagaaaccctgtctctaaaagatagataatagatcttttttattaaaagatgcaatatggacaaaagacctttcagagcacctgcatatttggggtctataagatgctcccagggaggctggagatagcacctgctgcttttgcagagggcatggattcagttcccagcatccacatggtggctcacaaccatctgtaactccagtccaggggatctggtgcccttgatggcctctgcaggcttctgcacagccatggctcagagacatatgagggcaaaacactcatacagaaaatcaaaatatatattttattttaaaaggccaaaaacatgcttcgacggagtgcagaagtagctccctatatttctctaggtgataggttatctggtgagacaggaccaaggggaccatgaggactgttggatcatggcagtactccatggtgacattatacctttttagtgtgggaggccaggtatcgtggaactcaggaagcagagacaggcagatctctgtgagttcaaggccagcttggtctgcagagtcagttccagaacaaccagggctctatagagataccctatctcaaaaaacagaaacaaacaaacaagtttggggagggaggggtttggggagatggcttcttggtgtagagtgcttgttgctcttgcaggagacctgggtttgatttctagctctcacagttgggcagttcacaacagtctttaactccagttccaagggatcaaataccccattctgacctccagaggcactaggtatgcatgtggtacgcagacataaatgtgggcagaacatttatataagcagataaatctttaaaaatcaaaagaactatatatgtgcatatgtgcacgtatatgagtatctagaagagcgtcaggaatcccctggtgttttgcactgcctggaatggatgctgagaactgaactcaggtcctcctgaattcacccatcctctccatggcaacaacttagcgggagatgtcagacacctgctaacctaatgtgtgaatgaggagaggaagaaaggagaggggactgaagtaagatggacttggatacaaccaagaataacagggaacatccagagtgcagatgccttccctctaggaagaggcattctccagatggggctgtggcgagagagtcttttaactttccttttccctcccctgtcggtccctttgcctccctcgctttcctagcttttctttccatagcatgcacgctctgtggtggacttaagccccaaaccacaaccttgacaaattccaattggatttggtcagcagggccaacaccccctcccagcacaggcgctgggctcaggcccaggactggggtcagtggtggggtgggagtttgcaacccacagaactggtgggtggctacagtttcagcttttactgggctctggtggcagctggagggagggaaaagagcacactctggaggagccctaccttgaccaaatggctaggaagcttagagtggtggggagcagctggttacaggggagtagcacttctatccacccctgcttgtgtcaggccaacctctcctgacccttgtctccccacacaccagagggtgaaggacagaagacctgagggggtctctccagccacacccaccttttccaccataggaagctgtcagtcatttttgtcttcctttcactctgccatacatttgtgggagggctcaaggtcttcatcattaggtttcctctccttgttgaggttccacaaggcatgctgtggaagcactagggagtggggtgagcagtccataggcatacagaggcaagggagtgaggacctaacctggtggagggttatcacaaagttttaggcgagaagtggagacgttaacaatcacactaaaggcatgtcagagcacatgtcagagccgcaggaatgcataatggtcttttttttgtttgtttgttttttgagacagggtttctctgtgtagccctggctgtcctggagctcactttgtagaccaggctgtcctcgaactcagaaatccgcctgcctctgcctcccgagtgctgggattaaaggcgtgcgccaccacgcccggcttataatgttcttaaggtttctattgctgagataaacactgtgaccaaaaacaagctgaggaggaaagggttaacttcacctcacagattctatagtcactgaaggatgtcaggacaggaagtcaggataggaacctggaggctggaactgaagcagaggccatggaggagtgctccccatggctttttttttttttttttttttttttttggataaatggtcttttctgtggaagcctggctactgtcctagaacttgctacgtagaccagcctggcctcaaattcaaagaaatccacctggctctgtctcctgagtgctggaactgacagtgtaccaccgtagctggctcagcttgctttcctgatattttcccctggtattgaacttatttttatttgcatgagtattttgcctgcatgtatgcttgtgtaccacatacatactacacacagtgtccatagaggcctgaatggggcctgggactagagtcacagacagttgcctgccaccatatggatgctgtgaatcaaaccaggtccttgggaaaaagctgcctggccccttagcctctgagtgactagtcagccctcacctgcttcataaaattcaaaggtcgtgccgcccacagtgaccttggcccttccatgccaatcatcaatcgagagaaatgccttgcaggttggctcacaatctggtgaggtcatttcttgattggggcttcctcttcccaaatgattgtaacttctatcaagttgtcatcaactagccagtacagttgacctcttgtcaatatgacacacaaacacatcactattcaactagaccctttcctttctcagttaccctcaacatggcatgttataatgatataaaacattccaatgctgatgtttcccatatttgttacaaattcaaacgtataaagaaacccggtccttttagaaacatctgaagtctctcttttttttttttaagatttatttattgattatatgtaagtacactgtagctgtcttcagatactccagaagagggagtcagatctcattacggatggttgtgagccaccatgtggttgctgggatttgaactctggaccttcggaagagcagtccagtgctcttacccactgagccatctcaccagccctgaagtctcttttaaagttcaatgtttttctaaaacattcaaaatcgctgtaaaattctgaagtttcttaagcgtggagtcctgtgaaataaaaaaaaaaaaaaaaaaaaagctacatacgttattgcttcaaaaaggagaaaccaggacaatcacaaacaaagcaaagcaaaaccagagtccagcccggtaaaaaggccagcgctggggcctcctcatggttctttgggcctcaaagtgctctgtggcctcaactctgccagcttgtctcctgggcccagggcagcgctattccacagtttcttctgtccttggcagttgtcccacggtgctggcatctccaaaaggctgggtctctgctgcagctggattgtgttctcctcctctcccccctcctccccccccccccccccctgaccttgccatgtggtgacagtagaccagactggtttcaaagtcagaggtccacctggctctgcttcccaagtgctgggattaaaggcctgtgccaccaccctggactgctctttccttaatcacagctgattcttcagccccagctgtccagtatcaattaagtaaagtaaaagtttcactttagttgttctttttttgttgttgttgttgtttttttgtttttttattattattggctggggtccctctatatagccctggctggcctggaacttactatgttgatcactctggctgtgaactcacagcaatccatctgcctctaccccccagagtcctgggattaaaggtgtgagccaccacatgtgcactttagcggctcttaattcaaaatatgagacttagactctttaagggactttccaatttctccctgtaacttcccaagtcaggcctctgtcgtctgcactgctcttggcattatcttctaagtccccacagcaacccacggaactctgagcacacaacggctttcccagcccagagttcagatgccaccacaatcctccccaaaacacaaggtcaggtctgtgacagcaacatctcacgcctactgtccaaatgcaacctgaggaagaaagggtttattatagttcatcactgagttggaactcagggtaggaacctggaggcagaaacagaagcagaggccacggaagattgctgcttatacataggcttgctcagcctgatttcttatacaacatacaacccaggggtgacacctcctacagtgagcttggctttctcaaactatcactcaaagaaaatgtcccccaggcctgcttccagcccgagctgatagagcaagacattttcttaattgaggttctctcttcctgcaggactctgtaaccggagtccagctgacataaaactacctagcacagtaactatattttggggagtctcttgcctttaagaacccaggatatgggctagggagatagttcagccattaaaagtactagcaagacaagcttggcccgagcttgttccccagagcctgttgtaataggtggagggcgatcaggctcttactgacctctcttgcctagaggacctggctcccagcaccacgtggaacaactgcttgtaactttgtctccagagaatgttacatttttttctccctgtagtagatatccacacttacaggcacctactcacacacagagacgtatgtgcgtaggtacagttaaaaataaatccatttggctggatgtgtgacaaatacctttaatctaagcactcaggaggcagaggcaggcagatcgtatttgagttcaatgccaacttggtctataaagtgaattccaggccaggtggggctacatagtgagcccctgtctcaaacacaacaataacaaatatatatattttaaagctggatgcctgtggtgtaatgaaagcattcctaaagtaagatgggggatgatgccaggagaatcacacagagctagcctagagtgtgcactgcagcagcagaaaccagagatcctggcccaacgagggaaaaaagtcaagaacagcgactcccaaaaggtgtcctctctaacctccacatcttgctagagcacaagtgcacccgcaatctctcatacaagcacacacacacagagttaataaatggagggaaaaacgagcaaaaaccagagcttaacaaaggctctcaacagcattgagtcctgagtggggacaaatataattctcttcgttataagcaagttccttgctgtccatctcttcgttaaccatctctggctgttctggagcctgctctgtaaatcagactgacctttaactcacagacatccacctgcctctgcaccctagtctccagtgctgggattaaaagcttgtgccaccaccgcccccagccagtcctgtaatttttgaggtaaacaagagaagacaaactggtataaaggtataaaccagagacagatgtgacaagagatagattctgttcccagcctatgttttggagggagagaagagttataacgctgcaccaagctcttatacttgatgcatttaaagaacgcagtgggggctggtgagatggctcagtgggtaagagcacccgtttctggcgaggacccttctagctcagattctaacatagcttgtggctagagtctcaggcagtgtctccatcatgtcaaaagatgagtgtcagggaaggaaggcggggtcctgggtgcgctttcctggggatactaaaatccagactcatctagagagacttcatgagagccgcctctgagtttctgccctctgcctttcagcctcaacctcctagacgaccccatccagatgtttcctctagtatctggaatgcatcgttctttctcctcttcctttatgggaaaggatctcagagaaagcatccttaggaactagggagcagagcggattagcaggtggggtgcgagtgatgcgctgtttatttggaataagactggactagagcaggatacagcaaccgttttcatcctccatgctccacatgggctctgcttaagaaaccccggagactccctggtccgagccctgtggccagcgcagccaggatgtggcaaggtcccggagctcgctctgctcgggagcctcacctcagtgcccacagccccctctacacgccgtgccttccgatcctccagcccccacacaggcccccgcctaggctcagcttcagcaccggctgcttttgctgcagccgctgccatggtgatgggtctcgcgagaactgccgctcgctaccgcgcacttctcgcgcgatcgtggaggtgggaagtagcccgggctgggggtgggtgttcgccgcacagctcctgtcgccgtcgcggcttccggtgctaggtggagggcgggcaggagggagccggggagcgggccagcggaccatcttcaccgcggtcgggtcggcttgcggagcgggaggcagcggccggagagccgggcggaacctgcgggggcggaggcggcggtggcagccgcggcgcagggagcaggaacaggttcggagctggggagggaaggcgggtccgggcagggaagaggctgggtccgggtgggagcccgaggcccccggccgcggtccggctcgcaccgtctgggcgaggtgctggtgtggggggtgatcctcgctgagcttggggaccccagccccactcctgtccccgcagccgaaggacgccgagctggggtgggggcggggggcgcacacggatttgtcctccgcctcccccgagggtgcgacctgggctgcagaggtgagcttgggagggttggggacgagggggaggcaggctgacctgtgggagggggacgcgggggcggtgtggctgtttggctctcttttccttgggtttaaagggctgcgaggaacgctgccttttctctctccctcccccgcccgagctgtgggggaaccaaagaaaagccgtgccgtgccgtggttattctcctccctcacccagcgcgaggcgtggggggccggggcttagtatcagggcctactggtggggctcggctggctgcgcacggtcctcacggaggtggcgctctgctctggggtgttgggaagagggcagcaggtggggagagggtggagaggaggctggagacgggggagggggacctgagctagctcggaggagagaggtggggccttcctcccccaggcggagcgggggcggtgtcaccgaaggagggagcagcttgtcactggccctgagtttgtgtcttccaatccgctttctttctctaggaagtaccaggattcccggaacagaaaatgaagcctttgcttagcatgccagtcctttttgaaggaaggagggggaggtggggaggtgaagttccctgttaaaacctcagggtcctttagttaagtcgtaactctttggagagacttgtttttttttttgggggggggggagagggtctctgggccaggaagaatgtagtggagggttatgtatgtggtcaggactaagaagaaaatagtgaggtcattagggagacgggtaatgtaaaacccgtctctgccactgttgcattgggtcacccttgggtccatggcatgaaagttttattgggaggagatctgctgcaggagtctgattgcttgagtcattgcaacaggatagaatctagtctctgcatacctccatctgtgaccccaggcagggggatagggaactgtctttgctgccattttgtcttagacctgtttggggatagtatccccactgtgtgctgcagtggccattgggttggcctttggcatgttggacctgcgcttgagtacattgttaaaggccgttttaagaaaggcccatccacttacattcagcttttcacacaaggagtcactgaccttggaggcagctggaaagggctcccaggtgtcacacagtcactcctgcacagttttccttctttctctccttcctttccccctcccttactcctttgtttgtttgagatgcagtgcccttgctcgcctcaacctaccagctgcctgccgctgtctctggagtgctgaggttgacctgggaaccgaggcagacccttacttccttttttgagacaggctggatttgaatcttgcttttgtaagaacacgggatagcaatgcatagaactgcgcaaggtttctagctactgcttaaggaagaggtagtgcagcgaggggaaggagttctctactgatgagaaggagaaacttctttaaagccagggttgttaaagttgaggctgtggctgacagaaactgggatctgcttcctcacatagctttggaagtagataccaagaggcctgtgagtcagagcacaccagtgctttggctaacggtgtgcttagaggcgggatgccgcagtgattgaagctgggttgtagagacagacaagatggggccaggctcacctcctgcctgtgctgtcccgagctgtcccatgctgtcctgttgtatacatttgataacttacttgttcgcacttaggtttcatttttccttttgcataaggagagtcatggtagcagctacctagtaggctgtcgtgagagttaaatgagataagtgaaaagtcctgagaactgcatagggcacacagcacatgctgactgcccaccgtcatgtagtgtggcaccaacactcaggcagggctgctgtaaaagagagctagttagtagaagagcagggtgggcctatgtgaagggacagttgttacagtgactttactcagtgcctcgtgagtggtaacgttttattcttgtctgtatcagctcatagccgtagcacgtaatgcttcagggagaggtgaagctggagcagggcaggggccgagaacatcttggatgcaagggcgtgtggtgatccagagtagtgttggttagaaaggccactggagggctggctggctggttcagtggaggaaagctcctgccagcaagcttgaagacctgagtctgattccgtactcctgccccaggtccacaaggtagaaggagaggacagattctttcatcgtcagtctctggcttccaaacaaaaacgatgtgaaaagagaagaaaaagagattcttttaagaaaagtcattccataaccgcgtgtgacaagtaagacagcatgtgatcctagtacttgaaaggtggaggccagcagatgccaggagagaccttgtttgaataacgaaccgtctcccctcccaattggcacagtgctagactcggttggctcttgttcagaggactggagttgagttcccagctcctgcttcccgagccacaacacctgcagctcagctccaggagacccaaccaaacctgcatgcacacacgtatagtttaattaaaaaaaaaaaaagaaaagaaaaaggatgaagctgaagagatggctcatcagttaagagcatttgttcttacagaaggctccaagtttgctttgtcagcatccacctgtgggctccaaaccatctttagttccagggacccggtgtctcctggcttactgggcaccaggcaggtgcagggtacactgacatgaagacaaagcatggatgtgctgaaataaataaataaatcttataagaagatggtgggctggggcttagttggcagagtgcttccttgataagtacaaccctggtgttccatatctagtaggtatggtgccgctactcatgggagatcagaggtggggggatcagaagttaaagatttgagccaggcgtggtggcgcacacctttaatcccagcactcgggaggcagaggcaggtggatttctgagttcgaggccagcctggtctacagagtgagttccaggacagccagggctacacagagaaaccctgtctcaaaaaaacaaacaaacaagcaaacaaaaagttaaagattggggctggagagatggttcagtagttaacagtatagactgttcttctagaggacctggacttgatgcccaacattcacatggcctctgcactcacccggcacaaagcgggagcacgggcatctctgtaagcaaagcaccagaagccataaatgcataattcttaaaaaaaaaaagaagtcattttcagctacacactgagtttgaggccagcctgggataaatgagaccccatgtaacaaaacagaaatctcaagagtgaaggtgacttggaggtggtgactggacatcctgatagaatttagaggttctgtttgctgggaactcagggtcaccgttgactaacttttcagttctgtcctttgaaaatgttaagctctgtctgtctcacacatacgtgtcaaggtccagagattgtgctatccttaatttcctgtcaagccttctccatggtgagatctgtggtgattaggtggagagctaacgaaactcttctataataaaaggaatctgagaacgttaggaaagagttcccagaaaagtgagggcttcgtggacatggtgaccccgttagtcccagcactcaggaggtagaggccgatctgcggcagcgctctgagcttaagaccaggctgacttgcacagcgagttcctagctttattttacttatgtgcttttaaatcagttttattctacgtgcattggtgttttgcctgcatgtatgtgagtgaaggcgccagatcccctggaactggagttacagacagtggtgagctgccatgtgggtgctgggaattgaattgaggtcctctgaaagagcagccagtgctctgaacagctgagcagtttcttggcactgagaccctatccttaaaaaccaaccaaacaaacaaacaaaatgaagccttcaggggcagtgaagctttgggcttaacacagtggttctcaacctgtgggccacctaaatcaggaaatatcagatatttacaacttctaacagttgcaaaatttcagttacgcagtagcaacgagataattttatggctgggggtcagcacaacatgcagaactgtgttaaagggtcacagtgttaggagggttgcgaaccactggcttggcttaggtaagggcacttgaagcctagcctgaagacctgagtttgagtcctggaacccaggaaagaactggtgctcaaagttgttctttaacctccgtgtgggacatggcgcacacctgcctccatataccacatatacacgagattggagtgtaagtaaactagagagatggtccagtagctggtcctatagcacccatattggacattttctgtctcttgacttgaggtctaggtgacccaaggcacagtctcttgtggcgtctatctgcactcatgtgtacactccccactctccaggagtgtacccacctttaattccagtgctagagagtcagaggcaggcagagatctctgagttcaagaccagcctggtctacagaatttgttccaggccagccagagctatataatgagaccccatctatggatggatggatggatggatggatggatggtcagtcttttagtatttctaactttcctgtgtctcggtgtttggctgcacatgtgcctgtgtaccacacatgtagggctagaggagctcaaaagagctgtcagatcccctggaacagaagttacagattatttaaagctgnnnnnnnnnnnnnnnnnnnnttacagattatttaaagctgcgtcagagctgagaactgatcctgtttcctctggaagagcagcctgtgctcagtcacagagccgtctccagcccctccagccctccctcccacctctgcctcctgagtgctggaattaaaggcctgcaccaccactgccagctgcaaacatttgtgtgcttttcttttttcttctttttttttttttttttaagtgaagggttcatattctagtttgggaaaatattgtccaaggtgtgaccttttcttacagatttttttttttttttttttttttggtttttcgagacagggtttctctgtgtagccctggctgtcctggaactcattttgtagaccaggctggcctcgaactcagaaatccgcctgcctctgcctcccgagtgctgggattaaaggcctgcgccaccactgccctgctcttaacagatttctagaaaggatctgttagaaagaaatggcttaagacttgaggtctatcccccaaaatgtgacaggtctctcggtgcctttttgctctcccattgctgatagagcccatcatacatacccttatgtgtgagcatcaattataaatgtttacatttaaaatgaattaggatgcaagaggatatttgctttctgttgaaaaaaaaatgtgtgtgagatagggtcttgtgtagcctaggctagcctcaaattagccatgcagttgacgaagtctttgacctaatgatccttctacctctacctctgtggtgctgggattgcaggtagatgtaactaccccgctttatcagtgctggggactgagccttggcctgtgcatgccaaccaagctctcccctgaccaagctacattcccaggcctgtttctctttgaataaaacgtttagacttcaccttaggtagaaccgtaaactatagtacataaaacattttagtgaggaagtgggctgttatggtactggggactggggcgagtgggggaacataatgaaaacctttgcatttgtggtctcttcttcccagactgcttgcttgtttgctgctgctgctgctgctttcctctttcttcttcaagtataattcgaccttttcttggttatttaaaaaagacttgccaggtggtggtggcctgttttaatcccagcactcaggaggcagaggcaggtggatttctgagttcaaggccagccagggctacacagagaaaccctgtcttggaaacaaagtttatttttgtgtgcatactttgcttatgtgtatctatatgtgcactgtgtgtggtgccttgtggaggttggactggagttagagttggctgtgagctaccacatgagtgctgagaacctgacctaggtcctctaaagaacagcacatgctcttcactaaccagctgtctctggttccacttctaaaaaaatttatgttttatttactttcacttaaaaaaaaagttacagccaggcatggtggcacacgcctttaatcccagcccttgggaggcagaggcaggcagatttctgagttcgaggccagcctgatctacaaagtgagttccaggacagccagggctacacagagaaaccttgtctcgaaaaacaaacaaacaaacaaaaaacaaaaacaaaaaacgttactccatgtgtgtgcatgtgtgagagagtacatgcctctgtgtgtgtgtgtgtgtgtgtgtgtatgtatgtgtgtatgtgtgtgtgtgtgtgtgtgtgtgtgtatgtgtgtgtgtatttgtgtgtgtgtatgtgtgtgtgtgtgtgacaattgttatttttctccttccaccatgtgaatcctgggtgttggcctcagatttccaggcttggtagtaagcgcttttacctgataagccacctcgaccctttttgagagaagtgtgtatgcattctagactgtcctgaatttgttatgcagaccacagtggcctggttctgcctcccatgtgctgtgattacaggcacacaccatccctgtgtcttggcaggctctcagtcctcaggaacactgagtctgagaacatgaaaaccgctttcctagttgtcaaattcaggagagggactgggggccacaggtggcttcctttctgcctgacagacatgacaaatgccatgtcatcctcagtggagccatttgcagagtgtcagtccttgtgcctgtgcaggaacgggaagcacgtggcagcctttgcagatgaagggcagagtcagtgctgggatcccagccctgccctctattacagcatacacaggaagtgatcctaggacagcggctagacacctgagctgatgggtggctctgcaggcccagtcaccgaagttctgcctaggcacccatggcctttgtgatccgtgactccagctggcatagaacgcatcagaggcattttgggaagctttacctctggagagtgaggcagacaagttgaatggactacactttactgtttctttaggctctttaaacagaagaaaaatacagcgtatgggtgtttggctgtgtgcatatctgtaccatatgcctgcagtgcaggtcagagagtgtctgatctcctgggatctggtaacacagttgtaagctgccatattggtgtcaagaattcaacttgggtcctcttgagagctgccagtgctctcaaccagtgaaccttctgtccagccccgcttagtttctgcggtagtggttgaccttgcccagattctggctttctgttcgacctgttcactgtgagctccatcttgatcggtaccagaggtcagattgggtttaaggctttcctcgctctacccaaggtcactgatacatttttagtgttttttttcttttcttttcttttttcttttttaattctcttattatatcccagccacaatttccctccctccactccttccagtccttctccctctcccctcccctcccctgatccattcctccatttccctttagaaaagagcaggcctcccagggatatcagctgaacacggctgacaagtcacactaagactaggtacaaaccctcatatcagggctggacaatgccgtaggaggaaaggatccccagagcaggtgaacgagtcagagacagccccgactcccactgttaggagtcccacaaaaatactaagctaacaaccataacatagagaacctggctcagacccatgcaggcgctctaattgttgcttcagtccctgtaagcccccatgagccctgcttagtttattctctgggccttgttctcatggtgtccggacctccctggctcctacaatcctccttcctggaactctgcctaatgtttggctgagggtttcagcatctgctcctatcagtggctgggcactgatctatgaggatagctgaatgtcactaggaatcagctcactaactttttttccaggttgtggtttggtttctgatccatcctctggttcttagccatccaggcagtgtcaggcttgggctcaccctgtgggtgtaggcctcaagctggaccagttggttttagtgaggggaagcatatcgtaggctctcctaggcannnnnnnnnnnnnnnnnnnntcagctgaacacggctgacaagtcacactaagaactaggtacaaaccctcatatcagggctggacaatgccgtaggaggaaaggatccccagagcaggtgaacgagtcagagacagccccgactcccactgttaggagtcccacaaaaatactaagctaacaaccataacatagagaacctggctcagacccatgcaggcgctctaattgttgcttcagtccctgtaagcccccatgagccctgcttagtttattctctgggccttgttctcatggtgtccggacctccctggctcctacaatcctccttcctggagctctgcctaatgtttggctgagggtttcagcatctgctcctatcagtggctgggcactgatctatgaggatagctgtcctccttcctggagctctgcctaatgtttggctgagggtttcagcatctgctcctatcagtggctgggcactgatctatgaggatagctgaatgtcactaggaatcagctcactaactttttttccagttgtgtttggttctgatccatcctctggttcttagccatccaggcagtgtcaggcttgggctcaccctgtggtgtaggcctcaagctggaccagttgtttagtgagggaagcatatcgtaggctctcctaggcagctggagataacagcaccacagaacagctgggtttggagcaggtggaagcggctcagattttaagaaatagaaaacagagcaggggttggtgagatggcttagctccagttccagggtccaccttcctcttctgtcctttgcaggtaccagacacccttatggtgcacagtcatacatatacacatagcatcatacacataaaataaggcaggtgccactctaaccagcttaaaacagcgcagtgaccttacccacatagctatctctctggctcaaaggttttatgggtttttgtttgtttgttttgagacaggagtctcactttgtagtcctggctggcttggaacttattatgtggactaggctggtcttcaaattcacaaaaatcctcttgctttgccttgcctcctgaattctggggttaaagacatatcccaccacactacacccagctaggatttatttttttccagagagaggatttagcccagggagccttgaacttggtatgtagctgaggatgtccttgaatttattaaagtagcaagagatatgattgaaataagccaggtatcagaaggcagatgcggctctcacatgaggtagaatattaaagtagtaagtacaggaagaggaaagctgtcccagtttatgtcaccaggatcaagaccccaacagaaagcaatctgaagagaaaaggtttatttccctcacagcttgtagtttatcatgaagggaattcaaagcagaaacctggaggcgggagctaatacagagaccatggaggaccatgttgctggcctgctcccatggcttgctcagcctgccttctgtataacccaggtccaccttcctggaggtgatgctgtctgcaatgggctaggacctcttacatcatttatcagtcaagacagtgtcttacagacctgcctacgggccagtctgatggaagcattttatcagtggagttaccctcttcagagatgattacagggtgtgtcaagctgacagaccaatctgtatagaaggggacaatgagattgcttagtgtataaagtgcttatcaccgggtccttggaacctgtgtgatagaagaaaagaaccaattattcagacttgtcctgtgacctccacacacgccagagaggagtggcagctgccagtgctccatggagggagggggctccttcctactgcgctgcagttggaggcaagtgctgcatctccagcacgcgtgcgtgaggcttgtttcctagctgcaggctcactttggagagttgagaacgtctgcagatgagtaatggtggtgtttgcactgcggtgtaagtgtgttaacgtcattgaaccagttaagatgaaaacagttaagatggcaagttttttttgttgttgtttttttgagtttttcgagacagggtttctctgtatagccctggctgtcctggaactcactttgtagaccaggctggcctcgaactcagaaatctacctgcctctgcctcccaagtgctgggattaaaggtgtgtgccaccacgcccggttaagatggcaagttttatatgtcatttttaaacacaagtatacggctagaacacttttaatccactggcttgtccttagagggcctattttctcctatttctctgctctatctagtttgtttttgttatttgttgggtgggaggctgttgtgagcctaggctggcctacaatctgattctcctgcctcagcctcacagcaactagagctttgatgctgctctgttttcttggatgagggggatgcttgcccatcatcctgttttgttttcaggatttttattttcctgtgtttaagtgttttgcctgtatgtgtgtgtgcagcatgtgtgcctggtgccaatgaagatgagaaggagggcatctcaggcatttgtaagctaccatgtagatactgactaaactcatgtcctctgagccacaagtcctcttcactgctgagtcctctttctgacccctaggagttggggttttgttttgatttcagatagggtctcactgtgtgtccagctcttagcctctgagccattgttccagtgtcccagctagtgtttttcaatttttaaaaattacatttggcctggaaagatggctcagtggttaagagcactgactgcttttctgaaggtcctgagttcaaatctcaacaaccacatgatggctcacaaccatccttaatgagatctgatgccctcttctggtgtgtctgaagacagctacagtgtacttatatataataataaataaatctttgggccagagcaagtggggccggagcaagcagaggttctgagttcaattcccagcaaccttatggtggctcacaaccatctgtacagctacagtgtattcatgtacataaaataaacaaatcttttaaaaagtacacttatttgtgtctgtgggagaaggcaactgtcacagcacacacatcaaggctagagggtaacctttggggtcaaactcaggttgttgtatttagtggcaagcctgttgacctgctgaaccatctttctgcctcccgcccgttcctttgtacatgtgggtgtggcatgtgtgtgggcaccattctgtgtgtgtgtgtgtgtgtgtgtgagcgcacgtgcgtgctgaaggacaactgtggatgtccttaagaatgacatctgttgggctggagagagggctcagcctttaagataagcannnnnnnnnnnnnnnnnnnnnnnnnnnnnnnnnnnnnnnnnnnnnnnnnnnnnnnnnnnnnnnnnnngttctaggatagccagggctacacagagaaaccctgtcttgaaaaacaaaaaataaaaaaaaaaaaaagaagaagaatgacacccgtctcttgtgagacaggttctcttgccctggagctcacccgttagtctgtatagactggctggacagtgagcctcaaagaagcttgtctctgctttctaaccatggggttacaagtgtgtactaaccaccatagctggctgtttttagatgggctctggggctcttacgtgggtcctgtgctttgagggcaagcgctcagcgactgacccgtcccctgtgctgatgttgtttctttgagacagggtctctgtggtctgggctgttgttacactctcggcattcctccagcccgggcctctggagagctgagactgcaggtgtgagctgccaccccaggtttagcatctcatcttgtatgaagctggacacgagagcactaatatcctcacttaaaggtggaagaaaccattctaagaagctcccagggggcttcccacggttcactggggacggtttgtttctgcatgccccttagtgagccagtgagccgggtcatttcattcactaggctgagaaagagtctccccgaaatgtacttcacattctgtgtctccccaattgtaaacaaaatggggcttacttagaagaaagtgaagaaaggctgtggtagaggcagccagtaatttctgtcgtctgaggccatcttgctttttttaaggttcagttattgtttgtgtaggtgatttccagatatcacccccccaccccctgtccattggactttatatttttgcacaaaaatagaaatacaaactgctcttgcagaggacccaaacttagagcagtaaagtcacacaactacagcagcttgtagctccagctctggggatctgatggcctcttccagccattgccctgccacttacatgcacatgcctacgccatagaaagagatttaacagaaagaaatctgcattaagttctaaagcgaatatcctcgtccttaccagatgcattcctggcttttgtttttttaaggtttgtttacttagtatacatgaatatactgtagctgtcttcagacacaccagaagagggcatcggatcccactagatggttgtgagccatcatgtggttgctgggaattaaactcaggaccttcggaagagcagtcagtgctcttaaccattgagccatctctcacctttttctgtctgaagaattgtcatccagttccaagtcgtcgttgacctttctattcttcctcttaagtttagtccatcattagaccctgtgagttctacttttttctgagacagggtctctgtatttgatcttggctgtcttgctgtctagaccaggctggctttgaactcaaatcctccaacttctgcctccaagtctgtgcccagtgagtcctaccatatcgatgtttcagatctctcttgtcttctgctgctacctcttgctactaggaacttaaaaaaaaagatttaacttattttccatgaagatgcgaatttgcctgcatctttgtaagtttagcctgtgtgtgcagtgcctgcgggagtgagttgtgagtctttctgcttccatctttgcagtgctgagactatagctgtgtgctactgcaccctgtgtatgcagtcctgggattgagccagcactttctatatgctaggcaagctctagagcagaggccttgcttggtcccctcttccttattcagtgtaccctttgacgagtcagggacagacaaaagaagtgctttcttggctttgaaaatctacagtttactaagataccaacgagttcttgtgttctgacataagtgttcttgaaacaagacgtaaaatgtacagatgtcttcagacatggttggtacttcgtacttttagctccagcacttgggaagcagaggcaggcagatctctgtctggccagccagggttatatagtaaaatcctgactctaagagaaaaaaaaagatgaaggtggaggacacagcagcaacagctgggtgtggtcacatgctccagtgttcccagagacagaccagatgatctctgtgagttgaaggccagcctggtccacatagtgagctctaggacatccaggactatatatagaccctgtctcaaaaacaaacaaatacagctaaaaatatattaaagctatgactagccaacaattagttcaggagactaatgcagactcactgagtcctaaactattggtcttgtggttatcagtgtttcagattccatttctgttagtgatagagtcctcaatttgaaaatgacctggactacgccggggcctagcaaacacataagtggatgctcacagtcagctattggatggatcacagggcccccaatggaggagctagagaaaatacccaagaagctaaagggatataaggttctcctatagggagaacaacattatgaaccaaccagtaccctggagctcttgactctagctgcatatgtatcaaaagatggcctagtcggccatcactggaaagagaggcccattgtacttgcaaactttatatgccccagtacaggggaatgccagggccaaaaagtgggagtgggtgggtagnnnnnnnnnnnnnnnnnnnntagcattggaaatgtaaatgaggaaaatacctaattaaacaaaaaagaaaaaaaaaagaaaatgacctgggaacaccattgctcttacagccaggcagtgggggtcgaaaggttcttctgccttcctctggaccctgaagaggatggtggaactagatccaacatcttctgaagcatttcaggacacatgcttggtccagctttgcagtcagatgggaggagtgtgtctagctcacctggctaaacacggggctaaacacgtaagccaagatggccgaacagctcgccattactgtttataaagtcagagtttcatgcacactacgaagatagttttccaagtgcactacctggccagtttagctgcaggttgttgttgttttaggaatgcattctggtgcagggatgtgcatagggttagagcaatagctcagccttgaaaggccaagacttactacagagatgatgaccatctgtataggcagggattggtgttcccagcattgctaaaagctgccactgccctagtgacaaggacagagtactgtgtcttaataggcagagaggaatagagaaagcagtcaagctcttaattatgctaaagggagtcataaactctggctgctcccggaagcttagtggctaccaggtatctgtgagatctttgatttaacaaaggggaaattccactgttttgtccttttaggatgttcctgaactagttttgggttcaactgtgtctggaaaatggccagggtttgtcagctcctacccaagctaaattgtatctggacttattaaagatgtttagtaaatagtcatagtatttcaggagggacagtcatgaactgtgcagaatttttaaacttcttgtgaagtaccaaaatccgaagggcactataaattcaagaaacggtagggtttagatatcagttggtgtggtggtacaagtgtatagaatctcggctctggggaggaatggagacggggatcacaggtcgtccctagctgatcttcctgaaaccaatccaagggcatgtttgttaccttgagcagagaacgtttacagtaaggattgccctttcttgttaagtatgtggttaaacattggtaaacctgtgtgattgctcaggaggtgagatgcaaagggcagagctgtcagtctgaaggctggatctttggaagaggagtccccaccctacacacacacaccctgttgctcttgtaagaaaccaccatgttagttgatgtcactgccctgcccggatctgatgtacataaaggcaaaagccatttttactgggtcacagtctaccaggtctctggcttcaaagaattaagtctgtggagatggtgtacatcgaagaggatatagaaatgaatttttaggggacattgagctagatcagcaggtcagggtgcttgccaccaagtgtgaaggcctgagcttggttcctgggatcctcgtggtgaggacggaggaggctcccttattgtcttctggccttcatggcatgccagatgtgcatagacacataacttaatgaggaatacacatatttttgagtgttcccacaggacaaagccaaggtgattactgcatgtgccaacatcagggaatcttttccttgggagccaagcatcaaaactggcaaacaaaggagttttcttctatgtcagtccaacttgggagacattctgttaatgacttatttcccccaaaacaatgaagcaaccccccttttaacattacgtttactgtgtgtatttgtgtaagttcctcctgctgtcacacgtgaggtggtcagagcacaggtctggggagctgtttcctttgctgtgggtcgtggaactctaactcgggtgttaaggcaacaagtgccattcctgggtgggtgagtcatcttgctggctcacaaagaaacgtctgtgtgctaataatataacttaaaagtaaaacagatttccatattgtataaaatgataagcggtggcatttcacactgcatagtcacaagagatacagttgtgaagaatgtgcgcacaggtctagagaggtggtagttagagcatgtgttcttctttcagaggaccagcatttggttgtcattgcccacatggtgacttagaaccatcagtaactccagtttcatgggatccgatgtcctcccccagcatcctcaggctgtacgaagtgtacttacataatatagccacgcccacacatacaagtctaagaacttgtacatttctgttgtcatgtgtagcacttgagctctctatgcctggtctgtttgatccctcagttttctccaggcctgtgtccatcctcgccgtaatccgcgtcctcgtcttccttctgggtgtcttagcttcctatcttttaggacttttggaaagaaatttgggctagctttggagaaacaggtttagcagacagctttgtggcttttgtctgtggcttacccatcatcttggatttatttccattaatgcccccccccccacatttattatgggtatgtggtgacaatgacagtaggcagtgaacatggacatgtagtacatgtggctttggtgcaatgttcattcttgatgaatcccccacctccatcccacattaacccagactgtcatcaaacttgatagatagttgtgggtagccttgaacttctgatctccttgcctccaggtcttaagtgttgggatcacagatgtatgtgtcaccatgcccagctttacagcacattgatcaactgtagtccatagatagcaatcctactgggcagaagaaatgacacagggatatctctggttgaagctcatgtcagtatgcaggatggatcatccatagtgatttaagtcatgagtgtgaagacagcacttgggaggcaggcggatttctgagttcgaggccagcctgatctacaaagtgagttccgggacagccaggactaccaaagaaaccctgtctcggaaaacaaacaaacaaacaaacaaacaagataggcccaaggaaacaaaggatacagaccttgcagagggggttacattttaattagggagatgactatgtacccattaataaaaaagcaagtcacagggtaatgtgtgcttcatgagaagttcacatctttcagggactttgcaggacagatgtgcagccagcttctctttctctccaggccttcctccttccacctcacagtgctgcactagagcccgtgtctctgttgtcaggttacggtcaactttgaattgtaacttcagcatgacagttgagcagagaagtggagggttatctagaggttccgagccagggctattggctgctggtcttgtttttcagcagctggtctcactatgatcatataatcagtgctagcgtggtcatggaggacagacagggagaagtgtgtgatataagtaaaatccctgccagagcctaaaaacagctcttcagctctctctgctccatcccgggaaacatggagaaagttttccttgtggaggtcatggtaccagaaacccaactactataggttgctggaggttgggatgacctgattttagtagctggacaagtgtccctgtcactcctcctccccccccccttcctgccctcaccttaggaatgtgtaagggccttagatctgactggatgagttgaggctggaaggacggcggggctggcaggtgggcagcatggctgagattgagtcctgaagtccaacaagccctgttgctggggtgtgagctgggaggcctgggagaaccacacctggctccttagtctggggatgtctgaagatgaaacgcttctgcactcagttctttttttatttttagacagcctagtacttcagtccctaggggctcttgatctgagttctatgcactagtctggaatttgctacagaggaataggggaaacaaaacaagaaaaacaaaacaagcctgaagaagttctccaaaaaagtgactaaactcccagcagacttccctgattcaccttgtaactaggattcttcgctgcccacctctcacattcctgggtttagatgcgctctgtcctgacctgttccttcgccttctgggtttggggtgtgtgtgtcgctggtttccagactctggagagtgccagcagctggcatatgatgatcactgaacaagctgcccgctgacacatgccttctgaggcacagagagctgcctggcttgagtgctctgaacccccattgcatgactgtttcagaggtgcgtttttagaccaagtatgcagtgcacacctgtaatcctagcacttaggttgaggtaagaagagcataagttcaagtttatccttggttacagagtgaatttgggaccagcctgggcaatagggaccatagctcaaaacatttttgttggatggagagatgactccgggcaagagtgcttgttcttgtagagacccgagtcagttctcagcagtcacatagcagtcacagtggctcacagcggctcacagctgtcccacatcctcacagtgcctcacagctgtcccacatcctcacagtggctcacagctgtcccacatcctcacagtgcttcacagctgtcccacatcctcacagtggctcacagctgtcccacatcttcacagtgcttcacagctgtcccacatcctcacagtggctcacagctgtcccacatcctcacagtggctcacagctgtcccacatcctcacagtgcttcacagctgtcccacatcctcacagtgcctcacagctgtcctacatcctcacagtgcctcacagctgtcctacatcctcacagtgcctcacagctgtcctcacccgtttagcaggggtgtcgggtgttgctgtgaaccactggtgaaggaacagtcagtctgcttgagctgtaggtgaggtcgatagagatcttcagagttaattggactgttgaactgcaccaagcattcgtaggtttcaggaacacagtgctgcagggcctcttggttttactaaagggagcttgaagcaaccaaaggttttgaactgaagaaccaaagggcctggtttggcctttaaagtcactttgcctgttttgtggagaacaggctaaaaggctagggaagacagagggacaaactgattacctgcttgcaggtgaccttatgggacagctctccctgggtgagccatggaaagctccccaccatcccagctctggatgtagctgtatcgacaggggaagtaacagcagctcagggtgtaaatgagcagtgtcttctagaagtcctgcttgcagcttttcttcctcagttagactggtgtggaaggagcactctctgactagagcagcctgtaaacctcaggagccttgtcagcagttacagggccactcctcattccgctctgctctccgccgcctcagaaagctcagggcaaggttggcggaggagaggcaagtgggtttgcagtgctctggggtgtaacagagaacgttggaattgaaatgactttagaaatctccgactagaaccttcttgatttttaggtgcagctctgcaaagatgaagtaaacagccttcctagtcattgcagtagattgctggcatagcaagggccctacatgcctcctgcttgcctctgctctcagacattcagtctgggtgtgagtgggccttggtattcatagtcccttctggtgtttacccagtagtgagtgaactccagccttgactttggcaaattccacgaatatgaagtctttacaaacagttgatggtaaggagtttgtgtttcctttgtctagggtcaagtcctccataccaaggaccaggctaaaaccagattacactgcccctccctgggccctattgacttaaagcagccactgtaatcatgggcaatatctttgggaaccttctgaagagcctaatcggcaagaaggagatgcgcatcctgatggtgggcctggatgctgccgggaagaccaccatcctctacaagctgaaactcggggagattgtcaccaccatcccgaccattggtaagggcaagctgaggggaggcaggcaaggccttcccttcccaggcaggttcatacacctctcgggcttcagagagagtgtctgtttaactttggcaggtgctggagctgccgtttgcccacctgccctggccctctgatgggggaacttccttccgcctgcagcctggcactcagcagtgccctcaggcattaggcttggtttgttctctgtgttgtttggaaagcaggtgaagggctttgatgttcctgccagaggcctggaattgctttggtttagatcttcagtagggagaacatttgctaaaaacatggggctgtgggtcctcctcctcagctggggctcctctctcaggcttcccattgcctctcactccactttttttttttgttttttgagacagggtttctctgtgtagccctggctgtcctggaactcactttgtagaccaggctggcctcgaactcagaaatctgcctgcctctgcctcctgagtgctgggattaaaggcatgcgctgcaaacccccaccccccacccccggctctcacgccacatcttagcgtagatatattttattgatcaagggacagaacagagtccttcctttgtagaatggaggaccagagtctgagtgacaggagagcggcggctcttatactatccaggcagctgtgcgccctctgatcagagatcacccttgtagacttcttcaattttccttcctaaaaaatacatacctcataatatataatagaacacacacttttaagtgtgtttatgttttgcatgtatgaatgtatgtatgtatgtatgtaccacaggcatgcatgtgtagtgaacatggaggcccagacaggccctcagacctcgtggaactggagttatggatggttgtgagccactgtgtgggtactgggacttgaaccttggcctttgggagaacaagtgctcttaaccactgagccacatctccagcccttttaagtttccttctaggctccccaggtcaaggacctcaaggtcccagtatccctttagccttctgctattggtgtcccgggtaaagctgaggagagatggcgtgagctcatcaggttattactggtagacctggtatttgaggccagtggccattgacttctttacctcccaaagggtttaatgtggagacagtggaatataagaatatcagcttcacagtctgggacgtaggtggccaggacaagattcggcccctctggagacactacttccagaacacccaaggtatgacagacagagctcctggggttgccattgctgggcttgtgcagagcatggctgttctcttagttatgggtggccatggccagcccttgccctgatgcagctcttggaagtggagaaggggaccgtgcgtctggagggtgtggtgtgggataggaaaggggacactgtcgtcgtctgtgtgtcccacgctctctctgctctccaggcttgatatttgtggttgacagcaatgatcgggagcgagtgaacgaggcccgggaagagctgatgaggatgctggcggaggatgagctccgggatgctgtgctccttgtgtttgcaaacaaacaggtgagctttccccctttttctgcatctgggagagcatcctggctgtgggagtcaaggggccttgggctcgtgggtgaaaggcctggaactactgctgacgggttggaagtgtgaggaggagacgcacttggcttcttcatgctcttctccttgttccccagcccagctgtgtcagcagcatttaagtcctcagggtcgatgtggtagcatgtctgttcaggatctttatcctccctgtactctgtgtactgtagtagagcgagccttgctcctgctgctgaatcacacacacttagaaccctgctcttccctatctaattccctggccctgcagttctggaactactgggcctggagcagttccttcagatcttgatctgggtttcctgagataacgagaaggtggccatatatgcgcctctgacagatgggtgcgctttgtagagccttgacagatgctgaggtatctctctgtgtgtgttcctttgtgctgcaggatttgccgaatgctatgaatgctgctgagatcacagacaagctggggctgcactccctgcgtcaccgcaattggtacattcaggccacctgtgctaccagcggggacgggctgtatgaaggcttggactggctggccaatcagctcaaaaacaagaagtgagagccaggcagccctctctgactaccccacccactcctgacacacacctgctgtctccttaccccaattttcccttcttcctcttgaaagtggccaaggtcctgggtatcatgtccacatgcccagcaagcgccttgccttcctcctcctcctccctcctccctcctccctcctccctccctgtacactgacacggtcagcccccaactgctgtcctgatgatgaatcattccaatttactggatttaaaacagaatgaagctgttacggtttcgtggggtggtccccattggtttcaggaggaagagtggggtgttctctgtttgctgtttggcactggttgctgtgctcttggcatctgagtcccttccctgtgtccctggccactctcctccctgtcttcctttccttctgaaccctctcctattctacatggacattgcacgggcctctctgtgtgtgcgtgcatgtgtgcgcctgtatatatgtgtatagagagatatatatgtagggtcaggggagggagcacagcgcagctcagggcttacagccgggacactgcgcactggaacctgtcccctgcccttctgtgttggtgagataaggggatgtgggtgggtcccgttgttttcctctctgcaggtggcattcctggatgttgggatacatgatgggcgccttcggccatctgtcttacctttccttctccactatgatgagcacacgaagtggcattggtctctgggtgactgttcctaaggagctgccgtgctactctgcctcattagtagcccactcacgctatcagtctagagtgttgtattgatcctcccccaccgtcctcagatctgctcctcaggaactcagagggaggtgggttagtgggacctgcatgtagaggtggacagtggtcggggaaggcctagttttccatcttactgtcataaggaggagaaggtaaggcatggagcagtcctgttcctgccttctggtctgtcagagatctttccccttagtagttctgctggcctgatgaggactgaccaagtggagtaacgagaagccatggactgggggtaacatagccgacctcagtatcaactccctgttcttcagttctctgtctagttcaggaccaggaaagatgagtttctgttgtcctcgatgtcctgtccccctccttcctggcagctttccccagtcctcaccctgtcctgaataggtctgtggggttggagtagatgccgtaggaccctgcatggctgagcctggaactgtgatcttcagggccctccctccctccatcctctgcttgttcagctgctgctgcaggtctgtagagggcgcctattccagaagatctgacctgggtcctgacttgtcactgcactgaagctgtggctgttctgtgggctcctgtgtgtgctggctgcgccctgagctccaaaacagctgcccataacctctctgctaaggtcaggaccctgggctctctgcagcttggccaagggactcttcccagaggcctgttctgagttcctccactcagtggccaggtttcttgccacctttgtctatagcaggcagataggttccccagcctaccgtcagctgagctgtgcgaggttccaggatgtctctcagtgcaagtagtgctgtgataccccagacaccatgtgagcgtgtgctctagacctggtgtgtgtgagtgtgtgtgtgtgtgtgtgtgtgtgtgtaagtgtgagtgtgtgtgagtgtgtgtgtgtgtgagtgtgtgtgtgagtgtgtgtgtgtgtgtatgtgtgtgtgtgtgtgtgtgtgtgtgtgtgtgagtgtgtgtgtgtgtgtgtgtgtgtgagtgtgtgtgtgtgttctctacatgggggtgccagggattctgttccattttaaatgggttccttccattccctgcattcctctctttactgttcctgcgtccccctctgtcgacctcactctctctgccgtttctaagcccctaccccctcctttctgttgctgctgtgagcgcctgtttgccttctccgttcactcaccactttgcctgtttggttttggttttgtcttctgtttgattttctgctctatctttgctttgagattggtgaggactttgcctcttgctctgccacactttctgaccttcctgcttagatgctagttccagataggttttgtacattgcagacatgagtccactcctgcaccccttaccagagcttatttttctccacctcctgggaccaacctgaggctgagcaggctaaagcagccttgaatgttgccttggtgcatgctgctccagacacatccagcagggagcagtagcaccttggtaacatccctggctttgtggggaggtgggggtgctttctacattccctaatccatctttagggttgggtgtttcatcccatttctgtgaactccctctcttgcttttctcaagctggttttattttttatcttgttctacctttctttctggggacttccccttccctccacctccagagtttgtggtgttacagtggtatctgcagttctgaagtgggtttttttctttttgctttctctggaatgtagactgtacatgtttaataacttgccttctctatccttgctcaaaaatgtgggataatgcaatgactgtgccctggttggaaattaaacttgttttacgcagctctggcgcagccctttgtccttgagcaacactgcggcagtagggagctgtgtggtcctttccacaccgttccttttctctgcagaggtgggaagacacacctcagcgcgtggagtcatggcggaacgcaggtttattgggactgcggttatggttccttcttccctcacaccctgaaggaagtctaaacgaatcaagtgctagcatgtgggggctctatgactgaccaactcctaaagagctctgtcctcaatttacctgtatttaccacctgttgacagactttcagggcagcggttctcaacttgtgggttgtgacccctttgagggtcacatatcagatatcctgcatatcaaacatttacatcatgattcataacagtagcaaagttacagtaagcacagggtaaacatctgggcagcatagaaaatggtaaatatctgggcagtatagttttgttttttgtttttttgggtttttttctagacagggtttctctgtatagcctcgaactcagaaatccgcctgcctctgcctcccaagtgctggaattaaaacgcgtgcgccaccacgctgactcatctgggcaggacagtaaacatggggtaaacatctgggcaggacagtaaacacggggtaaacatctgggcaggacagtaaacacggggtaaacatctggacaggacagtaaaccggatgccttcctcagcataaagcagccaggtgcacgaggctgtgtggatcctgttgccaggcagctaactcgaagggatgtcttgggtgcatctttagtaaagcttacattcccgttcctgttccattgctctggtgtctccggctgtcactgaagacaccgttccacacagaggaaaggcgtggtgccgccctcagtaagcagggaaacctctccttcccttgctgcagagcttgagtcccacatcctgccatggactgtttaatctgcactcactgcccctcctttctcccgggacaggtttccttttcctccagttaccgtcaccctctcaggaaccattgctttttgtccatttctctgacttctgaacctcaacccatcaccaaccccgtgtcttcaacattactttccctgaaagtctggctctttgcctcctcctggctcctccaggcttctcctgctaataagttaggagtatctttctctggtgctttgtttatttgttaataaatagatcactttctgagctgtattttgttgctttgttgttgttttgagataagatctcagtatagcccaagcagacttcagacttgtttgtttctgtgttttaagagagggtttctttgtgcagccctggctgtcctggagcttgattcgtagaccatggcatccttgtactcaggtccaccagtttctgcttcctgagtactgggataacggcctgagccacgtcagctgccaccacctgcttgctgacctcagacttgctactctcctctgctggattacaggtgtgtgccagcaagcgtagccttggctgtaatacagtgataatagaggccaggtgtggcagtgcatacctgtaataccagcactcaggaggcagaggcaggaagatctctgaaggcatgaggccagcctggtctgtatctatctgatgcctcatcttcctccctcaaagaaaagtaaataggagctggagagatggctcagtggttaaaatcactgactgttcttccagaggtcctgagttcaattcccagcaaccacatggtggctcacaaccatctgtaatgggatctgatgccctcttctggtgtacatgaaggcagggcactcatatacataaaataaatcatttttcaaaaattaaaaaaaaaagaaaaaaattaaacagtttagctgaatgacagtggatgagtcttgatactagaacaagttggggaagcaggtgactggttcttgcctgtctcttagttccacagattcaggggagatatggggccctctgtggctttgagggggtgtaggatagacggagtgaacctgaagatgagtttgtgtacctgatcatcggagcgaattccttcccatggcttgtaatttgacaaaggacccagatccaggtgtacacgtgagaatcatgtgggtgaggcagcttccaggatgtacctgtaggaaatgagcctctcagctccatccaggtgggggaaaggcaaaactgtccccttcacttcataaggttggctttctcatccttgaggggcagcagttgaaactgctggggacttcacctgccagttcaaacacacacgttcagtcaggacagagagggagcagacacttgccttctctgtattcagggggagctaggcatccgtctcggggtgctgtggaatctttggacatcttggtaatgactgaggaggatgccctgcccttccttcccttctggtcagtgtaaggaatgaggtccctgggcaggttatcaacactaaacaccatctttggtcactctaacccagtagctggagaggtagcataacatggtggtcactggggaatggcggaatccaaatgccttccttcctctgcaggttttccaactgattttcctgaccctgattgttggaattggtaagaatgaccctgagttccggagaaaggagcagacagttagggccaaggacgtggaaacgttgaggatggtaaagagaggacaaaatcagcaaagtagtgagggtccagaatccgaccgttgactgtcaacgctggaaagttaggtgtccgctgtgtggatatcactttggctgtcagctgtaggagagcatgggggcttcagttagagccagtgcgtattctaagctgcgtgtggatacgaacagggcactggaggtacagcttctggacacaccccgggcagttctctacacaggcctcccactaactcaactcacactccaccttcctgagagctagctggcaggcagacaaggcagaaggtgttagactaaacctttcacctacgtgcctccctcctggagtgtagcttactggtagatagatcacttggtaggaagttctgggtttgattccttggtaatgcatatacacaaagcaactatcttggtgagggccatcctaggacagagttgaatactgagacttttaagggataggtttagcttgtggctctgaaccacaggaattcactctggtttccaaatacagcaaaaagagcatactgctacagcttatagatgagatgggaagctctgtcctgtctgccacgccatgcagtggtggagtgctagcagccgcagggtttgggagcagactgcttcatttttggatgatcgagtgtctaaatcacacctaaagaggccagtctgtggggcatgggcttcatgagttcaaagttctgcattccattcatagtactagaaaaaacaacaaatgcacagtaaggccctgattcagtccccggtggcagagagggtttttggaagctgttctctttttacacctggctgtggtgtggcagtctgagaactctgctgaatcctgacacttgcaaaaggcgcagggcttttgtggatgtggttgtccacttgtgccctcctgggctgagccaggccagctttcttgtctctcagaatcacaattcaagttcctctttggttcaaccgaaaggattcctcctcgacccttactggagcagtcagtaaattgacctgggtaggttgggtcttctggtttttatttttgaggtggggtctgctggcctagaacttgctccgcagtacaggcgcctctgctgctcttctgaagttcaaggcacagcaccatgcccagcctctcggtgggctactgttggaaatagcctcaccctttccttcccaccctcttcgtgtgccttacagagcctcagagcctagacaaccacctccccatttgccaccactccggttagccacaggttctgtgctgtgtgtgagctcctgtgttcagacacggtgttcctgtggagttctctgcaaccggctcttatcttcccctccgttggcctctctctgcttttgtattaaccatgctggcccctaatctctagacagctggccctttgcttttaacccttcctttctgtgttggctaaaaaccccacattaaggaggccaggcatggtgtcttgggccgttaatcctagcacatggtaggtaaaagcaggtggatctctgtgagttcaaggctagcctggtctacagagtgagaaatgcaggattagagagaccctattaacaacaaacaaatcaaacaaacaaaaaaagaaagtccacatcaaggctggggctatagctcagttggtagagtgcttgctgagtgtggtttcattatctagcactgcattaaaaacagatgctataatgtcagtacttgggagtgaaggcaggaggatccggaattcaaggccagccttggctaacctgggaaacatgcgactatctaaaacaacacaagagagtgccacacgagacgtagctcaggcctcagctctttcacacagttcctgggtttcacaggccaacttacttaccaaggcacctttggctctgagggcgcactcacttaagtacctcacatggaggcttttaggtcagcggttcccagcctgtgcgtcaaggtccctctgggattgtttatcggataccctgcgtatcaggtacttacttgtaaccggaggaagattacagttaggaagtagcaatgaagggatttcatggttggggtcagcacagcctgaggaactgtgttacagggtcccagctttaggaatggtatgaacctgtcaatcacatcgattcagatcacatgttttgcttgtgtagccaagcagccgttgttgtcagtgctccatacaatgcacagatatgcacgaccgcatgtgttgtcccctgactcttcccatccccaccccaaacccagccatcctcagccacttggggtgcatccattgggttcctttattttttaagaggtctcaaccaggtggagtggtgtatgactttttcatttcagctctcacgaggcagaggcaggcagatttctatgagttcaagaccggcctagcctacatagcttgagttccaggccagccagagctacaaagagagagagagacctgtccctcccgcccctcccccgcccaaaagacatcagagctgaaattgctgcttggcagggtgcagtgataccctcagagtcgctacacaccaggtccatgctccctgtctcaaaatggggtgggcagagggagagaggcagggtcttgtgtgtccccaggctgacctatgaactcattgattatgtagctgaggagaccttggacttgtgatcctctcacttccacctcccacgtgctgggaagacagctgtgttcacgagcagttagtgctgtgttgtggctgcacccagggctttaggaggcatgtgaggcaagccctctactgagctcatccccggccctcagtgcagcccttgctttctgaatatatgcaccaaacgtatttggggaggggttaaaacacagtaagttcacaccacagacagtattttacttaaactgaagtttatatatctgtcttagatttttatgtgggctggtgagatggctcagcagttaagagcactgactaaagctgggcgtggtggtgcacgcctttaatcccagcactctggaggcagaggcaggcggatttctgagttcgaggccagcctggtctacaaagtgagtaccaggacagccagggctacacagagaaaccctgtcttgaaaaaccaaaaaaaaaaaagaaaaaaaaaaaaaaagagcactgactactcttctgaaggtcctgagttcaaatcccagcaaccacatggtggctcacaaccacacgtaatgagatctgactccctcttctggagtgtctgaggacagctacagtgtacttaaatataataataaataaatcttctaaaaaaagatttgcatgcagtatagttaaatatttaaatggtttctcatttgatacttcaacaatttgttcaaaataaaacatttggctggatgtggtttgaatgcttatagttccagagcgtgggagatagaagggggaggagccagttcaaggctgagctagggagctgttccacaggaggtgccggccaccaggccatactgcctgagttctattattgaactcactatatagacccagctgacctagaactcagagaaccacccccacctctacctcctgagtgctgggatgaaagacatgagccaccattacctgccaccaagttttgtttttgttttagagtttaaggcagctcggctctgaggttagcccacttgtccagtatcatgcagctagtgcctagggaactctaagcatgtcacacgttgtccttgtccagtgagccagctggctctttgcgggacacacagtaactaaacaagggaaagagtagtgagtgcttctttctattcagagggaggggaagttgctgttagctaagacagtcaggactgagaaggggggggggggtttaactctcctggagggagctgagaggtaaagggaggggcgtgaggtagaacaagccgagaacacagggcaggttggtctgactccagagcacagtgcaggagcccggaagttgactcagttcagttagcaagtattttcacacaaggcgtgaacactgaagacaaaagcaagagacacagctctatctctaagaagattttcagagccaagatcgatggggcacacctgttatcccagcacttaggaggctgaggcaggaggatcccaagttcaaaaccagcctggacttgttttaaggaaaaaaaaaaaaaaaagacttccagtttaataaatgaccaattcaggaatggagattagggctggatgacaagtttttaattgtcaaggactcaattctgtttatcagttggtatggaattatgtaagcttttagcgatatgaccgcacggagcagtatagagagtgatctgagagacgcttgggggtcaggatggagatagaactccctctctattagaaggtgtttggtggtaggtaaccctgggctagcatggtgggtctcttcttacttaggcttccatctttgtggttcaaatccaagaaggacctgcgttccctccctccttgtgatcagctgattgctagagcataactcatcttaacttctcatgtactctccgggtacaggaagggagggggcccactgctgacagtggagcatgaaacgaccggcttcctgactatgttggta

SEQ ID NO: 714 - DNA, 777 bp, Mus musculus
tcaccgcggtcgggtcggcttgcggagcgggaggcagcggccggagagccgggcggaacctgcgggggcggaggcggcggtggcagccgcggcgcagggagcaggaacagggtcaagtcctccataccaaggaccaggctaaaaccagattacactgcccctccctgggccctattgacttaaagcagccactgtaatcatgggcaatatctttgggaaccttctgaagagcctaatcggcaagaaggagatgcgcatcctgatggtgggcctggatgctgccgggaagaccaccatcctctacaagctgaaactcggggagattgtcaccaccatcccgaccattgggtttaatgtggagacagtggaatataagaatatcagcttcacagtctgggacgtaggtggccaggacaagattcggcccctctggagacactacttccagaacacccaaggcttgatatttgtggttgacagcaatgatcgggagcgagtgaacgaggcccgggaagagctgatgaggatgctggcggaggatgagctccgggatgctgtgctccttgtgtttgcaaacaaacaggatttgccgaatgctatgaatgctgctgagatcacagacaagctggggctgcactccctgcgtcaccgcaattggtacattcaggccacctgtgctaccagcggggacgggctgtatgaaggcttggactggctggccaatcagctcaaaaacaagaagtgagagccaggcagccctctctgactaccccaccc

SEQ ID NO: 715 - protein, 186 aa, Mus musculus
LKAATVIMGNIFGNLLKSLIGKKEMRILMVGLDAAGKTTILYKLKLGEIVTTIPTIGFNVETVEYKNISFTVWDVGGQDKIRPLWRHYFQNTQGLIFVVDSNDRERVNEAREELMRMLAEDELRDAVLLVFANKQDLPNAMNAAEITDKLGLHSLRHRNWYIQATCATSGDGEGLDWLANQLKNKK

SEQ ID NO: 716 - DNA, 41197 bp, Homo sapiens
  misc_feature (1)...(41197): n = A,T,C or G
agctgtggctgtggctggaagggcagtggtgagcaggatcggctgagggccaaactgctgcagctgcaggcactgtcccgaggcaagagtttcccccactctctgcccagccctggccctggctcaagccccagccctggcccccaggacacatgggaatggggtggctgtaaccatgacatggactttggagagaagttctctcgggatttcttggattccagggaagctccccgggacatccaggcacgaatgcgaatccacaacaacagggtggggcgccaggtatgtgtgtacatcttgtcctgggtctccccagcttttgaggcctggttagagtttgagaggcatagggaaatgataggataaagtgtgatgagtgactgacactcaccatcagcaagtcacccagcctcagttttgtatctgtaaagaacctaatgatacttatcttacaatgttattaagactgagctagcaggccagtgtggtggctcacgcctataatttcagcacttttggaggctgaggggggaggattgcttgaggccaggagttcaagaacagcctgagcaacgttgtgagaccccatctctatatttaaaaaaattatacatataaaaacagactgggccgggcgcggtggctcatgtctgtaatcccagcactttgggaggctgaggcaggcagatcacctgaggtcaagagttccagaccaccctggccaaggtggagaaaccccatctctattaaaagtacaaaaattaggccgggtgcagtggctcacacctgtaatcccagcactttgggaggccgaggcgggtggatcaagaggtgaggagatcgagaccatcctggctaacatgggaaaccctgtctctattaaaaacacaaaaaattacccgggcatggtggcatgtccctgtagtcccagctactggggagactgaggcaggagaatcgcttgaacctgggaggcagaggttgcagtgagcctagatcgtgccactgcactccagcctgggcgacagagcaagactccctctcaaaaaaaaaaaaaaaaagacaaaaattagccaggcgtggtggcctgcgcctgtaatcccagctactcagtaggctgaggcaggagaatcgcttgaacctgggaggcggaggttgcagtgagccgagatggcaccactgcactccagcctgggcgacaagagcaaggctccgtctcaaaaaacaaaaacaaacaaaaaaacagactgagctagcaaatagtatacccagcatagtgcctcatcgttggctgactgcatagtagctcttattacagctaccttccctacagaatttaggcatgctgtgggccagactcccaattttataagtgcttacaatggaaagagcactggattgggagtcaggacaacttgagttgagtcttggctctattactagctgttgatggaagatggacaaatcacactgctctgtcttcaattctgccatcataaaatgaggaagttggctattagctaactgcaatgtcctttctgttctgatataccatgttattcttgcctccatttgtccctccctgtgttctctgttcccttccctctcctgtgcctctgtgttctgtccatttgctgccctctgcttcacctcttttccccctgatgctctaggtggtaactgaaaacctgaagcggaaatgcaagtgtcatggcacatcaggcagctgccagttcaagacatgctggagggcggccccagagttccgggcagtgggggcggcgttgagggagcggctgggccgggccatcttcattgatacccacaaccgcaattctggagccttccagccccgtctgcgtccccgtcgcctctcaggagagctggtctactttgagaagtctcctgacttctgtgagcgagaccccactatgggctccccagggacaaggggccgggcctgcaacaagaccagccgcctgttggatggctgtggcagcctgtgctgtggccgtgggcacaacgtgctccggcagacacgagttgagcgctgccattgccgcttccactggtgctgctatgtgctgtgtgatgagtgcaaggttacagagtgggtgaatgtgtgtaagtgagggtcagccttaccttggggctggggaagaggactgtgtgagaggggcgccttttcagccctttgctctgatttccttccaaggtcactcttggtccctggaagcttaaagtatctacctggaaacagctttaggggtggtgggggtcaggtggactctgggatgtgtagccttctccccaacaattggagggtcttgaggggaagctgccacccctcttctgctccttagacacctgaatggactaagatgaaatgcactgtattgctcctcccacttctcaactccagagcccctttaaccctgattcatactccttttggctggggagtccctatagtttcaccactcctctcccttgagggataaccccaggcactgtttggagccataagatctgtatctagaaagagatcacccactcctatgtactatccccaaactcctttactgcagcctgggctccctcttgtgggataatgggagacagtggtagagaggtttttcttgggaaagagacagagtgctgaggggcactctcccctgaatcctcagagagttgtctgtccaggcccttagggaagttgtctccttccattcagatgttaatggggaccctccaaaggaaggggttttcccatgactcttggagcctctttttccttcttcagcaggaagggtgggaagggataatttatcatactgagacttgttcttggttcctgtttgaaactaaaataaattaagttactggactggtggatgcagatggtgatgtatgtacccacacttgggatcccagtccatagcttcttttctaggtgaattctcctaccttcctacactcagtgactttatgtatatcctgctgagttccgcaaaggatttgaaatgaatctcagtgactttgttggcaacttttcctttgtaaaaccaggaaggactcctaggtgggaagggctagagttccagatgtaggccctattgactctctatgcgcctcaactccagatttcaccttgatcactgccttagaacaagggctggcaatttttttgttttttttcggtaaagggctggatagtaaatacattacacttgtggtctttgtcccaactattcaactctgccacaactactcaactctgctgttatagatcaacagcagccatagaccacacataaacgaatgagcgtggccgtgtccagtaaaacttcattcacagaaatgggctgcaagaccaaatttggtcccctagctgcagtgtgttgaccctcattctagaccacgaggttgcctttgttctggagtttttcagtcctaaatgtatctcaacactgaatttggacccaaaagaacaggtacttttttctctggttccaaaggagtgaacttgggatatagatgcaagactgatgggaaacgtataaaagagattcatatgcttgaaatgggagtttttccctctggaaactagcaaaaccagcatgttctctcatggaattatttgcatgttttttgtccttatttatttgattgagacagggtctcactttgtcacccaggctggagtacaatggtgagatcttggctcattgcaacctcctcctcctgggttcaaaccatccttgtgccttagtctcccgagtagctgggattacaggtatgcattaccatatctggctaagttttgtatttttagtagagatgggttttcgccatgttggttggccaggctggtctcgaactccttgcctcaagtgatccacacgccttggtctcccaaagtgctgggattacaggcgtgagccactgtgcctggcttatttattattattattttttgagacaggatctcgctctgttgccttggctggagtgcagtgacatgatcttggctcactgcaaactccacttcttgggctcaagtctgggtccaagagtagctgggactacagacacatgccaccacacctggctaatttttgtgtgtgtgtgtatttttttgtagagatagggtttcaccatgttgcccaggctggtctagaactcctgaccttaagcgatatgcctgtctaagcctcccatgaccttcctcatttagagctcttttgtatgtcatcttagtaaaataattcctttatcttttaagagataacatcaactcaacagaacaggatttatttttatttatttatttttgagatggagtttcactcttgttgcccaggctggagtgcaatggcgtgatcttggctcactgcaacctccacctctctgattcaagcgattgtcctgcctcagcctcccaagtagctgggactacaggtgcgtgccaccacgcctggctaatttttgtatttttagtagagatggggtttcaccannnnnnnnnnnnnnnnnnnnnnnnnnnnnnnnnnnnnnnnnnnnnnnnnnnnnnnnnnnnnnnnnnnnnnnnnnnnnnnnnnnnnnnnnnnnnnnnnnnnnnnnnnnnnnnnnnnnnnnnnnnnnnnnnnnnnnnnnnnnnnnnnnnnnnnnnnnnnnnnnnnnnnnnnnnnnnnnnnnnnnnnnnnnnnnnnnnnnnnnnnnnnnnnnnnnnnnnnnnnnnnnnnnnnnnnnnnnnnnnnnnnnnnnnnnnnnnnnnnnnnnnnnnnnnnnnnnnnnnnnnnnnnnnnnnnnnnnnnnnnnnnnnnnnntgagactcccgttctcaataaatacatacatacatacatacgtaaactgttttcttcctttcttcctttctttttctttctttatttcctttctttctttctctttctttctttcttcctttcctttccttcttctttcttttctttcttttttttttttttttcatacaatgtcttgctctgtcttccaggctgagtgcaatggctcaatcttggctcaatgcaacttctgcctcccaggttcaagcgattctcctgcctcagcctcccaagtagctgggattacaggtgctggccaccacacccagctaatttttgtattttttatagagatagggtttcgccatgttggccaggctggtcttgaactcctgacctcaggtaatccatccgccttggcctcccaaagtgctgggattacaggcatcagccaccaagcctggcctaagctgttatctttctaagattcaatgcagacaaggaatatgcatcacacatttagaacttcacaaatgactgcacacttatgcagctgccagatgctgactctaacagattatttctttggccagagaatgtagaaatagttctctccacttctctagacaatagacacttctgctaccctcaaaatcagatgaaatgagagtagtaccaaggtagtgaggacattttgaggagtattaggttagggcagtacttttttttgttttttgagacagggtcttagggtttctgtcacccaggctggagtgcagtagcgtgatctcggcttactgcaacctccacctcctgggctcaaccgatcgtcctgcctcaacctcttgagtagctgggaatacaggtgtgcaccaccaggcccggataatttttgtatttttagtagagatggggtttcgctatgtcgtccaggctggtcttgaactcctggactcaagctatctgccctcctctgcctcctaaagtgctacggttacaggcatgagccactgtgcctggccataggacagttttgtttgtttgttttttgtcttatttttaagagacagagtcttgctatgctgcccaggctggtctcaagctcttggacccaagcaattctcttgccttggtctcccaaagtattgggattacaggtgtgagccactgtgttcagccagtactttttttttttttttttaatttagagtcagtgtcttgctctgtcactcaggctggagtgcagtggcaagatcactgcagccctgaactccttgactcaagtgaacttccagccccagcctctcagagtgttgggatttacaggtttgagtcaccacactgggctctagggcagaactttgtggccaaattttatgtcctggatttccacttgagcattgagaattctgggtttggaaatttgatggagacaggagaaatcccatccttacttcaggcacttactgaacctagtgtatgtggaaggaagaggggatgcacttagaatgggcataggatataagagaataatgataaagaatatttataatcagaacttctcacactcaggacgaggaaggagaatctctaacagagtcacagcatgattatttcagctttttcctgtttccttcctctgtactttgggtccctctttcctttctagcgttccctcttccttcatcagacacactgtgtggcaaacttaagccccaaaccacaaccttgacaaattccaaatggattttgtcagcaaggccaacacaccccttcgccactccctatccctgctcctagcacatgcactggggtcagcgacagggttggagtatgcaacccacagagctggtggctacaatttcagcttttactaggctccaatggcagccagagggagggagaaaggctgatgaactgtaagacgggcctcttgtccctcttcagctccagatgagttctactcctgctggcctttaccaagtggctgggaagttagggaggggcagtggccagctaattgccagctgggcagcactcctcctatctctgctcctgtttgctccatgggcagcgcactctgatgctgcaacagacgttttcttcttcagactccagacaggtgaaggacagaagcgctgggagattctctagtcccattaatcagtcctgactgacataccatggtacctgctgcttactacattagactgtcaccatttccatctttctattgcactggggataaaaccttgagaagatctgaagcactgggcaggaatatcaacaggttccacctccttgtctgagttccacaggcatgtgcacgtggtaagggcactagggaggttttataaatcatagttttggtggacagcatggtgggataacctggtggagtgttactagaaatttctagagaaataaatgaaagagtaatcacatggaaatatcaaaaaacccactctaggagtaataatactggaggaagatccttttgtagttcataagcataatgactgggtgcttacacacatgtgagatgtgccaccctcaaaccttgttacattggcacactatccatttgacatgaacaacaacaacaaaatactggaggtgtcttttgtccttaaaaacacagagctgggctaggcacggtggctcatgcctgtaatcccaacactttgggacgcctagatgggaggactgcttgagctcaagagtttggcctgggcaacatggcaaaaccctgtctctacaaatagcataaaaattagctgggtgactgggcatggtggctcacgcctgtaatcccagcactttgggaggctgaggcaggtggatcacctgaggtcaggagttcaagaccagcctgaccaacacagtgaaaccctgtctctactaaaaatataaaaattagccgggcgtggtggcacatgcctataatcccagctacttgggaggctaagacaggagagtcacccgaacacaggaggcagaggttgcagtgagcggagattgtgccattgcactccagcctgggcaacaagagcgaaactgtctcaaaaaaaaaaaaaaaaattagccaggcatggtggcgtgcacctgtagtcccagctacttgggaggctgaggtggtaaggatcacttgagcccaggaggttgaggctgcagtgagccgattgcgccactacacgtcgtactcagcaacacagcaagacccagtttctttttttttctttcttctttttttttttttgagacggagttttgctttatcgccccggcttgaattcaattgcccgatttcgggttcattgttggttcaaattccgggtttaaggcattttccttgattaaccttagggattatttgggcttttaggcccttgcaccaaggcttgctaaattttttgaatttttgttagagacgggtttccccgtgttagccaggatgttctcgatctcttgacctcgtgattcgtgatccgcttgcttgggctcccccaaagtgctaggattacaggcttgagccaccgctcccggccaagatccagtttcaaaaacagaaaaaaaaaaaaaagcaagaaacaaacaaacaaaaccaccaacaaaaacacacccgacagaactacccagcacagtggcacatgtctataatcccagctactcatgaggctgagacaggaggacacaagaacccaggaattcaagactgaagtgtgctatgatcgctcctgtgaatannnnnnnnnnnnnnnnnnnnnnnnnnnnnnnnnnnnnnnnnnnnnnnnnnnnnnnnnnnnnnnnnnnnnnnnnnnnnnnnnnnnnnnnnnnnnnnnnnnnnnnnnnnnnnnnnnnnnnnnnnnnnnnnnnnnnnnnnnnnnnnnnnnnnnnnnnnnnnnnnnnnnnnnnnnnnnnnnnnnnnnnnnnnnnnnnnnnnnnnnnnnnnnnnnnnnnnnnnnnnnnnnnnnnnnnnnnnnnnnnnnnnnnnnnnnnnnnnnnnnnnnnnnnnnnnnnnnnnnnnnnnnnnnnnnnnnnnnnnnnnnnnnnnnnnnnnnnnnnnnnnnnnnnnnnnnnnnnnnnnnnnnnnnnnnnnnnnnnnnnnnnnnnnnnnnnnnnnnnnnnnnnnnnnnnnnnnnnnnnnnnnnnnnnncttagggaagagccatgtgttcattcccttatactgctgtaaatgaggagagagggcacttagagaaccttctattggccgggcacggtggctcacgcctgtaatcccagctactcaggaggctgaggcaggagaatcgcttgaacccgggaggcagaggttgcagtgagccaagatggtgccattgcactccagcctgggcgacagagtgagactcttgtctcaaaaaaaaaaaaaaaaaaaaaggaaccttctgttcttagcattactagtgcccttctatcacagctatttttgtttcaaggcagttctgcatgtctagaccaggtgcaaaacggagtgtgagggaagtaggagtgggtaggaagcaagaaatatgggtgcaaagtccttcacctttccttgggatactaaaatccctactcatctaggcacacttcctcaaaccacacttctgaatattaggtttccactctccgtctttcaagttccaacttaactggctcagagtccagctgttttcctttagcctcttaagttcatcactctccttcctcttccttatgggaaaggatctcttgattcagaccccacagtaatctagtctcaggaatagtgagcaacaacaatggtgcggtgagggctttcaggggatggcagctagcccagattaagaaataaagatgaagtctggctgggtaaggcatgccacagcaacgactgttcacccatatcccgatgctggctttgcccaaggagcccctgggcccctcagcccagcccgtctcctacgcagccaacttgccgcctcagtccttaaattccaggcacaaccctggagcttgggattgtcacctcagtcctcactgtctcatccccattcacggctcccgcctccgccgcccacagcccccacacctgcccccgccctgactccagctccagcgcccggctgccggtgctgcagccgctgccatggtgatgggtctcgcgagaactgccgctagctaccgcgcagctctcgcgcgatcggggaggtgggaagtatcccgggctgggggtgggggtacgccgcacagctccagtcgccgtcgcggcttccggtgctaggtggagggaaggaaggagggagccggggagtgggccagggcagcagccgggctgaagtcggcttggggagccagagggagcggagcggaacctgcggggcagaggcggcggccgcagcggcgcagctgatagcaggaacaggtgagaggctgggaagggaaggcgggtcccggtagagaagaggctcggtcagggtgagggctgaggagatagagcgcctcccgggccccgcccggcactgcttggcgtggggcggtgggattcttcccacccgagagctcagagagggtgcgtcgggccagcttcacgcctgcccccgcatttgaaggacgcagagctggggtgggggtggggggcgcacacggatttgtcctccgcctcgctcaagggggcgacctgggctgcagttaggttgtcgcctgcaggaggtgtgctgttgagggagaggaaaaccgtccgaggagaggtgatgagggggcggtgatggctgtttgtatcttttctgttaaagggctagggaatgctgctttcttctactccctctccctcccccaccttagcaataggagacgggagagaagccttgctgtggttacaccccctcccccatcatagggcaggggtgcgtaggggggttgggggttagccaacagggcaggctgctggggcaccacatgggcgctattgtggtagaggttgcgctttcgagtctagggaaccgcaggttgggaagagggcagcaagtggggagagggtggagaggaggcaggagaaggaggagggggatctgatcttcctgggaggagagaggtggggccttcctccccaggcggagcgggggcggtctcacaggaggagggagcatcttgtcactggccctcagtttgtgtcttccaatccgctttctttctttaggaagtaccaggattcccggaacagaaaatggagccattgcttacgcgaatcgtttgagggaaggggcgggagttggggaggtggagttccctgttaaaacgggccacttgattagcaaagtggtagctgttattttgggggaattcccgtcttgattgcattaaggcgggtctccatctttccaggccaggaggaatgtggtggtggaggtggaggattgtggtatgtggtcaggagtgagaagaaatagtaaggccgtcccggtgagggagaaatgtaacctaaaacctgtctctgctgttgttggattgggtcacccctggtctatggcatgaaagttttattgggaggagatctgctgcaagagtctgattgcttgggtcagtgcaacaggacagaatctagtcgctgcatacctccttccctgtcctcaatcaggtaggtagtaacagtctttgctgccattttgtcttgggcttgttgttggggtaggtgtttccacttgccgtgacttgggacatgggacagtgttatgggacagtggattatcatagcccattggacttgagtttgaaaaacatgtctgtaaaagttcattctaagaaagaaactaatccattaaggttcagcttttcaccgaatgaatgattgaccttggattcagccaggaaaggctcccatgtatcacatattcacatgcgtcctgtttcccagcatagaattattaccttgcatagttagaatttttatagttgtctatcttgcttttccaaagagactagacgcttttcgactgcaggaactggatttcgtctcctcttccacaatgcccatgcaaacagtaggtacccatgatgaatttagaatgtaaatagatagaactcaacaagctttctaactgtagtttaaggaaagggcaagagatggcttggctgtcagcagaagtgcctggaaatagcttagcaagggtacaaagacccttagcctttgtaattaagaagtttttgtgtctctgccttcctaagaggcacagaataggcatagataatggaaacttaagacccaaaaagaaaaatattactagaacacagagtcattatctgcagtcccagatttcctgcttccccattgtgggcaaaggggtctctccatcagacctaagtctttcaaagtgttatatatgaattgggatcctggagagtttggaggagggaccaatatatgtatatgtgtggtgtcaggtacagaattggtaccagtgaatggtagctgctattattatactgaatgcaagtataaaggagagcagactggaaagagtggaagtgagtgaaatactaagtgcacaaagagtcatattgtagtgtgtgttcaccctactcttttacactagagtcataataagaggaagtggactcaggatagagggtgggatttattggttagaaggaggaacttctttaaaaccaggttggttaaagttgagtatgtaactgaaggaaattgtagaatctgcttccctatatacctttatttttatccacccaggctggagggcagtggtgtgatcataactcactgcagcctcgagctggcctcaagccatcctgtacttcagcttctcaagtagctgggaccacatgcgtgtgccaccatgcccagcgaatttttttttttactttttgtagagatctcactgtgttgctagggctggtctcaaactcctggctccaatatatcctcccaccttggcctcccaaagtgctgagattacaggcatgaaccaccatgcctgaactctcctcaccatttttgttgaggtaaatttagaggcagaatggtatagtaattaagagtggatcttggaatcagacaaaattagattcaaatcctgcttctgctaattaccagttgcatgtttcttgtaaaattgcttgtcttctctctttattttcttcatctgtaaagaaggtaatgacatatggttttcaagagaattattatttttttggttgtcagtagaattaaatgagataaatgtaaagcacctggtattgtacaaagcatatagtaagtaccaaataactgttagctgctattaataatccattatcataatcctaataatatgaacactcagggctgccttagaggaaaagaggtttacagaagaacaacttgctgcctgaggtgcttgtgtagagggatgattgttaccatgagtttctgtgctggtcgtaggcttatgagcagcgaaatcttttttcagcttcagcatcagcatcgcagagacagctcctgctgcctgagtgggaggtgaagctggagcaaggcaggggccctgaaccatcaatttggatgtagggtgaagatatgggggcacaagaatagtattcatattagaaaagtcagtgtgactctgagataatggttcactcttccagaaaagagcaccctgatgacctaggtcagggatttagattcctagatgcccttattttaggtctcagtcagtatatggggatcttcatttagtccactcttttcatttagtccaatcttaataaaaaatgtctgcttttgagtatctgtttcagaatatcatggcctagaaattgtgatatctgtagaattatctgtctaccgtaccttcttcacttgaacatctgttgcaaatatagatagagtgctaataaaactatttgataatgaaaagacatgaggagcgtttggaaagggtcccacagatgtttgaaggtttcatattatagtctggtaaagaactgactaaagtagggatttcatgaatgtgttagagctttaccatggacttatgcaaaggatctgccacaccatgtggaccagaaaggaaatggctcagaatgttagagatccaccattattaccatattcctgaagaaagttgagatgactgggtgtggcaggtctcttggtaccttttagttctcccattactgctgaaagcctggcataatccttcctttattagcttatgcacaggagtgtcaagcgtgaatgcttaaacttcagcatgagcttaagatgtaggagagcatttgctctctgttgcaatggtttatgtcctttttttaaaaaaaaaatagtcaaaccttaaataaaattttatttgaattctaatacataaaatggacaaaagtggagttactctctactggtggtggaaaatgggggtggggtataattacagcccctcacatgatctctcctctcttcaagcagaacctgtgggctctgaggacatggaaaccatttcttcagtttgtcagatacagggaaaaggatcagagaccacctatagaatacagtcttcttcaaccccacaagtgttttgccaccctcagtagaaccgttctcaacacgcctgtcagtcactagctataggtcagtcattggtgctggatgctggagacgtgaaatatgaataaggcatagtctgtgctggcaaagagctcacagtctagtgaggtactttccagcctttttctcatcatggtatacacaaaaaatggtaatagtgagacttgaaatctgagatggctggcccaagggctgtagccaccccaagccctgcccagccatccagtggctgataggatcagtatctccagctgacctgtaatgcactagaggcacattgggcagttgcagctctggaaagcaaaacagacaaacgtgaatactgcagcaagtcctagagtagaagtgtgtttgggatgccgagggatcgcaggtaactcttattccctaagtaggcagttctctgttcctctgtgtccttaggctgctctgtataatggttggccttgtccacatcatgtcttcctgtttaagcagtttactgtcagctccatcttgacttgcacaatgggaccagattaggggcagaagattattaggagtctaggctattgatggactttcagtgattttgtgattaggaatttatagtgttctggatatccaagactgtagaggtgggcattggattggtacagccatagaatatcaggagctgtagtggttgtaagctggtcagattctaagaacaaggcaagctgtaatttttgggcagagggcagtaccacagaatgttccaaagaaacaaatgagtctagtttttatcttgtcactgttttatctgactaggattctaaaacagaccttgtcatcttttctgactcacttgctaagggttgtctgtggtaaaagccagacccttcccaggcgttttgggtctccatcagacagggcggttcgggatccttcttcacttcacagctgtggcgtccttcaggtttgcgtgtcctggagtcttttccaggattgttctttgcctagatgggaagctggcataacaattctggcctgagcctaaacaccactaattgagctaataggaacttatttagttaggtacgttttagtttacaccaaaactctagctttggatcctccctcttttcttttgtatgttctatccccattggtgtctatgatgtcttgctctcttgatttcccttctgcctctctggttgcttcttattctttcctggcctgcttttctgcccgctattttatttatttatttatttattttaattagtttttttttttgagacggagtttcgctcttgttgcccagcctggagtgcaatggcacgatcttggctcacagcagcctccacctcgcaggttcaaaccattctcctgcctcagcttatggagtagctgggattacaggcgtgcgccaccacgcctggctaatttagtacttttagtagagacagggtttctccatgttggttaggctggtctcgaactcccgatctcaggtgacccgcccgccttggccttccaatgtgctgggattataggcatgagccaccgcgcccggcctatttattatttatttatttatttatttatttttgtgatggagttgcgttcttgtcaccgaggctggagtgcaatggtgcaatctcagctcgctgcaaccttcgtccaccacctggcttcaagcagtcctccagtcttgcctcctgagtagccgggattacaggaatgccccaccatgcccagctaattttgtatttttagtagagatggggtctcaccatgttggccaggctggtctcaaacccctgacctcaggtgatccgcccaccttggcctcccaaagtgctgggattatagctatgagccaccgcgcctggctcccactactttaaatgttgaaatgtcaggcaggtttctgcctttgcccttttcttctatcccactgtgtacactatccctagatatatcagttaggatgtattagttgcaaaaatagaaaacacacgtgtctaaaacgctgagaggatttattaaatcatatagcaagacatctagtagaaaggcagacataggccgggtgcagtggctcacgcctgtaatcccagcactttgagaggctgaggcaggtggatcacttgaggtcaggagttcgagaccagcctgaccaacatggtgagaccctgtctctactaaatacaaaaaattagccgggcgtggtggcaggtgcctgtaatcgcccagctacttgagaggctgaggcaggagaatcggttgaacccaggagatggaggttgcagtgagccgagattgcgccattgcactctagcctgggcaacaagagcaaaaactccgtctcaaaaaaaaaaacaaaaaggcagacacagaagaacacatattgtacaattttacttctatgaagtacctagagtaacaaattcatagagacaggagaatggtggttgccaggggctggagggacagggggattggggatcctctgtttaacaggtacagtttcagtttgggaagattaaaaagttgaggtgatgaatagttgtgatagttacactacagtgtgaatgtacttaacgctactgaattgtatacttaaaaaaatggttagaatggtaaattttgtgtatattttactatgatttaaaaaaaaagaagccagtcgggtacagtggctcatgcctgtaatcccagaactttgggaggccgaggtgggcggatcacttgagcccaggagtttgagactagcctgggcaacatggcgaaacttcagttaaacaaaaattagccaggcgtggtggtgcatgcctgtagtcccagctactccagaggctgaagtgggaggattgctcgagcctgggaggtggaggctgcagtgagccactatcacgccactgcactccagcttgggtgacagagcaagacccatctcagaaaacgaaagatgccaggcgtggtggtgcatgcctatagtcccagttactcaggattgcgtgagcccaagaatttgaggctgtagcgcaccatgagggcacctgtgaatagccattgtatttcatcgtgggcaacatagtgggaccccatctctaaaaaagaaaaagtttagtttaccagcttgatactgtaattaaggacccaactgagtttttcccatttttctgctctgacatcctggagtttttaatgtctgtctccctctctttatagtctccagattattctagcttctcatccttctacatcatcaacatccaaaggctggacaagagaacattgccataggtccttttctaagattgaggggccaggcacaatggctcatgcctgtcatctcagtactttgggaggctgaggtgggaggactgcttgaggtcaggagttcgagaccagcctgggtaacatagcaagaccttgtctctacaaaaaaactttaaaaattagccaggcatggtgatgcacacctgtagttctagctacttgggaggttgaggtgggaggatctcttgagcccaggagatggaggctgcagtgagccatgatcatgccactgcactctagtctgagtggtagagtgagactctgtttctaaaaacaacagtaataataaaaacaaacatgttcaggccaggtgcagtggctcatgcctgtaatcccagcactttgggaggccgaggtgggtggatcatgaggtcaagagatcgagaccattctggccaacatggtgaaaccccgtctctactaaaaatacaaaaaattagctgggtgtagtggcgggcgcctgtagtcccagctactcgggaggctgaggcaggagaatggtgtgaacccgggaggcagagcttgcagtgagccgagatcgcgccactgcactgcagcccgggcgacagagcgagactctgtctcagacaacaacaacaacaaacaaacaaacatacatattcaccttcagatctgttcctcttgtattttctttctgaagaaatgccacccggccctaggccagaaacctgggaatcatctttgattattctactcttctgcgtacatttaagcactcattaaatcctgtggattctaccattttgatgtttcaaatctgtcctcttctctctatctccacttgtagttgacaacttgcgatttctcacctgtattactatacctcctaagcagtgtctgtgcctccagtctttcccctttctaatttactcctgaaacttctaaagcacatacctgatcacgttactcagcatggcctttaaagcccttcatgatccagtccctgcttatctctccagccccatccctcatcattttctttctttcttttttttttgagaccgagtctcactctgtcacctaagctggagtgcagtgatgtgatcttggctcactgcaacccctgcttcctgggttcaagcaattctcctgcctcagcaccctgagtagctgggattgcaggcccacaccatcacacccggctaatttttctatttttagtagagacggggttttaccatgttggccaggctgatcttgatcttctgaccttgtgatccgcccacctcggcctcccaaagtgctgggattacaggcgtgagctaccacaccttgcctgtactcttcactttaggaggctgagactggaggatcgtttgaagtcagaagttcgagaccaacctggtcaacaaagtgagactctatctctaccaaaaataaaaataaaaaagttagctgcgtcacgatgatttgggcccgtaggtctttttagctactggggaagctgaggcagtaggattgcttgagcccaggatttggatgctgcagtgagcctgggtgacagagtgagacctcatctctttaaaaaaaaaaaaaaagatcatataaatttttttaaagtgctatctgaaacttaggtctttttttctttttctttttttttgagacatattctctcactctgtcacctgggctggagtgcagtggcgtgatcatggctcactgcagccacaacttcctgggctcaggtgattctcttgtctcagcctcctgagtagttgggactacaggcgtgcaccaccacacccagcttttttttttttttttgtagcgatgggcttttgccatgttgcccaggctggccttgaactcctggcctcaggcaatcttgcatcagcctcccaaagtgctgggattacaggtgtgtcctgctgtgcctgnnnnnnnnnnnnnnnnnnnnnnnnnnnnnnnnnnnnnnnnnnnnnnnnnnnnnnnnnnnnnnnnnnnnnnnnnnnnnnnnnnnnnnnnnnnnnnnnnnnnnnnnnnnnnnnnnnnnnnnnnnnnnnnnnnnnnnnnnnnnnnnnnnnnnnnnnnnnnnnnnnnnnnnnnnnnnnnnnnnnnnnnnnnnnnnnnnnnnnnnnnnnnnnnnnnnnnnnnnnnnnnnnnnnnnnnnnnnnnnnnnnnnnnnnnnnnnnnnnnnnnnnnnnnnnnnnnnnnnnnnnnnnnnnnnnnnnnnnnnnnnnnnnnnnnnnnnnnnnnnnnnnnnnnnnnnnnnnnnnnnnnnnnnnnnnnnnnnnnnnnnnnnnnnnnnnnnnnnnnnnnnnnnnnnnnnnnnnnnnnnnnnnnnnnnnnnnnnnnnnnnnnnnnnnnnnnnnnnnnnnnnnnnnnnnnnnnnnnnnnnnnnnnnnnnnnnnnnnnnnnnnnnnnnnnnnnnnnnnnnnnnnnnnnnnnnnnnnnnnnnnnnnnnnnnnnnnnnnnnnnnnnnnnnnnnnnnnnnnnnnnnnnnnnnnnnnnnnnnnnnnnnnnnnnnnnnnnnnnnnnnnnnnnnnnnnnnnnnnnnnnnnnnnnnnnnnnnnnnnnnnnnnnnnnnnnnnnnnnnnnnnnnnnnnnnnnnnnnnnnnnnnnnnnnnnnnnnnnnnnnnnnnnnnnnnnnnnnnnnnnnnnnnnnnnnnnnnnnnnnnnnnnnncatctcttagtgatatttcaatttgaaaattatctaagaacaaagctgtttttactgcactctgcctggcagcagagggtttgggagaccctggtcttccttcccctggacgctgaagaggaggaggtagtgccagatcaggagtcccctcagaggtgtctcatagcacattcttggatcattcactggaatcaggtagagggagtatgtgtggccgactgggatgtgtgactctcaaaagcacctggagattgaggcaggcacgttcctgcaacatatgtaaggaaagatggctgagtagccagttacagcaacagcctgcttctcctggggggatgaggtgggagcagtgagttgtcctcaagtgaggatatccttagatgaggcttaaatcaactgatgtgcttaactgaattcctacagtgtcccacacagattgtactagagcacatatttgggttcctattgttatttttacctgtgataataaagtttctgactgtaaaacagaacctgcagatatctttttaacagagatgttagtatattccatttttcatcttgagccactcactttcagtcttaactgcttattcttggtatccaacagccaatggaaccctggcattttgccctataaacacaggagtaccatctgtggtgaaagagagtaactataggctatataatacatggagaaacaattcatggtttgtttgctttgccattctgcttcctagtgcttttttaggaatgtattgtgaaagtgagaataggctgtatagccagagatttgtattcatggcacaaagcagaaagctgctaccatcttggtggtagggcagcatgctctctggtattagcaagggacagggaaaaccaagacaagaaagccagcatcccctttgaaatgctcatttaagtcaagctccagattatacttaaagaaaagtcatggccagacgtggtgggtcgtgcctgtaatcccagcacttcaggaggccaaggcaggtggattgcttgaggccaggagtttgagaccagcctggccagcatggcaaaaccccgtctctactaaaaatataaaaattagcaaggcatggtggcacatgcctgtaatcccagctactcgggaggctgaggcacaagaatcacttgaacttgggaggcagaagttgcagtgagcaacctctgcctctgcactccagcctgggtgacagagcgagactgtctcaaaaaaaataaataaataaagaggaggagtcataacatccattagtttcaaggtcctgggctgtgccagggagatacatgatagctactggatatttattttttgagatggagtctcagtgttacacaggctggagtgcagtggcgtgatctcggctcactgcaacctctgcttcctgggttcaagcgattctcctgcctgagcctctggagtagctggtgctacaagcatgtaccaccacgcccagctaatttttttttttgagacagagtcttgctgttgtctgcccgggctggagtgtgatggcatgatatcgactcgctgcaacctccacctcccaggttccagcaattctcctgcctcagcctcccgagtagccaccacacccggctaatttttttgtatttttagcagagacagggtttcactgtattagccaggatggtctcgatctcctgacctcgtgttccgcccgccttggcctcccagagtgctgggattacaggtgtgagccaccgcacccggccaatttttgggtttttaatagagacggggtttcaccatgttggccaggctggtctcgaactcctgacctcaggtgatccacccacctcagcctcccaaagtgctgggattacaggcgtgagccactgtgcccggcctttttttttttttttttttttaagacagagtcttcctctgtcaaccaggctggagtgccagcggcatgatctcagctcactgtaacctctgcctcctggattccagcggttctcctgcctcggcttcctgagtacaggcgcgcaccaccatgcccagctaatttttatatttttaatagagatggggcttcaccatgttggccaggctggtgtcaaactcccagcctcaggtgatacgcccacctcagcctcccaaagtgctgggattacaggcatgagccaccatgcctggccagctatttagatattttatcagttattcatcagtcccactgtatattaaatggcaagagagaatcccaccaattctagtcttctagtccttttatgttgttcccaaaccagtcctgcgtcaaatatgtgtggaaaatggctgagaatggacaggatagctaagcaactcgctgtgcattacacagagataccaaatcctactggacagaagaaataatataaggacatcctcagatgaggcttaaatcagccaatgtgcttaattgaactcccacaatctacttggcactagagggaggacagattcaaaataagtagacatagtctttgcacatagggaatacacagcttaacgtgggaagcagtaaatacacagacttataaaagaagaaaaactccacaaggtagtaagtgccacattgagtggttaaggtcattcaaagtaaggccttgatgtggcatgccaggaaataataggtgtaacactgggatcagcttttgaaccaggacttcagcatgacagccgagcaaagaagcaaatcaaaggacagtgtacctgtgttctggggcaaggcatattggctagttatatctttttcagccaccactatactcacagttggtaagcatttaatcagcaatagtttcagtcataaaggacagcaagataaatgtgtggcataaatttaattcagaatctgggccaaagcctgataccaaacctttaaagcaaagtgtcatctggagctgaaggaaaggctgcctgagcaagaggcagaataaaggctagaagactaggaagacttgggaaaggtttaaatttcatgaggtgttagtagtatgaccaaaagtcactactacaaattgccaaggttggtgagagctgttcttagctgggtaggtcgctcaggggtcctcaggagtctgtccacctgggtgggttgaggcaggaagagtagggaggaaggctagcgggtggcttgactgaagttgaaccctaaggttgagctagcccttcttcctggtgtgtgaaccctctaggtcaggggtagggctcatctggggaacctactgagagtgccacgcctggctcattagtggctgtctggggaggccttttgaagatgaaacacttcataagcactcattgtttctgttttttcggacaaactagtactttggtcttcagggactgttgatctggctcagttgcactagtctggaatttgctgcaaactgagaagggtggtgggggaaatgtcagaagtttttgtaaaaacaaccaaactcccaccaaacccccatgcgttagcttgtaaataggattcctccccgtccacctttcacattcttgggtttgggcgcactttgtcttgacctgtccctttggctgctgagtttggggtgtgtgtgtgtctctggttcccagactctagagaatgccagcagctggcatatggtgattgctgaataagctgcccgctgacacatgcctcctgcaggcacagagaactggtttgtatgggtgattctgaatcctcattttattattgtttcaaagatgcatttctgtggctatcctgtgccatagagaagagagggaagaagaaagggaatgaatgaatgaatctgattctgtctgttggggcaatggctggggtgagcagatagacattttataccttcataatgattcttttggtcctgttcatcctttcagcaggtatttgttgttgttattactattattattattattttgagatggattctcgccctgtcacccaggctggagcgcagtggcgtgatctcggctcactgcaacctccaccttccaggttcaagcgattctcctgcctcaacgttccgagtagctgggactacaggagtgtgccaccatgcccggctagtttttgtatttttagtagagatggggttttaccatgttggctaggctgttctcaaactcctgacctcaggtgatccacccgcctgggcctcccaaagtgctgggattacaggcgtgagccactgcgctcggcctcagcaggtatttgttatgtgcctaccatatgccaggcatagcatccagtctgagtgagctttcagtaaagtcagtagagaccctggggattagttcagtttttgaagtactgtgtgctaggcactattcttggtactggagacagagcagtgaacaaaacacataaggagctgatatcttaggcagaataaaacaatcagcaagaaataaatatataatgtatcagatggtgataaatgttgtgaagaaaagtaaagtgggataaatggggtagggagtggtgtgtgtctgtgtgtgtgtgttatacatgtggttgtgggaggcctctttggtaggtgacattgaaacagacaactaactgaaggaggtgaaggagtaatctatgatggttatctggaagagaagcattccaggcagaggtgatagcaaatatgaaagctttgggccaggcatggtggctcatgcttgtaatcccagtgccctgggaggctaaggcaggaggattgcttgaacccaggagtttgggaccagcctgggcaacacggtaagacctcgcctctttaaaaaaaaaaaaaaaaagctttgaggcaggaaaggaaagtgttggggaattggagtggagtaagcaaagagagagtagtagatctcatgagagaagtaggggagtgtaggtcttgtaggaccttgtaagccatggtttgggccttgggttttactgaaaaggagctatgaagccacgagtgggttttgaacaaaggactcatatgacctgagtttggttttaaaaccaccctagatgctatatggagaataggccgaaaggcttagggaagaagcagagaaccaatgagatgactgcctcattgcagcgaccatgtgggacagccccctccttggatgggccacagtaagccaaggatgcacctagctgaggagtaaaggggtagccccgccataccccacctctctactgccagtgcactgttgtttgaacagggcacaacattagcagctggcattccacagagtgtaaaggatcggcttcttttaagagtgcggctttcttattcctcctttattttggtgtggaagaaagatggagttgcaaaaatataggaagggaagaggcagagtctcttgattaaaggagaaagcataaaccttgggaaactggcaagcctgaaccttgtcaggagtcacagagagccactccttattccgctccctcctctcccacccttgccagaagtctcagggtaagtaaggttaggggagggaggggcattaatgatcttacaatgcctttgggtatagggtagaatgtcagaactgaagggacttcagaaatcatctagttcaatcccccttccatttacaggtgcagatatggaaaagtgaagtaacttgcccagagtcacatggttagattactggcagagcagggatccttagtgtttactgctttgtctctgttcccaaagactcagtatgtatctgagtgggccttggtatttatagtcccctcaggctctccgtttgtcatgaatgaactctagccatgaccttgggaaattctatttacttggaagtcctgacaagcaaatgatggtatgattttacatttcctttgtctaggatcaagtcttccataccagggaccaggccaaaaccagactgccactgcccctacttgggccccactgtccccagaaagcagctgctgtgatcatgggcaatatctttggaaaccttctcaagagcctgattgggaagaaggagatgcgcatcctgatggtgggcctggatgccgcaggaaagaccaccatcctatacaagctgaaactgggggagatcgtcaccaccatccctaccattggtaagagcacagcttggatgtgggctttcacgccggcagctgaggcagggcagggacctattcctggttccccaacctggcctcttctccccaggcaagtccatacaatttgtggggttcagaaaagagggcggtgttgtttagcttactaccaggtgctgaggctgctgtttgcccacctaacctggctctccctgatgcgggaacttccatggcctggcactcaacagctgccctcaggcacggagttggtttcttctctgtgttgtttggaaagcaggtaaaaggctttgatgttcctgccaaaggcttggaattacttgggtttagatctttggtggccaatcttggttacagtttgctgaagggaggtctccctacatttgctatgtagatgggggctccagtcagcattgtcagctggctctgcctttggggctccaggatgccagcttacttccctttcttcactctgcctctcaggccccacatcttagctgaggccgactctggtagccaaagtaccagagcagggctgagtcattttgtaggagggagcaccaaagactgagtggaaaagtcaggaaagttggcccacgttacccaggcaactgtgaacctctcaaccaacttcctcatcctctttgacttctcttaggttttcattttggccttcaggctgctaggttaacgattatcaggtctgaggaagccttagcttttgttccattgttggtgttatggccaccactgggggaaagcagaaccaaactcattgtggtggtgtttgcggggctagtgtttgaggccaagtggccattgcctgttttttttccaaagggttcaatgtggagacagtggagtataagaacatcagctttacagtgtgggatgtgggtggccaggacaagattcgacccctctggagacactacttccagaacacccaaggtatgctcaggcctagcgtgggttggttgggtatgagcagagagtgtggctgtctttgttaatgggtggccaactgttaccctgctgcagctcctgggggcagaagaaagggaggaaagggagcaaatatttggagggtgtcaggcaggtgtggtcttttggttggggggagggggttacctgtcatcttagtgcagcccatgctctgccttcctagggttgatatttgtggtcgacagcaatgatcgggagcgagtaaatgaggcccgggaagagctgatgagaatgctggcggaggacgagctccgggatgctgtactccttgtctttgcaaacaaacaggtgagacttcttcccacccctgaatttgggagacagcaaactggctgtggaaattgttggctcttgggcctattatatggttaacccttttagtatgctctcaatgttagaagcgtgggaaactgagcacttggcttctttatgcccctcttcttgtgccccaccccaagctttatttagcaacatttcagtcctcaggaattgtctcaaatctttctttcatcttgcctgttatctactttaggagaattggcctcactcctgctgtcagacagacctgattctttggtcagtctgaatcacgtctcttgcttccccaccatcctcgtatttggtttccaattcttcagtacagtgacctctagtgctttggatcttgagttctaggtgactaaatccaaagtagctccttaggatcttgttctgggtttcctaaaataaaggaggaggggaaggtgctggtacacatttctttggtagatgggtgttctagaagcctttaaaaaatcctgaggcttctttttatgtgtctcccacgtgctccaggatctgcctaatgctatgaacgctgctgagatcacagacaagctgggcctgcattcccttcgtcaccgtaactggtacattcaggccacctgtgccaccagcggggacgggctgtacgaaggcctggactggctggccaatcagctcaaaaacaagaagtgaaagccagacagccctaacaaagcaccccacccacccctgacatacctactgtcaccctgccccagtcctaccccttcctctccatgcaagtgtggccagggccctgggtatcatgtccacatgcccagcaagagccttgcctcccctgcctcccctcctttttcctgtccacctatatgaccaatccctaattgctgtcctgatgatgagtcattccaatttactggatttaaaacaaaaagttgttacggtttcatggggtggcccctctctctctcaccctctgggtttcgggaggtcgagtggggtattctctttgtttggcagtggttgctgtcctcttggcatctgagtcctttccctgtccccacaagcccttctactccctgtttgcctttcctttgccaccctctccctgttttacatggaaattgcacgggcctctctgtgtttgcgtgcatgtgtgcgcctgtatatacatgtatagagagatatatttgtgggggccggggggagcggggagggggtggagtgaagctcagggcttgcagccaggacactgcccactggagcctgtcatctgccccttccgtgttggtgagattaagggaagaaggtgggagggcattagtcaagccggactgccccagtctttgactggttaccctcctctctgcaggtaggtttttctggatgataggacagatgatggattcttcaccaccattttccttgtactcttctctccacccttcttagggctggaggatggcatttatctctagatgactgttcccaaggagatgccactctgctctgccttactgttgggaaggagagaggaacccactcactcttatcagcttagagtgttcaactgatccttccccaccatcttcagatctgttcctctggagcttgactggggggtggggatggcaagtccatggtgtgtgttagggacccagggcattgggggaagggaggcgaaggcctgaggttttccatcttcattctcttttgttattaggagaaggtgaggcatgggccaatcccattcctgccttccagtgccccaccacccttctgatcttaggggttggatgggtcatctgtccttggtcagaattttctcaccctagtactcctactggcctgaccagggctgactgggtattctaatgaggagctgggaagtggggtgacatagctgaccttagtatcaacccccctcttctccaactcttgttttctagtccaggatatgctaaaggacgaagattttctattgtttccaggccctcagaccatccttgctgtcccttcaccctccatgcccctgccatcctcactcacttctcataaatggatctgggggttagagtggaggaaataaaatcctgaagtggttgtcagtgcttgtgggatgcagtggtcttcaggattctccccgcattattatgtagttgttcagaagctgttgctactgcgtctctctgtctgcagggggcacttgttcctgaggtcctcgcctgggtcctgacttctgtagtttctgtgaagacgtggctgtcctgtgggctcctgtgtgtgctggctgcgccctgagctccgagacagctgcccataacctgctaaggtcagggcccagggccccccacagcatggctgagggaccccttcccagtagggctgtcccaagccccactccatggggccaggtttcctggccacttttgttgatagcagatggatcaatattagtaaccccatccaagattgaactgtgaaagagaggttccaggggtatctccctcagtgccagttacttagtgatgtgttacccaggatgcagcaggtgtgtgcaggtatcttgctctctaggcctgtgtgtgtgtgtgagtgtgtgtgtatatgggtgtgggtgtgtttgtgtgtggtggttgtggggggggtgttggaggttctatttcatttaaaaatgtattcatttccctggccccacagatgcttccctccatactttttatttgctctgtttcctcagatttattttgtcttgccccattgcctctccttccttgaactctttccttttcaatctcaactcattcactgctgttgctcatttgcccttttccatgtattttttcctacttaggattttccactctatctttgtggttcatgaggactttgcctcttctcctgcctcattccctgactttctctagttagatgtcagtcctaaataggttttcctcacttcaggcctcacccctcaccttgtttttttgggggctccagggaccaatctggggctggaaatgttaggaggttgccttggtgctgccccagatctgtccagcagggggcagtaagtgatcttggtagtatccctggctgctaagcccttggcaggggtggtcctttctacattcccattcacttaacagctcttttgggattgggtgtttcattccatttctgcccactccctctcctctcctctctggtaggtttaattttatgctttccctgattccagctttctgcttcctgaggactcccgctccccccaccccaaagtttgtctgtggtgttatagtggtaactgcagttcctcctctggaatgtagactgtatatgtttaataactcaccttctctatccttgctcaaaatgtgggataacgcgatgactgtgaccctggttggaaattaaacttgttttatgcagctttggagccgaccttcatctttgctgtgcagcagccgtgggacagtagtttcatggtgaggggagtcctgtttctggtccctctctccatagtgctccttctttcagcaaaggggtaaaaggcacacttgattgatagagagtaaggttatggaggaacttagtgccactccacactggttatttcttcccatcataccccgcggcgggggagcccaaatgaattgggcatcagagtgtgagggcttcgtgactttcctcctctagttctaaagggtttaaacctgaaatcagctgtatttctcacctgttggtagactgtatggacttcactggctgaagggccctgaacttggagggccccatgtgcctctactctcagatctcctcagccttgcacatgaggtgcttctagtttgaacagagaccccctcactagtctagttctggactttggcagtgaataaacatgaaggataaacgtctgggcagtgtaatgaccttaatccttcttacaactgatggccctgcatcagctctacttcaggcgtgtggtttttcattgtcaggatgccaagcctcatccagagatcccacaaatgtcttgaggaatagaccttttccataaagcctccatcctcccatcgcactcccaccactattctgttcctcccctgctaccagtgtctggctccaggcaaagaaagggatggtgctacctttagggtgggtgaggtctgggtgagccaggcaagccttccccaatcttaatattttcttaagctttgaggacagaggtcttcccagcctgcttttgtgggaaagggataggatttaggcatataataagtttgagagccccaagtaccagtgtgaagcatataatttatattcagttacttccctgctgcctcccctgccaattttccttttcagcacttctattattaataggccatcaccctcaaggaccagtgcttccacccatatataactctcaaactactccaaccagacatgtcttatcaatcccaatgactttgaacattacccacctactcctcaagatcagatgacactttcctccttccaggcttctccaaagttctgcttggtgacagggtgctgataagagtatctttcccaagtgttttctttcttcttcttcttttttttttttttttttttgagacggaatttggtcttgttgcccaggctggagggcaatggcacgatatcggctcaccacagcctctcctcctgggctcccgggttcaagcaattctcctgcttcagcctcctgaggagctgggattacaggcatgcgccaccacacccggctaattttgtatttttagtagagatgggtttctccatgttagtgagactggtcttgaactcctgacctcaggtgatctgcccacctcagcctcccaaagtgctaggattacaggcgtgagccaccacgcccggccaggtgttttatttctatattagcaaatagatatctttcagagctacaacctctcataatgataagggagaggactttagctgaatggtgggccactggggggtctttggacccctgaacaacttggggaagaggatgacctattcccatctgtcccttagtactcaatttagaatgccaggaaggaagtagaggggagccctcttgtggcagttgctgaagccttccagttcttttgaggggataggggatgaagaggagactgaacctgggaggtagatacttagcacccagctcttaggacaaacagcaatcccatcttccagaacatgcatagcatcagtcatggactggcggaagacttggacccagggtccacttcaggataatctgggcaagggagcttcccaaatgagcctgtagaaagccagtggaagggcttaggttggctaaggtgggatggagggcaaaaccctccccttcattgcagagtataggggcagtggcagagaatgaatgtatgtgtgggtttctcagccttgaggtataaggtctaaaggctctggggattcactgcatacaccacttccagttcaagcgcctaggttggttacagcaggaagttgacaagtatgtatttagtacattcgatgtttttaggcatctgctaaaagtaggtcaaaccactgaactcagggagggggctggggatccatttctaggatgctgtggaatccttttgggacatctgtagtataccacgttgggtagtgagagttgggggacaccccttccattgctgctgcttagtgtagggagtcatgtctttgggcagcagtaatattattaagaaaagctttttttttttttgagacacagtctctgtcacccaggccggaatgcagtggcgtgatctcggctcactgtaacctctgcctcccaggttcaagcgattcttgtgcctcagccttttccgagttgctgggattatgagtgcacaccacaactccctgctaatttttttttttttttttgagacggagtctcactcttgcccaagctggagtgcaatggcgtgatctcggctcactgcaacctctgcctctcaggttcaagcaattctcctgcctcagcctccgagtagctgggactacaggtatgtgccaccatgcccagctgatttttctatttttagtagagatggggtttcaccatgttggccaggctggtcttgaacttgtgacctcaagtgattcgcccaccttggcctcccaaagcactgggattacaggcatgagccaccgtgcctggcagaaaagcttcttttccagttctgaagagtgtgaaggtaggagagccagaattcagttctctcactttccaacccagtacctggagagagagtgtcttgctggtcactggggagtgataggatccggatgcccgccttcctcttcaagtttttctttctgattgggtttcctgaccctgattgctggtatgggtaagaatgactctgaattcctgagaaaagggaagagggttaggacagaggaaatggaatcatttagtcaggtaaagggagcaaagccaccgaaggcagtggttggaggtgtagatgtgaggaagttgggttgagaccattcaccatcaaggcttgaagatgagtgtctgtttgtgtgtgtcatgttggctgtgagttgcagaagagagtatctggcctctagttgaggagcacttccggcttctgagctgaacatggtgtagaagagaggatactcaatccaaaaccctggctatctatgcagagggctgaccagttctacccatgtacccttccttccctcacccttcctcacaaaccaggcatattgagagctgtctggcagtcaatccaggcgaggcagcaggtttgagaatgggcttgtccgcctggcacctgcttccccccacttccaccttcacccctccatcccatatatcgttcagggtcctcccagcacagaattgaatagaaggacttttaaggcttggagggcttggcttggggctctaacccacaggaattctttctgagttctgaatatagtaataaagggcactcttggccttaggttatagataggagatggggaatctgttcttgtctttgccaaatcttgcatttatgggatgatacctctttgattagaacagccataggggaagagtggaggaagtaagtaagtgcttcattcttggatgaatatatgcataaacatacctgaaagaaaacatctagtcagctgggggtatgtatacccttgaaaatacaacaccaggccaggcatggtggctcaattctataacctcaacactttgggaggcttaggtgggaggatagcttgagcccaggagtttgagatcaacctgggcaacatggtgaggcccctctgctataagaaaaaaaaaaaaaaaaaaaaaacagattgttattnnnnnnnnnnnnnnnnnnnnnnnnnnnnnnnnnnnnnnnnnnnnnnnnnnnnnnnnnnnnnnnnnnnnnnnnnnnnnnnnnnnnnnnnnnnnnnnnnnnnnnnnnnnnnnnnnnnnnnnnnnnnnnnnnnnnnnnnnnnnnnnnnnnnnnnnnnnnnnnnnnnnnnnnnnnnnnnnnnnnnnnnnnnnnnnnnnnnnnnnnnnnnnnnnnnnnnnnnnnnnnnnnnnnnnnnnnnnnnnnnnnnnnnnnnnnnnnnnnnnnnnnnnnnnnnnnnnnnnnnnnnnnnnnnnnnnnnnnnnnnnnnnnnnnnnnnnnnnnnnnnnnnnnnnnnnnnnnnnnnnnnnnnnnnnnnnnnnnnnnnnnnnnnnnnnnnnnnnnnnnnnnnnnnnnnnnnnnnnnnnnnnnnnnnnnnnnnnnnnnnnnnnnnnnnnnnnnnnnnnnnnnnnnnnnnnnnnnnnnnnnnnnnnnnnnnnnnnnnnnnnnnnnnnnnnnnnnnnnnnnnnnnnnnnnnnnnnnnnnnnnnnnnnnnnnnnnnnnnnnnnnnnnnnnnnnnnnnnnnnnnnnnnnnnnnnnnnnnnnnnnnnnnnnnnnnnnnnnnnnnnnnnnnnnnnnnnnnnnnnnnnnnnnnnnnnnnnnnnnnnnnnnnnnnnnnnnnnnnnnnnnnnnnnnnnnnnnnnnnnnnnnnnnnnnnnnnnnnnnnnnnnnnnnnnnnnnnnnnnnnnnnnnnnnnnnnnnnnnnnnnnnnnnnnnnnnnnnnnnnnnnnnnnnnnnnnnnnnnnnnnnnnnnnnnnnnnnnnnnnnnnnnnnnnnnnnnnnnnnnnnnnnnnnnnnnnnnnnnnnnnnnnnnnnnnnnnnnnnnnnnnnnnnnnnnnnnnnnnnnnnnnnnnnnnnnnnnnnnnnnnnnnnnnnnnnnnnnnnnnnnnnnnnnnnnnnnnnnnnnnnnnnnnnnnnnnnnnnnnnnnnnnnnnnnnnnnnnnnnnnnnnnnnnnnnnnnnnnnnnnnnnnnnnnnnnnnnnnnnnnnnnnnnnnnnnnnnnnnnnnnnnnnnnnnnnnnnnnnnnnnnnnnnnnnnnnnnnnnnnnnnnnnnnnnnnnnnnnnnnnnnnnnnnnnnnnnnnnnnnnnnnnnnnnnnnnnnnnnnnnnnnnnnnnnnnnnnnnnnnnnnnnnnnnnnnnnnnnnnnnnnnnnnnnnnnnnnnnnnnnnnnnnnnnnnnnnnnnnnnnnnnnnnnnnnnnnnnnnnnnnnnnnnnnnnnnnnnnnnnnnnnnnnnnnnnnnnnnnnnnnnnnnnnnnnnnnnnnnnnnnnnnnnnnnnnnnnnnnnnnnnnnnnnnnnnnnnnnnnnnnnnnnnnnnnnnnnnnnnnnnnnnnnnnnnnnnnnnnnnnnnnnnnnnnnnnnnnnnnnnnnnnnnnnnnnnnnnnnnnnnnnnnnnnnnnnnnnnnnnnnnnnnnnnnnnnnnnnnnnnnnnnnnnnnnnnnnnnnnnnnnnnnnnnnnnnnnnnnnnnnnnnnnnnnnnnnnnnnnnnnnnnnnnnnnnnnnnnnnnnnnnnnnnnnnnnnnnnnnnnnnnnnnnnnnnnnnnnnnnnnnnnnnnnnnnnnnnnnnnnnnnnnnnnnnnnnnnnnnnnnnnnnnnnnnnnnnnnnnnnnnnnnnnnnnnnnnnnnnnnnnnnnnnnnnnnnnnnnnnnnnnnnnnnnnnnnnnnnnnnnnnnnnnnnnnnnnnnnnnnnnnnnnnnnnnnnnnnnnnnnnnnnnnnnnnnnnnnnnnnnnnnnnnnnnnnnnnnnnnnnnnnnnnnnnnnnnnnnnnnnnnnnnnnnnnnnnnnnnnnnnnnnnnnnnnnnnnnnnnnnnnnnnnnnnnnnnnnnnnnnnnnnnnnnnnnnnnnnnnnnnnnnnnnnnnnnnnnnnnnnnnnnnnnnnnnnnnnnnnnnnnnnnnnnnnnnnnnnnnnnnnnnnnnnnnnnnnnnnnnnnnnnnnnnnnnnnnnnnnnnnnnnnnnnnnnnnnnnnnnnnnnnnnnnnnnnnnnnnnnnnnnnnnnnnnnnnnnnnnnnnnnnnnnnnnnnnnnnnnnnnnnnnnnnnnnnnnnnnnnnnnnnnnnnnnnnnnnnnnnnnnnnnnnnnnnnnnnnnnnnnnnnnnnnnnnnnnnnnnnnnnnnnnnnnnnnnnnnnnnnnnnnnnnnnnnnnnnnnnnnnnnnnnnnnnnnnnnnnnnnnnnnnnnnnnnnnnnnnnnnnnnnnnnnnnnnnnnnnnnnnnnnnnnnnnnnnnnnnnnnnnnnnnnnnnnnnnnnnnnnnnnnnnnnnnnnnnnnnnnnnnnnnnnnnnnnnnnnnnnnnnnnnnnnnnnnnnnnnnnnnnnnnnnnnnnnnnnnnnnnnnnnnnnnnnnnnnnnnnnnnnnnnnnnnnnnnnnnnnnnnnnnnnnnnnnnnnnnnnnnnnnnnnnnnnnnnnnnnnnnnnnnnnnnnnnnnnnnnnnnnnnnnnnnnnnnnnnnnnnnnnnnnnnnnnnnnnnnnnnnnnnnnnnnnnnnnnnnnnnnnnnnnnnnnnnnnnnnnnnnnnnnnnnnnnnnnnnnnnnnnnnnnnnnnnnnnnnnnnnnnnnnnnnnnnnnnnnnnnnnnnnnnnnnnnnnnnnnnnnnnnnnnnnnnnnnnnnnnnnnnnnnnnnnnnnnnnnnnnnnnnnnnnnnnnnnnnnnnnnnnnnnnnnnnnnnnnnnnnnnnnnnnnnnnnnnnnnnnnnnnnnnnnnnnnnnnnnnnnnnnnnnnnnnnnnnnnnnnnnnnnnnnnnnnnnnnnnnnnnnnnnnnnnnnnnnnnnnnnnnnnnnnnnnnnnnnnnnnnnnnnnnnnnnnnnnnnnnnnnnnnnnnnnnnnnnnnnnnnnnnnnnnnnnnnnnnnnnnnnnnnnnnnnnnnnnnnnnnnnnnnnnnnnnnnnnnnnnnnnnnnnnnnnnnnnnnnnnnnnnnnnnnnnnnnnnnnnnnnnnnnnnnnnnnnnnnnnnnnnnnnnnnnnnnnnnnnnnnnnnnnnnnnnnnnnnnnnnnnnnnnnnnnnnnnnnnnnnnnnnnnnnnnnnnnnnnnnnnnnnnnnnnnnnnnnnnnnnnnnnnnnnnnnnnnnnnnnnnnnnnnnnnnnnnnnnnnnnnnnnnnnnnnnnnnnnnnnnnnnnnnnnnnnnnnnnnnnnnnnnnnnnnnnnnnnnnnnnnnnnnnnnnnnnnnnnnnnnnnnnnnnnnnnnnnnnnnnnnnnnnnnnnnnnnnnnnnnnnnnnnnnnnnnnnnnnnnnnnnnnnnnnnnnnnnnnnnnnnnnnnnnnnnnnnnnnnnnnnnnnnnnnnnnnnnnnnnnnnnnnnnnnnnnnnnnnnnnntttgggaggccgaggcaggtggatcttgaggtcaggagatcgagaccatcctggctaacagtgaaaccccgtctccactaaaaaaaaaaaaaatacaaaaagttagctgggcgtgatggcgggcgcctgtagtcccagctacttgggaggctgaggcaggagaatggcgtgaacccgggaggcggagcttgcagtgagccgagattgcaccactgcactacagcctgggcaacagagtcagactctgtctcaaaaaaaaaaaaaaaaaaaaaagatagaagtttatttctgcctcagttaaaaggtgtctgggggccgtgcatggtggcttacacctgtgatcccagcactttgggaggctgaggcaggcagatcacttgaggtcaggagttcaacaccggcctggccgacatggtgaaaccccatctttactaaaaatacaaaattagcctggtgtggtggcacacacctgtagtcccagctactctggaggctgaaacaggagaattgcctgaacctgggaggtggaggctgcagtgagccaagatcacagcattacactccagcctgggcaagacagagtgagactttgtctcaaataaatagacaaataataaatacacaaaaattagccagatatgctcgcttgaactcaggaggcggaggttgcagtgagccgagatcataccactgcactccagcctaggcaacagagcgagactcggtcaaaagaaaaaaaaaaaggtgagctgggcgtggtgactgatgcctgtaatcccagcactttaagaagccgaagggggcagatcacttgactccaggagttcgagaccagtctgggcaatatggcgaaaccccatctctacaaaaaatttaaaaattagccgggtgtggtggcatgcctctgtggtcccagctacttgggaggctgaggcaggaaaatcacttgagcccaggaggcagaggttgcagtgagccaagattacacaactatactccagcctggatgacagagacccccatctcaaaaaaaaaaaaaaaaaaaaaaaggtatctggcagctggtctgaagataggcatctcaattgttcacggccagttacagattgaactactctttcccccttctcactactgcacttgactagtcttttttttttcccccacaaagaatggggcttcagatagaactgaaaaataaaagtgtctggtggtaggcaatccagagctggcatggtggctctgcaattaacaaggacttatgcttctttttgcttcaccatcctagcgtgcagcttccatcctcatggtcatctcatggtctaatatggcttctagagcttaattcatctcatctgcattccagatagcagacagaaggaaggaaagatgattagggggagagagagcagcacagaaggacgctttctagttaactctttaaagggccttcttggaagtccaggacaatacttccaacacttctgtttatgttctcttggccagaacttagtcaactggccatatccagctttaagggagacttggagttttgtggtttttttgtttaacttaaaaaatatcttgatacgtaattcgcaaacagtgaaatgcacagattgtaagtatacagtttgataagttctgacaaatgcatacacccatgtaacccacatccttctgaaaatatagagcatttcatcacccctagaaattccctcctgctgaggggactttttttttttaaacaatacaaatgagagataatgaaggcttcttatcctgaggtgggagggttgtagctatgggaatggaagggaagagctggagagactttggaaggagaatccagagtagacccgttggatgtgggagatgagagaagaacgaatgctggtagcagagccactaacagaaacaggagatagggaggaagtctaggttgttgcaggtggattggaagaatgagtacagttaagactgttggctgggcgcattggctcacgcctgtaatcccagcacttcgggatgctgaggctggcggatcacgaggtcagcagtttgagagcagtctggccaacatggcgaaaccccatctctactaaaaatacaaaaattagccaggcgtggtggtgggtgcctataatcccagctactcgggaggctgagagaaaagaatcgcttgaacccgggaggtggaggttgcagtgagccaagatcgtgccattgcactccagcctgggcgacaagagtgaaactccgtctcaacaaacaacaacaacaaaaacttttaaaaagtgggctgggcgtggtggctcatacctgtaatcccagcactttggaaggccgaggtgggtggatcacttgaggttgggaattcgagaccagcctgacagacatggagaaaccctgtctttactaaaaattcaaaatcagctgggcatggtggcgcatgcctgtagtcccagctactcgggagcagaggttgcggtgagccaagatcgcgccattgcactccagcctgggcaacaggagcaaaactcctccccctcaaaaaaaaaaaaaaaaaaaagaaatctggtggctcacgcctgtaatcctagcactttgagagaccgaggcaggcggatcacctgacatcaggagtttgagaccagcctggccaacatggtgaaaccccttatctactaaaaatacaaaaattagccggg

SEQ ID NO: 717 - DNA, 3595 bp, Homo sapiens
ggaggtgggaagtatcccgggctgggggtgggggtacgccgcacagctccagtcgccgtcgcggcttccggtgctaggtggagggaaggaaggagggagccggggagtgggccagggcagcagccgggctgaagtcggcttggggagccagagggagcggagcggaacctgcggggcagaggcggcggccgcagcggcgcagctgatagcaggaacaggatcaagtcttccataccagggaccaggccaaaaccagactgccactgcccctacttgggccccactgtccccagaaagcagctgctgtgatcatgggcaatatctttggaaaccttctcaagagcctgattgggaagaaggagatgcgcatcctgatggtgggcctggatgccgcaggaaagaccaccatcctatacaagctgaaactgggggagatcgtcaccaccatccctaccattgggttcaatgtggagacagtggagtataagaacatcagctttacagtgtgggatgtgggtggccaggacaagattcgacccctctggagacactacttccagaacacccaagggttgatatttgtggtcgacagcaatgatcgggagcgagtaaatgaggcccgggaagagctgatgagaatgctggcggaggacgagctccgggatgctgtactccttgtctttgcaaacaaacaggatctgcctaatgctatgaacgctgctgagatcacagacaagctgggcctgcattcccttcgtcaccgtaactggtacattcaggccacctgtgccaccagcggggacgggctgtacgaaggcctggactggctggccaatcagctcaaaaacaagaagtgaaagccagacagccctaacaaagcaccccacccacccctgacatacctactgtcaccctgccccagtcctaccccttcctctccatgcaagtgtggccagggccctgggtatcatgtccacatgcccagcaagagccttgcctcccctgcctcccctcctttttcctgtccacctatatgaccaatccctaattgctgtcctgatgatgagtcattccaatttactggatttaaaacaaaaagttgttacggtttcatggggtggcccctctctctctcaccctctgggtttcgggaggtcgagtggggtattctctttgtttggcagtggttgctgtcctcttggcatctgagtcctttccctgtccccacaagcccttctactccctgtttgcctttcctttgccaccctctccctgttttacatggaaattgcacgggcctctctgtgtttgcgtgcatgtgtgcgcctgtatatacatgtatagagagatatatttgtgggggccggggggagcggggagggggtggagtgaagctcagggcttgcagccaggacactgcccactggagcctgtcatctgccccttccgtgttggtgagattaagggaagaaggtgggagggcattagtcaagccggactgccccagtctttgactggttaccctcctctctgcaggtaggtttttctggatgataggacagatgatggattcttcaccaccattttccttgtactcttctctccacccttcttagggctggaggatggcatttatctctagatgactgttcccaaggagatgccactctgctctgccttactgttgggaaggagagaggaacccactcactcttatcagcttagagtgttcaactgatccttccccaccatcttcagatctgttcctctggagcttgactggggggtggggatggcaagtccatggtgtgtgttagggacccagggcattgggggaagggaggcgaaggcctgaggttttccatcttcattctcttttgttattaggagaaggtgaggcatgggccaatcccattcctgccttccagtgccccaccacccttctgatcttaggggttggatgggtcatctgtccttggtcagaattttctcaccctagtactcctactggcctgaccagggctgactgggtattctaatgaggagctgggaagtggggtgacatagctgaccttagtatcaacccccctcttctccaactcttgttttctagtccaggatatgctaaaggacgaagattttctattgtttccaggccctcagaccatccttgctgtcccttcaccctccatgcccctgccatcctcactcacttctcataaatggatctgggggttagagtggaggaaataaaatcctgaagtggttgtcagtgcttgtgggatgcagtggtcttcaggattctccccgcattattatgtagttgttcagaagctgttgctactgcgtctctctgtctgcagggggcacttgttcctgaggtcctcgcctgggtcctgacttctgtagtttctgtgaagacgtggctgtcctgtgggctcctgtgtgtgctggctgcgccctgagctccgagacagctgcccataacctgctaaggtcagggcccagggccccccacagcatggctgagggaccccttcccagtagggctgtcccaagccccactccatggggccaggtttcctggccacttttgttgatagcagatggatcaatattagtaaccccatccaagattgaactgtgaaagagaggttccaggggtatctccctcagtgccagttacttagtgatgtgttacccaggatgcagcaggtgtgtgcaggtatcttgctctctaggcctgtgtgtgtgtgtgagtgtgtgtgtatatgggtgtgggtgtgtttgtgtgtggtggttgtggggggggtgttggaggttctatttcatttaaaaatgtattcatttccctggccccacagatgcttccctccatactttttatttgctctgtttcctcagatttattttgtcttgccccattgcctctccttccttgaactctttccttttcaatctcaactcattcactgctgttgctcatttgcccttttccatgtattttttcctacttaggattttccactctatctttgtggttcatgaggactttgcctcttctcctgcctcattccctgactttctctagttagatgtcagtcctaaataggttttcctcacttcaggcctcacccctcaccttgtttttttgggggctccagggaccaatctggggctggaaatgttaggaggttgccttggtgctgccccagatctgtccagcagggggcagtaagtgatcttggtagtatccctggctgctaagcccttggcaggggtggtcctttctacattcccattcacttaacagctcttttgggattgggtgtttcattccatttctgcccactccctctcctctcctctctggtaggtttaattttatgctttccctgattccagctttctgcttcctgaggactcccgctccccccaccccaaagtttgtctgtggtgttatagtggtaactgcagttcctcctctggaatgtagactgtatatgtttaataactcaccttctctatccttgctcaaaatgtgggataacgcgatgactgtgaccctggttggaaattaaacttgttttatgca

SEQ ID NO: 718 - protein, 179 aa, Homo sapiens
MGNIFGNLLKSLIGKKEMRILMVGLDAAGKTTILYKLKLGEIVTTIPTIGFNVETVEYKNISFTVWDVGGQDKIRPLWRHYFQNTQGLIFVVDSNDRERVNEAREELMRMLAEDELRDAVLLVFANKQDLPNAMNAAEITDKLGLHSLRHRNWYIQATCATSGDGEGLDWLANQLKNKK

SEQ ID NO: 719 - DNA, 838 bp, Homo sapiens
ggaggtgggaagtatcccgggctgggggtgggggtacgccgcacagctccagtcgccgtcgcggcttccggtgctaggtggagggaaggaaggagggagccggggagtgggccagggcagcagccgggctgaagtcggcttggggagccagagggagcggagcggaacctgcggggcagaggcggcggccgcagcggcgcagctgatagcaggaacaggatcaagtcttccataccagggaccaggccaaaaccagactgccactgcccctacttgggccccactgtccccagaaagcagctgctgtgatcatgggcaatatctttggaaaccttctcaagagcctgattgggaagaaggagatgcgcatcctgatggtgggcctggatgccgcaggaaagaccaccatcctatacaagctgaaactgggggagatcgtcaccaccatccctaccattgggttcaatgtggagacatggttgctgtcctcttggcatctgagtcctttccctgtccccacaagcccttctactccctgtttgcctttcctttgccaccctctccctgttttacatggaaattgcacgggcctctctgtgtttgcgtgcatgtgtgcgcctgtatatacatgtatagagagatatatttgtgggggccggggggagcggggagggggtggagtgaagctcagggcttgcagccaggacactgcccactggagcctgtcatctgccccttccgtgttggtgagattaagggaagaaggtgggagggcattagtcaagccggactgccccagtctttgactggttaccctcctctctgcaggtaggttttt

SEQ ID NO: 720 - protein, 164 aa, Homo sapiens
MGNIFGNLLKSLIGKKEMRILMVGLDAAGKTTILYKLKLGEIVTTIPTIGFNVETWLLSSWHLSPFPVPTSPSTPCLPFLCHPLPVLHGNCTGLSVFACMCAPVYTCIERYICGGRGERGGGGVKLRACSQDTAHWSLSSAPSVLVRLREEGGRALVKPDCPSL

SEQ ID NO: 721 - DNA, 3648 bp, Homo sapiens
tgagggctgaggagatagagcgcctcccgggccccgcccggcactgcttggcgtggggcggtgggattcttcccacccgagagctcagagagggtgcgtcgggccagcttcacgcctgcccccgcatttgaaggacgcagagctggggtgggggtggggggcgcacacggatttgtcctccgcctcgctcaagggggcgacctgggctgcagttaggttgtcgcctgcaggaggtgtgctgttgagggagaggaaaaccgtccgaggagaggatcaagtcttccataccagggaccaggccaaaaccagactgccactgcccctacttgggccccactgtccccagaaagcagctgctgtgatcatgggcaatatctttggaaaccttctcaagagcctgattgggaagaaggagatgcgcatcctgatggtgggcctggatgccgcaggaaagaccaccatcctatacaagctgaaactgggggagatcgtcaccaccatccctaccattgggttcaatgtggagacagtggagtataagaacatcagctttacagtgtgggatgtgggtggccaggacaagattcgacccctctggagacactacttccagaacacccaagggttgatatttgtggtcgacagcaatgatcgggagcgagtaaatgaggcccgggaagagctgatgagaatgctggcggaggacgagctccgggatgctgtactccttgtctttgcaaacaaacaggatctgcctaatgctatgaacgctgctgagatcacagacaagctgggcctgcattcccttcgtcaccgtaactggtacattcaggccacctgtgccaccagcggggacgggctgtacgaaggcctggactggctggccaatcagctcaaaaacaagaagtgaaagccagacagccctaacaaagcaccccacccacccctgacatacctactgtcaccctgccccagtcctaccccttcctctccatgcaagtgtggccagggccctgggtatcatgtccacatgcccagcaagagccttgcctcccctgcctcccctcctttttcctgtccacctatatgaccaatccctaattgctgtcctgatgatgagtcattccaatttactggatttaaaacaaaaagttgttacggtttcatggggtggcccctctctctctcaccctctgggtttcgggaggtcgagtggggtattctctttgtttggcagtggttgctgtcctcttggcatctgagtcctttccctgtccccacaagcccttctactccctgtttgcctttcctttgccaccctctccctgttttacatggaaattgcacgggcctctctgtgtttgcgtgcatgtgtgcgcctgtatatacatgtatagagagatatatttgtgggggccggggggagcggggagggggtggagtgaagctcagggcttgcagccaggacactgcccactggagcctgtcatctgccccttccgtgttggtgagattaagggaagaaggtgggagggcattagtcaagccggactgccccagtctttgactggttaccctcctctctgcaggtaggtttttctggatgataggacagatgatggattcttcaccaccattttccttgtactcttctctccacccttcttagggctggaggatggcatttatctctagatgactgttcccaaggagatgccactctgctctgccttactgttgggaaggagagaggaacccactcactcttatcagcttagagtgttcaactgatccttccccaccatcttcagatctgttcctctggagcttgactggggggtggggatggcaagtccatggtgtgtgttagggacccagggcattgggggaagggaggcgaaggcctgaggttttccatcttcattctcttttgttattaggagaaggtgaggcatgggccaatcccattcctgccttccagtgccccaccacccttctgatcttaggggttggatgggtcatctgtccttggtcagaattttctcaccctagtactcctactggcctgaccagggctgactgggtattctaatgaggagctgggaagtggggtgacatagctgaccttagtatcaacccccctcttctccaactcttgttttctagtccaggatatgctaaaggacgaagattttctattgtttccaggccctcagaccatccttgctgtcccttcaccctccatgcccctgccatcctcactcacttctcataaatggatctgggggttagagtggaggaaataaaatcctgaagtggttgtcagtgcttgtgggatgcagtggtcttcaggattctccccgcattattatgtagttgttcagaagctgttgctactgcgtctctctgtctgcagggggcacttgttcctgaggtcctcgcctgggtcctgacttctgtagtttctgtgaagacgtggctgtcctgtgggctcctgtgtgtgctggctgcgccctgagctccgagacagctgcccataacctgctaaggtcagggcccagggccccccacagcatggctgagggaccccttcccagtagggctgtcccaagccccactccatggggccaggtttcctggccacttttgttgatagcagatggatcaatattagtaaccccatccaagattgaactgtgaaagagaggttccaggggtatctccctcagtgccagttacttagtgatgtgttacccaggatgcagcaggtgtgtgcaggtatcttgctctctaggcctgtgtgtgtgtgtgagtgtgtgtgtatatgggtgtgggtgtgtttgtgtgtggtggttgtggggggggtgttggaggttctatttcatttaaaaatgtattcatttccctggccccacagatgcttccctccatactttttatttgctctgtttcctcagatttattttgtcttgccccattgcctctccttccttgaactctttccttttcaatctcaactcattcactgctgttgctcatttgcccttttccatgtattttttcctacttaggattttccactctatctttgtggttcatgaggactttgcctcttctcctgcctcattccctgactttctctagttagatgtcagtcctaaataggttttcctcacttcaggcctcacccctcaccttgtttttttgggggctccagggaccaatctggggctggaaatgttaggaggttgccttggtgctgccccagatctgtccagcagggggcagtaagtgatcttggtagtatccctggctgctaagcccttggcaggggtggtcctttctacattcccattcacttaacagctcttttgggattgggtgtttcattccatttctgcccactccctctcctctcctctctggtaggtttaattttatgctttccctgattccagctttctgcttcctgaggactcccgctccccccaccccaaagtttgtctgtggtgttatagtggtaactgcagttcctcctctggaatgtagactgtatatgtttaataactcaccttctctatccttgctcaaaatgtgggataacgcgatgactgtgaccctggttggaaattaaacttgttttatgca

SEQ ID NO: 722 - protein, 179 aa, Homo sapiens; identical to SEQ ID NO: 718

SEQ ID NO: 723 - DNA, 47435 bp, Mus musculus
  misc_feature (1)...(47435): n = A,T,C or G
gggcagagctcctcctgagcacctcctgaccagggattgaccggacctaaagtcaaccccactctgttctgagatgtgaactttgtgggcacagttcctaaagatatctcaataagcctaccagcctgcctctaacttggttaagcctcagtagtactaaatgggatgggtaacactccaagactaggttctgccaacagcgaggccaagagctaagcaactgcccagagattctggcatataaacagagcaagcccagtcacctttgaccttccttccctgtccattcaaaacactgggcacctggaccagctttctcaacacatgacctatagctcctggccaattatacaactcaacactcaatttgactagaatgcttgactttaattagccccccacccaactcagaggtccttgtgcaaaatctgccctctggcttgcacattgcccaaagtgcagctgcaacctggagtggacacagccggagaaccagaaaagccaaatgactatttcctgtagagacaggtggcttccatctcccatgggcaggtgtagaaaggtgagcttgcagaagtcccacccatgggactgtcagaaagatgtaagtagcgacagctgggattggtgtggccaaatggcaaatcttttagatactctatagtgatctatggtgattaatggactttctgttttcccaaaagggcacactggcaaccagaagggggaaaagaagggtaggtggagaaacaaatattttataaaattcctgctctagctaagttaaataaggaccactgaccaaatgtgatcaccttctcttaaccacgaccacatgggcaggagaatgtctacccacgttgaaaatgtatatatctgtgctgttccaactgatctagtggacagccaaaactgtatttatcatggtgattagtaagtctgatgctatagaggctgattaatatccttattgcaataatagtctattgaccatttagtatgtgtcaggtgctgggctcagtgcttcctatactacaatagttcattctattataattcttagatttatctatatgagtcttttttgcatgcatgtatgtaagtgtaccacatgtgtgccttgtgccatggaggtcagaagaagacatcagaacctctggatctggagttaacagacagttgtgagccattatgtgggtgctgggacctgtaccctctgcaagagcagccagtgcttttaattgctaagccatctctccagcccccatttccttcagttgtcttcaaacccccatgaaatgataatttctttgcagatgaggaaactgaagttcaaagagatccaaaaattcagttgccacgttggtaacattgacatctgaactcttagcctcaaagcctcaaaggtctttctattcctagattttcctcaagtgcctctccatctggcttctactcttagcaaggccacgcctgcctgtctatcagccacacctccagagaatgatcaggccagcccctatctcactggttcccacaagccagagggatagctgtcattcaaaatggagacaaagcctacccatttgctttagcttccttgagaaggattaaaacatggttcatagagagggatgcaagtgacagcgacatgtgggattctgtgggctttacttggactctagtttctcagagataatatccaaaggtgtggaccctggacctcttacctggggccagtcacaccccatacaagatctccctatgtttatgagtttaaaatacaaatgtgtccatgttgaggggaacttgcctggtgggaccagtcggcctctcaaaggtaagggccctccaggtttatcagtagcaggaaccctcagactccacttaggacataatggcaaactctgtgataagaagatgccagaaaacttcaggatagctttataaagcaacataatgacgcctgcttccttgcacaagtcggtgctcccactctacccctaaacagaaccaacctttaggaaatttcagggaacaatccatatctttgaactttagttatttattcatttattagaaacagggcctcactatgtagcccaggctggcctcagcctcctgagtgctggtttggcttgtgacatcatgacaagacctttgaacattttaatggcaaatacatacaatagtgggaaaaaataagaggttggtgaaaaaatattatttcaaaattggtaaaagaaacaattaaatttaaaaaaaaaaaaatgtccataatgagcaccagttgatgcgcaaaaaacccttgggagtaagaccagaagccagcattgtgggacactgtgacccactgtcagcttgcggcctcgcacgtgttttcccctaaagactgatgaaatctgaggtttttcagtactgaagtcttctcgaactggcaagatctacctttttgttcacagaggtgctggattgaaaaactcacccagtacttcctgtgccagccctctgtgactcggaagtagtagagttagccacaccctttctctcaccttgttacttccaacttgggctggtgtaaacaagatcccctgttaatccccagactgagcacagggtcagtggtcagtggcctgggctctgggctaagggatcttgtggaggaaattcaggctcagctgcttagccgatgactttacacaaatagtagaagctcagtgaacctcagattcctcctccataaaatatgtataataacaatccccactcctacgatggttaagcccgaggcataataacaatccatttttagcaggtcatcacagctcttcattgtccagtcggaatatcaaatcccactgagcctccgcccccttctctcacatccgacaaccaccaggtcaaaattatctatgggatgatgcggcgccctcaactgtcccccaaagtgtttatcgactcatttttcactgaagccttaactagggcttgctcatttttatattcactttttatgaataacatatgctcatttattatattcttctaagttttaaaattacataactaccaaattcagacactgatgattctgaaatccagataggctgcatctttaacttagtggccaactccacagtgattatttaaattgataggcatgataaaacacttactcagtaacatctctcttcagtttgtttttttttttctttttaattagcatgcaagatttagcagatttcctcttggtcttttcattcttactcatattcggttgttccagcccgggctctgttcctgtccgcatttccctggttcccgtccccaccctacccccaggctctcccacttccagcgtgcactgtccacttttctatcaattacccctcccacctcgtctcttaaagcctcttttccccccttctcatggacccctttctgtttctatactgactcatgtgtattatgcacatataaaaactcaaaactaaggggctgacaagatagcttagcaattaacactggatacttttctaaaggacccagggtcaatacccagcacccacactggggctcaaccatctgtaactccaggtccaggaattccaacaccctcttctaacctctgagggcacgaggaaggcatacacgtgacacatggacatacatgcagacgaaataatccatgtacataaaattaataagtaaattaaaatcttttcattaaaagctaagatccacatatgagaagaaatatacatacactatttgtctttctgaccctgggttacctcaatataatattttccagtttcatgcaaattttgtaattcagtttttctttacagctaaataaaattccatctatataacttttcattatctaatcattggttgatggacagctagtctgataccattttcttctcagtagcatcttaccaaaatttagctatttgataaagatagatctacacagatccaattactaatttctcccactagacccgtcctcttctcttgaccacagacacacctctgcatgatgactgcaggagtagagagtaaaatatagaatctaaaagccactctgatcacacacatcaccagattgcatgtgtggtccttcccccttgaccagggaaggaacaggctcaaagttcttgcagggagaccagtgtctcttgcagggagacagtgtaggagtccctgtgggaagatgaatctttaatgaatgtgattatctgttggtaacctttgttaggatgctttccagatcaactgagctcattggccatgcatggagagagaggcccacacaccagcagggccaccaataccagtacccatagtaactatacccaatggcaacaacatggactgaccacaggctcacctctaacaacactctcagaaagcaagccttatgcctgccgggatagtgtttaaaaagaactggggaagactgtcttcaagactgcttccttggagaacgactcagatctgtgcctttgcacagtcattaatgacttcagacttaacagcctgatcctgagagagaaatctgcaatggatgggcttctaatacctctactgacagagagagaaagacagtcttgcagggtggtggctatttcacaaacattgatgtaattaagcccttgtaaagaggaggtcagtgttctctagagttttaatggttttaaaagaatcagattctgttgtggatgcaaccctgtttgttggtagagcattcatctgaaatgcatgaagccctgggttccatcctcagctctgcataaataacccagagtgccatactcctataatcccagcatttggaagatcttgaatccatggtcatctttggctacagactgagttcaaaaccatctttggctgcatgagatcctttctcaaaaaaaaaaaaaagaaaaatatgaaattcaagtcaagcatggtggtgcacacctttaatcccagttcttgggagtcaaatgcaggtgtgtccctgtgagttcagagccagcctggtctacacagaaagttgcaggacagttagagctatatagcaaaaacctgtctcaaaatgaaaaaacaaattctgtaacatttattgcagtattgatcatcttcataacaccgtgggcagccactggtttcatcagagtttgagtgcaatgtcttcagtgctgaaaatatacagagacccatcacttccaaggcacaggcaaggaaagggatttaggagataggggagaaccgcctcattggtttgctcaactgaactggggttcttactcaaaaaggacacatgaatggctaaagatgggagaggatacccaaagataaagggaaggaaaaaaagaaatctcagactatacaaccaacacataaactgtttatgtgcttaacatatgtgcctatatatgcttaaatcatcctgtgaattttcgaggcctttatactcaattcaaatatcgtatcaaaaagttggtacatctcaactgagagtcatctccccagggctaccagaagctgggagttctgtgtgggactaggcaggttacctgaactctctatgcctgtttcctcatcagtaaattttaggtgttgatgatgacgcatccctcataagaattatgtaatcatcaaatgacttaatacagtatgtttagtctgtcctgagcacctaagaaatccacccagcaaaggacggctgtcaggattattcaatcctaacttgggacggcaaactcaaaagttgggggcctcaatcaacaactgtgtttccctccatcctaatgagatatgccatgtatcagcatgtaccatcgatgtaaatgcctcacagatgaagaaatagatgaagtcgacgcctcatctaatggctcccaggtgccaggtgccagcaatgtgttgtcatatatgtccactgcccccaccaaacatccaccaaaacacactttgacaggaactagttaaaacaatagagcttagaaaaattaacattctccgcagagtctgtcctgaaaataaagccaggataaaggagactgacccccacagcctggacactcacctgcctgccaaaggcctcttctaatgggctagtgatctaatggtctatgactttttcttttcaattcacttttgtttccagcctgggccgtctggttggggttcagaggcgggggcagtgaaagtggcagattttagggggttagggaagtgacctggagagaaagcagcagacacaagtctgttgggttcagtgaaggcttggatggggccctcctgcctcgtgtcaggtagcatgtcctttaactcacttgattctgtgtgtaggagagaggggagggggaggagagagagaacatgtgtgtgttagctgtcttctttaagaatttctactcagccgggcagtggtagtgtacacctttaatcccagcacttgggaggcagaggcaggagaatttctgagttcgaggccagcctggtctacagagtgagttccaggacagccagaactacacagaaaaaccatgccttggaaataaaataaaaattaaaaaaaaattaaaaaacacttaaagaatttctactctacactaagagaggagctgggctgcaaatgaccaggagatgtgaagactctgggccatagagagggaaacatccaaagagaacagtgctgaggtcagatcatcgagggaggccagggggagaccttgtttctatagtgtggtgtttacatccggtaggctgcagtccaacccagagctggccccaggccagatgagtgacatccactgagcaccagcccctctgttcccttatcttaaaaaataatatgatggtaactgtctcctagagttgctttgaaaaataaccaaggtaagacaggtgagccagtccagcccagttcgtggcatatgaaagatgcagtacagggtgggattccttcctccctacccaaggaggtaccccaggagcaccgggaaccgtcagaacctaagagactagacgcagaggcgaacggccaggactgcacagtgctccctcggcccctgctcacgcgcttcatcttcatcatctgagaaagggtgataagtagcgcccggggttgaaggtctgcacagaacataattaatgaaagaaaacagatcaagatcactcaattgcagagctgtttcaggggtttctcaggctcatccagccaccaaatggcacagcagtaattacagcccgaggggtctctttccagagtcacctctcagctactctgctacaatgatgcaatgactaatttcaggaatgccgctctgagaacctggaaggaaaatagtgagaaatctaaatgagctcagttcttcccccaccacccctggttcctgcccttcccacttccacagctcatcttcacccacaggcatagtgaagctttcccatagcttagtgtttgagatcatccaaacatccattctaatcaaattaagatcaaatgtgatgcttacgcttagagtgcaagttctcttttgtttttgttttatattaatcatcccttttaacgactggtccagaagcctctaattccccaggcagtcacccagagctgctacattatgtactcaggaccacaaagcaaaacaggaccactgtcatccacatcggctgctagattactttccactctcaaactcgggtcatagaaaaaatgcaaattctccaaaactgctttggttttctaaaaacatattgttttctaaagacagtagcagaatagcccgtttttcttggacacttttccttgggaagacagtgtgtgtgtgtgtgtgtgtgtgtgtgtgtgctcgcgcgcacgtgtgcgcacgtgcgtgtggttcagaaactggtaacgaggtgggacaaagctcagcagcagagaaaatcatgtgcaggacagaggagtcccccaaaaaacaggcttcaacaggacaagtcacagatgttaaaacttctgtgaggacatctgaattcggttatttccagattctggtcctgtgcagatacttttgttcagacgaaattttaccaagaagatttagagaaaagctttggggctcttcttgaatccctcttctaaactctcgaccttcaaacaggacactttttaaactcccgcctaagggctggagagatggtgctgtggataaagcacttccctccccaagccttgagttcagtcaatctctagaacccaaattaaagaaaaagccaggtgtagcagggcaggcctgcaatcccaggactagagaggcagagtcaggaggagcctggaagcttgtaacccagctagtgtagctaaatcaggctcagcaatagactgtgccaaaagcaaagaggagaggctggagagatggctcaaagtttgctgctcttgcagaggacccaggttcaattcccagcacccacgtggcagctcacaaccgtctgtaactccagttccagaggatctgaccctctcacatacaggatacaagtaggcagaataccagtatgcattaaaaaaaaaaaaaaaaaaaaaaacatgttttaaaaatgcctagtgatacagggtctcattgtgtggatcaccctgggtagcctaaaactcactgtgtaaatcaacctggcctcaaacccacagatatctgccgcctgagtgttgggattaaaggcactgttaaatccaacaaaatgattaaataaataaataaataacttaatcccgttttctcctattactgttgggagaattctgacccagaaaagctggctctcccacctaaggtcccagagccaagccagagcctcaacaggccacttatcttgccccgactatttttccatgatgacacatgactcctcacatgaactgccttttgtttcttcacgccgttcgggtgtttggatttgagtgtttgtgcctatgcccagtgttcccaagaaaacctaaccaaccagtcaatctctgctttccacttcaagatcacagagtctgcagtttgagcaccttggtgtcttggctgcctgagattgagagaggaacggaacccacgaaagggggttatgaacactcctcccagatgactgcctaggccgtcatttagatttgagagatgtcctaaaaactgggtagttctcagtgagacagctgacagcttgcaagccaatcaggaccccccgcccccgtgttgttctggatgtttgacactgcagctccacgctcccttcatatcgccatttctaaaacagaggacactgggaaagggggaaagctgtcacatggctcctgtattcaaacatggcgccctttgggtgcttagagtggaaaggccagtgaaagcactgctccctgactctctccctgccccctgatcggaaggtccccaccaggatcaatagaaggaaatatgtagcgcctaaggacaggcttccaggtgattggctgacattaccaagtatggccttcccagcaacccaaggacagattccattattgcattaatctgatggatcccggatatgctcattaacttattcacagtaatgcagccagaaaatgaccggctcagaatttgatccctgaagcacctttattctttaccacttcttggcactgctcttctttcctaacacaaactacatacagaggttcgggacttggccagcccaggcaaaggctgcaatgaacagacaccaggcctgaatttccttccctccagcttgctcaacggagactgctccagccagcactccacttatccccccgggggcaagaattctctgctcatttcctgggtcccctcggtgggtggtgggagctgggcacaaaagcaggagaaaggtaaactttctgcatgtgaaaaccaccccccacccccgaggagccgtgtcacaccgtatgtcaccgtcatcaaaggggctgtgcataaacctgaaaaaccaaacggacctgtctgtaggtgtcacttatatcacacggctacaggtgcctttatttctacagtccgctggtgctgggagcgcgcttgccttctcttgccttgaaagccttctgtctggacctagccaccacttgtcttcacgtaagcagcttttctttgctcttttgaatgaattgaaagggggtgtcggggctcagagacttagctggggcctgggactgagtctctgtttccagctcccacggcagcccctccgtgaggaagccagagtgcctcctccgggggtgtttgactcaggtttgacggcttgccggagagatttttttttgtctcctccgggaaggtggccacccaccctcttcaccggcccccacttcctctggttccactaaaccaaaggcagctgagagaatgtgtacaggcgcttaaatctctgcccatcctttagctgcctttaggaggaagccggattctgcacggatagccagctcaagaaaaacccaccacctcccccaaccctggcctcacccctcagttctttggagggcctgctcaccaagctgcccctcttgatacagagaatggtattcttactgtttaaggctttttttgtttttatttttgtttttttaaggagtttgtacaaaatagtttaaaggaatctcatttggccctcccacagccccttaggacagagtgcttccagaagagaagtggctagggtttttttccactgtattctcaaaccttatcagtctgtatgcgttcaggggtttgtgcgcatttgccccctactggcagcaactggaaacacatgctctcccgcatctgcgttaaggtaggagaatttaagacagaataggggtcctagatcattatgcacttcgtctccattttacagatggggcaactgaggcacaagaaggcccggtaatttatagagatggttttgtgtggtagtccaaagactcagacccaggctgttacacgtgctcatccacacggaaagcttcattctcctgccttcattctctcggcaagggtctttctatgattcagtgtattggggacagcagcttttacagtttggttgcctcctcttctcaaaagtcttcagagtgaaactttttagctactcaatcaatgttcactgattttattaaatcctcaggacgctcagcggactgtgtgttgagatgtccattttaaggattcggaagtaggttatcagagatggtcatgagtacttacagattagcagaccaggatggggaaaaaaatcaaaacttttagcacgcctgcaagaaagtcagaggttgcagcaggctaggcaggaattgtgccctccgtcgcttgctttgtgactaccgcaaacaacactcattctctgcgtctttaacctaaaacttgtgatcttccgatcgaagcccacagcttccttctatgatgttttagaaaaatatagcttaaaaaaaaaaaaaccaaacagatgaagtcctaaatgagctgaagaaaaatgaagtattgctcaataaggcactggcgagttggctcccacaatgcagtggttgctttcagaacaaatactcaagaacccaacccacaagccctccactgctgcaagtgttgaaacccccactgagccctctgcagccacccttcttaaagagccccgaagggtgggaaagtaacaccccctatccgtgaggctctgccgcagtgggcattcaggtgtcgtggagcgttaggaaagaaaaagtgtttctctcctcaacggcactgccaagatgataaaactgtgggaggattttcactgtctcactttcctcattttgcactggtttggcttagctcaaagacgttttgacagagaaatagccaatgcctgtgaacagacattccgaagatagaaacaggaagcttgcctcaagtttgaggctagcctgatctgcactgtaggtccatacatgagaaaaggtgaaggggaggaaagaaatggaaaggaaacaggggaaatagcccaggtatagatgcttagttgggtagatatttggtcacatccccaaaatgaccttgaggatctcggctcgggtcaaaggaagaattttcctcctctgacaaattgggcaaggctgggtagtttgcaccgtcaccattatttctgccattggtttgtaagtgggacaaaagcctatagccctggctctttggctgggtgggccctattgtctgcgtggtatgtgagcttgctcagaaaggagatagaaagttgctggaggctctcagttccaggcctgccctgactcactccaaaggtacctataatcgaccttctcaccagtaaaaaaaagagctcatttgattccaccaccttagggtgatcagaccaatctttttcgtaccgatcatgccttccctatgaggtggccagggtgataattaatctgggggaaactgcttccatctgttgttggtctattgaaagccagggcatgggagtataaggatcccagctcagttgtccagctgagcaggagagggaaggaggaggaggggagcacaggactttctggggctacaggtttaatcagaggtcgtactggttatattttgagtatttggtgactttacctgaccaaagtgcaaatgttatcaatgtggctacacgtgtgtacatgagtacaggtttggaagcgtttggctgatctaatgagaggctgcagaaaaatcacagagccagggctgaccttgaatgcgtctcctagtgttttcctgtcatgggtgaagaagtgaggtttagagagatgaaagaggcaggatcatctctccatgttcagggctctttccataatgacaagccagaggatagctagactagccggcccaggaaccttctaatatccctcttttggttctgtgcactgctaggcctacctaacctggttcttttctgccttgttttcattatcaacatacacacacacacacacacacacacacacacacacacacacacacacacacacaaaccagagccttctgccattgagaacagctgtgcaaacccagacctggtctttggatgttgctggtccagagccttcactgagaagagggcaccacactgattatccatctacattagaaaaccagccaaaagtgcccacttattgcaagcaccttccaaggcctagagagaaggtgttgctaaacacaaagcagctttattcctgagcttgcacacctagtgcatgctggctaagtagcctggccttttgtggtgagcttagacttaataacgcctcctcttatgacaatagcaaaacaaaaaaagaaagaaatgttcactgctttcataaaagacctccccacgcctcccccccccaacccccaccacgaagaagcaagaaataattatggaaggaaaacagcatggtaaatcccagagagagccctctatgcaaacctaatgggtataatttgccataaaaggaattatcggagggaaccaaatccatcattgtgtgtagcgctgaagagattaaagatcaagaaggtgtgctggggtgggggtgggggtgggggtgggggtgtggaatccttaaaggaggagaactccctactgataagatccagttcaattttaccaaataagtttcttgttaaatatgaaaggtcttctattgttagtcatggatgagaaagggcaaagtcaaggttagggttaatctttggagggtgcccccatagactttaaagacctggagactgcattctgttctcttccatttggggcccacctctcctttctccatatgcagtcatatagagtcattgaaggtcatatcagtggtgttcttagtgtccagcccaaaaagtatgagactctttcccatcctctcttcacacttaaaagacttttcagaagtcgagtttagaataagcgccatgtacagtcttagtcctccttgccgacattcccaccccgtacagattcaagacatcaagctggcccatccatgggaaaattagggcccagactcaggaagcctggacttctgattgatgggctcccaggtgagatccatggctatgataactgctgggccctttaaccctatggggtatcaagaaaaaggcttcctaactgggacctggggaatagacaggattctgtgtgttatacccagcatgcagttcttctgcacaccgaatggtcatcatgatggtagatttgtgagcatctcggaagatccctgtaacttttagtttccttatataaatgtgcctgggatgatgctataccttcagataggaaagctaacagaccatatgggaaacttagggcctccctccagcttaaccttgctgtccattggctgttgaccttgagcaagtgacacagattccctgggtctccatttccttccctatcaaatgacagagtgcatttccagccctgtactacagtacttgcaaggcaggaggtaattctgcccagaggttggcaaatccctcaaagggccaggttgtaaatattttacgatttgctggccaagagacaaaaatcaaggatgctaagtaaacatgtatttcgaaatctaaaaagatttctggtttcatgataaataaagaaaggagctatgggctggactggcttcgggttgaagataactcctgagttaggtggtgcattttaatgtacattaaaagaatactagccttccatttataatgataatataaagtttatccattaagacgcattcaaacaaaaataaagaaatggctatttaaaattttttaatttattgtatttagagaagcaaatggatttagtaaaattaccttggtgacaagcaaaagaaaaaaaaaacagtgttcagaggacactgtaccaagtgatggagaagcttttgagctttccagttccatctgagaatgtccctggacgtggaatctcatctctgccctggtatggtatttgccagtgcaatgattttgagctgctgtctccttcctgtgaactgagtttgaaccagcttatctcactaactttatttcaagcattaaagaaaatgatgcaaacagattttaaaaaataatttaaaacctttcaaacatcacacacacacacacagagagagagagagagagaatgaagcacagaagccgtgtttgggtgtgtgggaagcagcaaagctgaggttagcgggcacaacagtcttctgccagtctcagccagacacctttgcttaaccactctcctaccaccacgatgtgccggggcagcagagtgcagcagttaggatcaggaactttccaagctgatccacctgagctgccactcaaaccccatctcctgtcagcggggttgtcttgttcttgctacctggagtcccagagcccccaccatcaccatccttcatccataaaacagaacctttcccagcatccatcagagtggtagctctgaggaaagtactagaggacgtagcatggtactaccctctccacactcctggagcacggtatactggaacacacagaatgctacagtgtcaggagtgttagacagtatacatcctgacgaaaccgagctcctgggaggactcaggattgttctagcatcttaatattgctgcggggtatcatgtaagcgttcactaaatggaataaattacctacagatgtagcatgctgttatatatgtgtgcattcatatgcacatatctaatgtatacaaggctttacaacatcagttcagggctggttttgctggaaaataagattgtggcaaacacatgcacatgctaacacatagaaacttccagagctgtctgatttcagcattttaggatagagtcacacagggcagtgcttggcttgttttcccaagagcacttttaaatattatatgtcagagttcagagggtcagacacaagcaaagagaaaagtcaattaagagacaggactgcacaatcccagtctccatcctcaaaccccagctctgaaactttcttgttatgttactttgggaactgtctcagcatctctggctcggggtactcataggagcaatgggaataaacagggtgtggtgagaactgtagaataccgtctgtgtaaagcacttgatgaaagcgcctacctgctgcccttactaaacgataagggtcatcctctcaggagttctacacctggaagctcctggaaacttttgttccagatgttcttacagcccctctgatattccagggtgatgttggactccgtaacccatagcaccttcctgcccaacgcatccttctgtgaccccctgatgccttggaccgatctgttcagcaatgaagactactaccctgcctttgagcatcagacaggtgtgtacgtatggtgattcccattcaagggccgcagcatgggctcaggttaatgcatggacctagggcagctcagaaatgttagcgttcaatgcagatgttggtggaaagtcaggtggaaggaagtataggcttgtgcagaaagaagggcagtagagttctctctcctacttcttcctattatggtgtaaattctacagcctgctccaaagtaatgctcagtaaacatgggttnnnnnnnnnnnnnnnnnnnnnnnnnnnnnnnnnnnnnnnnnnnnnnnnnnnnnnnnnnnnnnnnnnnnnnnnnnnnnnnnnnnnnnnnnnnnnnnnnnnnnnnnnnnnnnnnnnnnnnnnnnnnnnnnnnnnnnnnnnnnnnnnnnnnnnnnnnnnnnnnnnnnnnnnnnnnnnnnnnnnnnnnnnnnnnnnnnnnnnnnnnnnnnnnnnnnnnnnnnnnnnnnnnnnnnnnnnnncagttttctgtacctaagaaggaagcttgaggtcttgtgtaagtttcattgcagagggaggccagctgagctttgccccagaaaccctctgaggcttccttgcctgagtaagtgcttggatgactgcacaccccagcaaagccagcttgctgctggcatggaaggtgcagacccacacaagtgacagacacaagcaccaatgaagctgtcagtcctcgaggagacttaaccctgagcatacaagcctagccaggtctgagtttagtgtctagaggtggacagtgagcaggaggggcccagcccttgacgtgctacacactgtcaccacaagggagcctctgcctttacagctagaggccagggctgcacacccagaattgaagattcctaaatcacctggtaatccacccactcctaccccctacacacatggtctcttccaaacacacatgcacacacaaaatagctcactgtcgaccgaaagacccatcaggcctgtccaacctatggtccgcagtccacgtgcagtgaaggataactgtaaatgtggcccaacacaaaaatcatacacattcctaagacaatatgagatatttcttttgcaatatttttttggaagtcaattgcacagagtgaactttgcagctgacaatgccatgtcacaatgttgaaagctgacagatcactgcgtttgggcttgactcaactgcatacatagtacaatcctcctttggtcccaagaagacgtgggttaccctgaaagatgacgagaaaggtaattcactttgctccctcaaacattaacctgaaaagaagacaatgaaggctttagcgtgttctttcatgttcccagtgcctgttgttccagatgacagggggtagcagttgggaggtggcctcaacactgcccacatgatgtcctggctacgggaacagtggcttctgtagtcaacaagagtctaagctacggctccatgtgaccttaaagtgaagggtagctttgacattagctgctccagcttaacctctcaggcccactctccctttgatagagaaataatgaagttaaaggctgcaacaacaaaatgcagggctgcttccagctggggtagaagaaagttcaaatgctgatgctatgctaatgtttgcacaatggtatgaacattctacttactgaagtggacaattttaaaagattaaaattagattttggttcggtatattttgccccaataaaaaaaaatataatccactagcagaaggcatcaccaatggaattgaccctggaaggtaattctgtacacgctcagattctcgggggggggggcagcccccatggactgagacctcagcagttctattagtgtaatgaaaggtgagacaaggtccctgctgcaattcctccagcagtgtctctgaatcctgcgcaggagacatcagaaacataaacttctctcagcactgaagtatttccgccaagaaatgaggccaaccaaaataaaatatccttatttctcttcccagtcaggacatcaccagccagagaaataacaagatctaaattacaaacaaaacaaaacaaaacaaaacaacaacaaaaaaaccccacccttctctccaggatcagagctggggtagtcgggataccctgaccacttccccctaagtcatgtctccttgctgcctcacatatctccatcttgaatctaggccttgtctagggagttatcctaataagaacttcctgttggtatttgccctcaagtattgacattgccactcaccagccaagtgacatccaacaagctatttgacacattttccttcaccaaaatagtatcccctccctacagctgggagtgtaaaataagagttaatattatcaggcgtttaaacacgggcctggcacttgtcagatgcttgcctcacagggacacctcgctactcctagagaggaaggaaatagctattgccttcctctccagtcaacctagacttcagtggtaacccttccaatctgggactgcaaaggcaaagggtgtgagggagacgtaacataccctggatccagacaagtgacggctgagagggagggaatatgatgctcagcctagcgaaacccagctgcttccaaacttcacaaatgccttcagctgagaaggcctgagcctgtgccctcattgcgctcaccacaagtgagtctggactgctctttgaagcagggcctctgcctaactgcactaaggacttggaagggcacagccacagattgcaaaatacactggaacgtcattaattcaccttggccttgacctcaggttcttcaaaatagagaattgtcagttagactatttatttagtagaaactctgtacttcatatgcataatatggtatgatatattatgatgcatatatgatatatatatatatggtttttttttgaggcagatctcactatatagccctgactgccctggagcttactgtgtagaccaggctggcctccaacttcaactacctgcctgtctacccagtattgggattaaaagcacatgccaccaggacatgtttcacatgcatatatattttttaaacattatagatccgaataagttccaatagtccacattctaaagttttttggtcttagctctacttcctggaacttcaccctagatatcctcctccacacacacctctttcctggccttcaaaatggccagaccaacatgtggcacctccctcaactgtggcattttgcttatgcttttttccacagcagagctttctagactgggaaagcccagggaactagttccaggaggcccctcaagtctagtacagagtctgggtggcagtggaaaagacttgatacaggttctcccctctgcacccccaccctaggccaggctcctccacttccattctgcatagcgttattaaggttaggctgtagctacctgagtctagctctgtcccttacccactgtgtgactttagaaagggttgtctcctgaggcctccatttctctatttgtaaaatggccatggcctatcttgtcaaatgtattgaagacagcagggaagactccgtaacacagtgcttagcagggtgattagtatgtaagagcactcaggaggtacaacagctgctgggccaggggtggtggtaaacaccatgaatcccaatgctagggtggcagaggcaggttgatctctgtgagttcaaagccaggctgatctgcagagtgagtgccagtatagccagaaatatatagtgaaaccctgtctcaaaagagagagggggaggggaggnnnnnnnnnnnnnnnnnnnnnnnnnnnnnnnnnnnnnnnnnnnnnnnnnnnnnnnnnnnnnnnnnnnnnnnnnnnnnnnnnnnnnnnnnnnnnnnnnnnnnnnnnnnnnnnnnnnnnnnnnnnnnnnnnnnnnnnnnnnnnnnnnnnnnnnnnnnnnnnnnnnnnnnnnnnnnnnnnnnnnnnnnnnnnnnnnnnnnnnnnnnnnnnnnnnnnnnnnnnnnnnnnnnnnnnnnnnnnnngaaaggaaaggaaaggaaaggaaaggaaaggaaaggaaagaaattataacagctgtgcttatccgatatgagattttacttcaaggagggctttttaaaagaacagtgccaaggcatcctaagtattaaaatcaaaggggaaagcatttaaatcacactggggcttttccaagtaagattcatgtgctgggcacagaaactcaagagcagccatgtgtatgggcctaagaactcctaaatctaaactagagaacaaacacgagttattcaaaggtctaagcagagtcccgtagcagaagttacgtcccagagaagtcactcctggctacctctgcccactgaggcttaaggagtggccgtagccatcacaactcagggcctggctctctcagcctctccctaactctccgtgacactttgcagacacccagccagccctccacttttcccggtccagtttcttatgctgttcatggtctgtgtcatttgaaggttaagacaagaagccaagagaggttataggtaggatggggccagcccagctaagaaaggaaccctgaaagtcatttatcaccacaggacttccctcataaagccagcccttccttcccgcgccaaagctgcaaatgatggtaccctacacttcactcgctgtctctctacagcgtcgccctgggcgaaaaactttcccaactccctatgctaataaatcatgctaattatggtcctaaattgtctaacttaggcttcctctaaagccgactgtctgtctcgctctttccctgtcctgaatttgttctggttgttccttaacctgcgaatgaacgcagagagttgggcagctcctcctgtccagtatggtatgaactttctgattctcatgtccctacctggagctacttcagccgtgggtatcacctccctattctgaaggccctggaggacatcagcccactgaactcaatacatccaactgggtagcaccatttgaaagagctcccccagagtcgatggcaactctctccagctcctcagcctttcttcccaaggcagctggccctcaagtgccctgacccacttcagacttcaaaggagctggcaaggcctgatgcttaatagtggcctctggactttcacatcaagctttctgggcataggatactggctggcttcggctaggatcctaggcaaacaggcttgataccaagcttctcctgaaagttcagtgtgtcttgtaaatgagagacatatcaaggaaaacactgtacctttccagacaatatgacccagtaagagagtataatcttatataaatagccccttgatttgctctatgttcattccttccaaattctagtaggttcttgttcatgttatttgctggaagcagagacactggcaccatcacctctccatatttctgacttttcagacgtaagctagagatagataaatagataggcaggtaataggtaaacaggtttactgacttctaattgtgtggcggatgtgcatccatttgcctgccttcatccaaatcttatttttgatatgtgtattctccaagaccaggaaatgtggcatgatgcaagatgtccacatggtgtccaatgaccttacttatggccactgtgaccctggaggggaaccttgtaacctcccagaacctgtttccttaccctaaggtaaagattgcaatcactggtgatctggtaacacttactgaggagtggtgggctgagggggtgggggatgggaagcaactcccagcactcccagttcagggtgaccagagttccacagctggggtctgaggtgctgtgaatccttctggaactttcttagcagggcaccctgaggggaagattctttgagagagtgtgaactgctgtggttcaaggagaacaggagggactcaagggtcagaggaatggggaaaaaaagcaccttccagcggagagcagggagtggcactggggcagataatagaggccctggggcaggatccctcccttcctcagaggtgctactaacacctcccacccccaacccctatcctaaagctgagaccatggaaacactccaccacctagtctctggatgctggctcccctcgtcctgcctccacgtccctgggagcaaccatttcctctcagctctggagactgtgggaagggctttggctgacaggaaagccagccaccattgtagttgggcccctgttgcctacaaagcctgctctataagtgagttccaccaaggagccagagagcgaggcactaggccagcaacagcttcctggtgccataaatgccctccccctaccccttctctagatccttaagggaagaaacaatgaagtcttccttccaaacaaaataaccatgccatagaactggagccgggaagggaacagagacacagaaaaacctttccatggagagaagcgtgctgtgtgctgcacagcagtgcaccgatagccatctcagtcaggccccagtgcgggaccagcagccaaagaatgtcaaggatcataaacagctcccatcagaataccaggaacagctaaagacctcttaggtttactcaagccagcaatcagtagatgaaaaagcacagaccgaactcaggaagggtctgttttctcaggagaccctgctctctgccagaaaccagccataagcctgatcagccagctccagccagcagtgggggatcacggaaagggtagttgggacaaaccattccctccatgttttcagccgccaggtaaaggctataacaccagcactcaccagcctggcaatgaaggttctttcatgtatgtgaatgcaaaattctggttaaagggctggtgataaaaaataggtcatttgctacacatgtgtgcagctctgggctcagctccagcccctcaaaaataaataaataactgtttgttttttaaaaataaaacaagtctaggatttgggctcaccaagaggctcatcagtgggaaaagagattcctagagcattctgagttttagagggaaactgtttctatctttacaaaatagccctgtcacacctatgaggtaggacactggaagaatgagaaacccaagaatgccaatcaggacttggcaactcaaaggcaatggacaagaggtagccccagcagaccagagctgtatcttagctgggttcatgagcaccacagctcatctaggcacaggaacagcagcagaggcaggggagtggcaatcacaacagcgccagtggctggggagtgtcactgcagaggtcactctctctgtagtccacagggcctgatccagtgacctcagccttgctctgttgatttgccccacccccattctttcttgatctctgcctacctccctcctcagatgtcaccttttttctgtgctgatcctccaaggacgagcacaataagatgagaggagggaagcgttcagattgcagttcacatcccaccttaccggctgacagtgggatctaagggaagagattctcctccaatcccaagctcctcatctatcagggaacaaaggctaaacatggctgtccaccatgaagtcttcccaggcaatatgtggcatcgcacagagtaggtggatagtggtaacattaataggattgttaaagcacatgtgggctcgtttgcgctgtagaacaactctgatataggtgatatagtcttctccatttcacgaagagggaaagtaaagttctcatttattggatgaatggacagacagacatgttggtgggtggatggatggatggttgggtagtggattgatacatgagtacttagatactatagtggctacaaaaattatttacattagagctggggataaagttcactggtagagtgtttgcctcagctgcacaggtagctgtctgcattgacaaagaacttgacaagtgccaagtctctctctctctctctctctctctctctctctctctctctctctctctctcacacacacacacacacacacacacacacacctctattcttatgtctgcctttctatttgtctctgcttgaaacattgagacaaggcttctgaacacctggacaaggtgctactggtacatcccagcctccaagtcaggacagcacctacaactgtctgagtgtctacacggctcctttgaaggagtaggcagtctgagctcaggagaagataaaacttaagccatcaccaggaacacaacgacatcagtacagtcaactcctccgtgacttcctttctccatagacatctgttattgtagtccaaggtctgccacactatgggcaatagctaactagcccaagacccttgtaaaagatgactagaggctatgcacaaatagacagccatcctagcacctgtccattaatgcccagagactcagaccagtttcagatagagtctagcagaaagaagacatgtagtgactattgaatcgattggtgatttcctagacaccactctccctacattatatctccaactctataacagccgtgtaggtcaaacagattacactcattttaacagcggcggaatcagaggcctaaatatctatgggccttacccaaaagacaagcggctaaaccaggatttgaacccaggccttcagaactccgagattttattcttgatatcatgttacctggagaatatttttgctctctttctttattgggtatatcatgttaagcaccagaaagagatttagtaatttcctacctgcctcataccctctctggtcccaacagccatctacagaatcccatctccctggtggtctctgtagagaagataacctggatccttgtaagtgcatgccagacctagagccctttctgaatagggaacctttaacgatgctaagataactggagtattctttgaggaccccttggtaaccttttacttctctgtgctctggtgcagcctgtgattcctactggacatcagtgcaccctgaatactggaccaagcgccatgtctgggaatggctccaattctgctgcgaccagtacaagcttgatgccaactgcatctccttctgtcacttcaacatcagcggcctgcagctctgcagcatgacgcaggaggagttcattgaggcagccggcatctgtggggagtacctgtacttcattctccagaacattcgctcgcaaggtcagtgtcagcctcgggaggagggcctaggactgggacctgatatccccataggtgcttccttaccccgactctcataatcaattggtatcagtgctcagtcaaaacctctccgtaaccagaagttctaccatcctagtgttgagagtttagccaaaaggaaaggcaagagccaagaaagcaaatggagtaggttttttaaaaaagaaaagtaaaattcaaagcacaggtaaggaagtccaaaaccacgctggaagcctcaaataaggatgctcaaaaataactaaaccatgaaagatgggggagggggcgctctgcttcatccctgactaagcagaaaggaagacaatgaaatagaccttttctcttcctatttccagaggagtccaaaaattaccactctgagtgcattcctttctgtcaaggacccaatggccagaaggtggcgccagtagcgtagacactgtgagcaagcgctgctttttcaaatcacaaagctgtgtcccagtgataaagcctcgggtctgagaggcttccctctgcgacagcgtacaggcctgcttcacaggcagtccgggcaaagtgaaaactcagaatgacccgctgtgttactgatacagtccaggctcttagataaggaagccataggattctttctgcaagaagcgccccctgtccgaatccccagaagctctgtctgctaggaagattgacgaccctccctgagctttgaaggatttggtgaatgattacctggcacgacataaaagtatgctctaagtagcaactatttgtatcactaatataaccaagaggcagaaaaacaaaacaaaccaaccaacaaacaaaccaaagcagacacatctatgcttgattctttacaaaaggacttttggaaaagtttaaagtttctcttggaaaggtttcttcaggatacagagaaagcaggacgttccctgccactggagaaccaagctgtctgctggtccctgctttacaaggatgctgtgtccaaagaagagattcccatttaggcagagaaacctcagagcaccttccagctctgggagtctactgcttctatttgttcctcccatcatgaaggactgaggacaagaaagcagagtggggcctggggggagaagctgaggcctgtgctgagggtgtgcactccctgcatctggacaaagctgaatgtgtcacaacctctctgggagaaggagcctggaactccattaaaaacctcccaagagccaggtatggttgtacacagctttaaacccaacacgtaggatacagaggcagacaggtttctgtgagtttaaggccaacctgctctgtatcctgagtttcaggccagcaaggtgatgtagtaacactctgtctttaaaaaggaaacgctcccaagaggacaatcttgctaaaaattccagggtcatggagagggccatattccaccttggaaggagctgaggttgcattgctaccttagccaaatgccacattaaccaagtttgtctcgaagtcccaagctcctgggctaagagcttccacaatggtctcgtcttttcctagattatataaatatatattnnnnnnnnnnnnnnnnnnnnnnnnnnnnnnnnnnnnnnnnnnnnnnnnnnnnnnnnnnnnnnnnnnnnnnnnnnnnnnnnnnnnnnnnnnnnnnnnnnnnnnnnnnnnnnnnnnnnnnnnnnnnnnnnnnnnnnnnnnnnnnnnnnnnnnnnnnnnnnnnnnnncacacacacacacacacacacacacacacacatatgtgccattgactcgggaatctgtaaaataaaaataagtaagctaaacactggctttagagatgctccgcagttgagagtacacgctgctcttctggaggacctgagtttgattctcagcattcacatggggttgactccaactccaggagatccaaagccctcttctggcttacacacacacacacacacacacacacacacacacacacacacacacactaaaaatcttaccctcctttatccccctttactatttttgagacaaagtcttactctatagctctggctgtcctggaactaacagagatctgcctgcctctgcctcccaggtcctggtttctgcctcccaggtcctgggtttaaaggcatatgccactatgcccagctaaaatatgaccaataaggaatccctgagtgccaataccaactccaacaatgggactttatgtcattctctacgtctaaaaataccactccaccaacctgctccaccctgaagctctccctttaggtccctcaggcaagtctgtgtacataagcatcgtgaccggagtttatacttcagcagtttgcccgggacacactggtctcactgtttatcctagaatagtcaccattagaactgtcttccattctgaggtttctacatttgaacaaaagttatattgtgggtaactatctagcttgtgccttgtgcacctcatagtctagggctctgcaagaacaggacacagaacaaggatacttcaaccaagggaggtgctaggaggacctccagagcccagactatgaatcatctgaatcatagatgttgtagaaagatgtaaagatctggaagcatggacgccctggtcaccataaggagagatcaagggaaagactggggaccacagaatggcttctacagtgtaggacaagaaatatctttcatcagtcccctacttggccctttggccagagtgttccaattatgttagtaaagagatagtactcttcatgatagaggacaagtcaagaataggttatccactgacctgtcctggttcctggaaacatgatctccagcccagctcaccattctacagagtaaggtaccaacacggtctccagagaactgagcattcaagcagagctatgtgccctttgagcttcttatccttctcttccttatggctatcacatcgcaggcattctgatctccaaggattacagtcccatgtcagaaaccatgggcccagggccagaagagagccaagtgggtgtttaagtacatattccactaagactgaccaacaatccagagagccagtgactggcaacgccatgcagacagcagcagttcagagcccacgtttcctggatcctaggcaagattcactctctagaatccagtcagtagatccatgcagcctcctagaatccctggcgtctgttgttctttttagataaccttttaaaaagtatgatgctgttgtatttggcttcagggtggctttataagggccggatggtgtccaggtttccctctggggaaaaaaaagtccctcagaaatgagagtcacttcccttcctccaaaatctcctctcctggtctggccagaccccaggattgcatgaaatagtttatgaatctctcttttcctttcttccccaggttactcctttttcaatgatgctgaagagaccaagactggcatcaaagactgtaagtatgacattcaaactgcccacagctgtgcccgcatactggccacttgggtttgatcctgatttaacaaccacactagaaggttgatgaaccaaaagcaagcacagacttggagaaagagtagagaaaatgggttaaaagagtgtgacagggaaggtggggtctgtgggacaataactcaagtcctccttaagactccctgtctataaaatatcagggcccttcagggctgtggtgagtttaagaagcaatgaaatttgtgcctggtaaagggccttgtaggtgcctgcagtgagaatactataaagccagtgcccattagccatggtgccaatggcttccagcgtttaccggtcctatggttgctgatatttcagaataatctaaacccattgctaagtcgttgataattaaaggatggtggaatagggggatctcaaatgacccacaatcccaacaattagttcatgtctggagatggaggcagggaacgggaacgttggagcttctgttttaaaaacatttctatgtgttctttgagaattccatacatgtatgtgatgtattttgatcatgccttccaatgctgatgtgccaactagaggccacagagtagccaaagaggacagggtcccatcctggaggctttggtagcaattgctagctatcatggttctttgctttttgggtttttctttttaaagatttatttgttttatatatgtgagtacactgttgctgtcttcagacacaccagaagagggcatcagaactcattacagatggttgtgagccaccatgtggttgctggaaaatgaattcaggacctctggaagagcagtcagtgctcttaaccactgagccatctctccagccctatcattatgtttctaaagcacttagcactgtgccaggtatagagtcaggagtcctagatatatgagctcacatgcatgccccatctccatttgcatctgaagaaaactggggtgcagcaactttagagtaatcacagacctgggactgatatgaacatacatgcatgcgcacacacacacatgcacatttgcatgcacgcatgcatagcagctcccaagcccttctatttgttcttctgcctacttggtagagatccaaggtacctgggagttgtctagctccgaaccttgcttgacagtgatccatcacaggggatcttcatttgttcctacccaaagcccagcaagcctcgaagccatccaaactggccaagcagcaacagtccagcccttgatcatttttttttcttctctttccacctgtcccctccctcctgcactacagaaatgtcagtagagaccacaccatacccaaggatagagcttacaagcttgagttcatggccagcaactcctgctcttgagtatctctgaggcatgctagtgtggggttgggagttttgaatggactgacagtgtcatgaacaggagtgagctcgattttgaaaccctgtcaccaggcctccatcttagcttctagaggacacctgattaggatttcatgatgataaacttaaaattttaagcttccagtatcaaggacaaccaggcccgcccaagcctcagtgacagtagcaggaatatgcctccccttgtgccacaccaggtacccccgctgcttgggtactgttgctgtaaggctggtgtttgcagacatgcagcattccttcacggtactgcaacaaaccaacagctcaccttggtgaagggtttaatcaggtgcctgccttgagactggcagcaatgacgccatctcctctgcctccgcctctatctcaaccattagattaatcaaaggagagagatttggaacctcctcaactcatgaaggacttcaaagtcacctgatctggaagagtaggaacagagtaacctgaccagatggatcttcacgtctcttgtgtgatccctctgctctgtgcccaccacctcccctcatcccaccaaacagactccatcccaagcacaagggaccacagagatgaaaagcttgccctttccctggctctccttgtagtccagtgaaggcttcttatctgttcgtagtcagtgactcagtgactcggctttgtttattgttatggctccacttgcttcccccgccccctaaaagattcagtaacacaatggggaagtctagagatggggataggcacacagcacaaaagagccagtgaccgctgctcagatcatttgagctaagtgctcactcggtgcctaccaaatacctcctgcaaaggacatgacctgcttgtgagtgtcagctctgggacctctgggacggaggtgacaggtggagaaagaacactgtactcaagtcccagcctggcacctgtacaaaaattttaaactctctgggttccaaactcttaaataaaatggcaataatgtgagcatcatccaccgttgctacaggactatgctgcagtgtatgaggcctctagtaaacactcagcacttaataaaatgccccatgaacataagaacataagtgaagaaaagctgagataggttttaaaggaagaagaaacacatgggtgcttttagacctccaggaggtagccgggggctctagcacaggacatggatgctcttagatctctagcccaggaggtggactcaggggaggcttctgaagaggttctgtgggaatgagagtctgctgggtagatgtgaggaaagtcactccgaccccactgaaacccgctaacctgagatgaaagaaaggcggggagcagaaagagataaggctagaggactggggggtccactttatgaaaggcctgcttaatgtgacagccttcattgtggtgatactacaagatgttcatgtggggagtgatacaatccagtagcctagaacacaggacctgggcaagagtgtacacgggacacccttttttcccaagatcccttgcgtattcctttgtttcattaatacatatcctagactattcagtctgcatgattagtgtagtgtagtggctgataataacagttatttaatacctgctgtatgccttgcactatgctaggtgctgagggaatacataggtagaggcaaatcctgccctctagtggacacagacggcaaagcacacaaatcaatgtgtcatgtaggtgctcaaaggccagaaagaagtaaatgagagatctcagtagaggcccaaaggcgccgatgtgcggttacaattttcaaagtgggaggaagccactcctggaaggtgaatcttagccctgactgagatgaagatgtgaatacccagatagtcaaggaagggacaaagggcgactgtaaatgccccacggtgtaaggtgcctgcctgatgagaaagcccgtgtagctgaagcaaagtgaccccagagctggaagaatagacagagacttaaggtgaggcaggagctgggtctggttctaaaattctctttaaaatccaaataatttcggacaatgcatgtgtgagtatctgagattatcaatcaaagcacaatgatatgcaatcccttccaatactgagttaactctcgcttcctgcatgaagtctcatctccttgtttttgctgggtcccttccaatctgttctccacacagtcacaagagggatcttcttaaaagatgggctgctgagatagaaatgtagctcagttaagtagtttgtgtaacatgaatgaagccttggctttcaccccagcataaactggaaaagccagtccaggcctgtattcccagcacttagtgaagaggtggaggcaggagggtcgggagttcgaggtcgtcctaaactacagtgagttcaagatcagtgcgagccatctaaaagcctgtctcaaaagaaggcagggcacagggatcgcagaattcactttaatataaaatctcaaaccaccacccagcctccaaaaacatcacctaccactgtctgcaacttacatgagtgtagtggtgcctcccgctctctccagccacagggtatgcaagcttcctaggcactnnnnnnnnnnnnnnnnnnnncctttctccttccttcccttcttcccttctctccctttccactctcccccctctctcctcctctccctcctctccttctcctccttcccctcttcctcctccttccactggttcgtaatgtaactctctcctcctgtgagctctaccctcagaaagaagacaccccttacctcattctctttacagcgtcatgtattgatcacatttgaagcgacaggtgatttgtctgtttcatctggggttcacctggctccatgagcagggactgtgcctgtgtcccctctcatgtatccctgtacgcacaggccccaggactgagcacttccatcccatcccgccatctcctaaccaccctaacgagcctcctctcacagagactgcagttaagttccgttctttggggtgcagcttgaggctcctcccctgccacgagtccttctgtttcagatgctgattccagttgcttgaaaacaagtggcatcaagagtcaagactgtcacagccgaacaagtaagggtccagacaccattccccttccctaaggcagttcacctttgaagctaagcgtttgaggggggcctgtcccctccccagggaggcagtggagaggctggtgtttgtttccatacatgtgaccaaaatcatgactttcacttggacttggaattttacgaattaaagaaatgttctatattctattactgaaggagggctttgtttcctgagccattctgcggccttctccttgaagtacccaggggaagaggataaagggatgggaatgtggggagttgagcggtccaggagcctttcccagcgctgagatctgcccggggcagaatctagccacttaaccattggcagtagagcaggtaccttattgcacctttgacacctacagcaactaaatagagtctggcattcccagagccaggaaattagggagtcatggcccagatcattcttatccatgccctaaaggcacaagaaaatgccagctccccgtgataagtgaactgcagcatagacatcttcacacaaccctcctgctcatcagcaaggactgagttcatgaggagctgcagggaattgggtaaatctggtgtctctgcacggggattttaccagtagttatcagaaaacagacttgtcccagcttggtaaggctccatgcagagtgctccaagtgagagttgtccagcccagcaacagttcttacaggttaattagttacctctctatatacatacatatagataaatatgtatatacatgtatatacatatacatccttccctcccaccccactgtcttttaacacctttcatttctttaacacctctcatttctttttattcttttaagattacaattacatcatttctcccttcctgctcctccctccaaaccttcccacatacacctccccattcttcttcaaatccatggtttcttttttcattaatagtcattgcatttacatatgtgtgtatatatatatgtgtatatatacatacacacacatatatatannnnnnnnnnnnnnnnnnnnnnnnnnnnnnnnnnnnnnnnnnnnnnnnnnnnnnnnnnnnnnnnnnnnnnnnnnnnnnnnnnnnnnnnnnnnnnnnnnnnnnnnnnnttgcctgtagttctttgtgtaacactgaggcatcgtgggctttccacatgtcatttggcctggtcattggcgtcttctttgttcataactaggcaatcatgccagtgaaattttatgggtattgcttccactggatattactaggagacacaatctctcttaaaacaaaaacaaaaacaaacaaaacaccaaaagacagttcaagtgggggctcactttattctgctccttcccccaaaggcctccaaagttctcacctgtgggaatttgtcagagacttgctgctgtcccctgaagagaactgtggcatcctggaatgggaagacagggagcagggcattttccgagtggttaagtcagaagccctggcaaagatgtggggacaaaggaagaagaatgacaggatgacgtacgagaagctgagccgagccctgaggtaagtgggcagcaacggacgcagtgaacctgcaaagacaagttatataaaatagcggggccggggaaacccacactctgttcaaagcttcccctcccccgcttcatatgaaagggtcacgagctaaacctcttcttagtttcagatgggattatgggtggtaaagtgacccaccatccttttttggccttggcagcattccctgggggggatcaccctaaacccaagctgtggtgcacaccagcacacaaacgcacgctcaactgactgtggagagagaggttcagcctgtgaagtgtctgggaaggaagggtttaagtgtaagctgataacaggtgtgaaaataccagggtaagtagagcccgggctatcacctgagagagccaggagtgtttatatatgctgttgtttttcttgtggtgcaaaccttctctggatttctctcctttgcttgctttcacagatactactataaaacgggaattctggagcgggttgaccggaggttagtgtacaaatttggaaagaacgcgcacgggtggcaggaagagaaactctgatggacaccggacaccaggctcatttgatggatttctgttgttggaaacaatcagatcaaactagacatttggaaagtctccctcctcctcctcnnnnnnnnnnnnnnnnnnnnaaggagatgcagttggcatcaagcttgtactggtcacagcagaattggagccattcccagacatggcgcttggtccagtattcagggtgcactgatgtccagtaggaatcacaggctgcaccagagcacagagaagtaaaaggttaccaaggggtcctcaaagaatactccagttatcttagcatcgttaaaggttccctattcagaaagggctctaggtctggcatgcacttacaaggatccaggttatcttctctacagagaccaccagggagatgggattctgtagatggctgttgggaccagagagggtatgaggcaggtaggtccccctccttcccctcctcttcttcctccccctcctcctcttcaaaacctacaaacacactgataaaatttctgcatgtctcagcttacatttgaattcagttgttgtctattggggcgatgccatcagcccttaagcaatcgtcttcatcccaagggggaggaagggatggtcttgtggcaacttggtgtgacactgtctccttaatgaagtgtttggagctaagggagccagtgttatgggtgctgtttcacaagaggacccgttgcaccattaagacacatgatcctcccgttccaggggttctgagcggtcgactgaggcagcttgcctgtggttagtttttaggaaagggagatgtaagacttccttgctttagatttgaaattatcacagttatattccatagaagaatttttaattaaaaaaattttagtggctaagccactaaactgggacctaattggatgtagcctaagttactaataagtctcttaaccagatcaccatttccaaccacttagccacagtcacttgatccacggccaatccttctgaacttaacatccttgtagttagtcaccttgggaattgctacctagattgttacccccttcacctcactggtggctatcatcaggtctacagtgacctgatcaacagacatgtgcattaatttctaaatcactgctgtgcctatgattcaaaccgtcagcgtgttcagtttattgattctctctgaggtcagaatttattgattctctctgaggctaagacattaaacctttaccaagcagagaacgtcctaacaagccacgatagccgaacacagcatcgatctcttctcttttctgatgaatactcaaactttccaacatattctcttcacaaaagtaaagacagtgaatttacatcaatcaacgttcatgggttaaagtctgcactgacatttcctcgtctgccgttgcatgctgttggcatgcaaggtgttaatgacctgcaacatggtggagtgccctgaaccctaacttccccagagttgggactgtctagtgaccggcactgaatagcaatgcaggctgaagacctccaggtttagaatttaacctcaaaagtaacttgtttttaaaaagaaatgtgaattactgtaaaataatctatttttggattcgtgtgtttttcaggtggatatagtttataaacaatgtgaataaaaaatatttaacatgttcaaatgtctgtgtcttgttcaattcagcaacctaggaacctttgatggctcattttctagtagctgggactttaaagagtcctccaaaatctaagaagtaagaatcctgactgctaccttcaggtatcataaaaatttctactactgaataaggctcataggaccaacaacattttttttagatttatattatttaatgtgtatgagtgtcttgcctacaagcagatggaccaagtgcgtgcctgatgcccatagaggtcagaaggcttcagattccctggagctagtcatggatgcttgtgagccgccttgtgggtatggcaaatggaactctggtcctctgcaagagcagccagggctctcaactgctgagccatctctccaaccccaacaaatacatttttgttttaagttcatgatgtttgtgctgtactttgcttcttttaaggttatatgttatttcttggtgggaattgtcttatttagaaattagacacacacaaaaacaacaacaacaacttccctagataaaaccaaatagatctgagccttagatttttcagtcttttttggcataaatttcttgaaactgagctgaagttgcatcttgggacaagcacttggtctcctcttcacacctcttagatgtgactcggtcagctactgttcatgtttgttctagttggttttgtttgtccatgttggttttggtgttgggttttttccgacattttaaatttggagcctgtgctctggaggtaagtactatgttaaggcctgaaacaaagccccaaattgactgtatcgtctgaggtcagctacagtatatatatacactctttgccaaataagggcacactggcggtttccaggatgtgcatttgggggttccagcactcagcccaccacactcgtggaagcaggtgtcctgtgtaaagatgtagtctaggttagactacatccaaggacagaaaacgggaaatcatccaagcctatataaacaatgccaatgagaaataagaaaaggtcaaaacaccaaccatgccaagtttgcttcatcaatagaacaaggaaagcatacttccactcataaggctctgcagtacagctacccacagcaagctgttagagtgctaacattacatttacatttgtttaaaatacaaagtatagcttttaaaatccactcatgttgtcctttcacacctttcaaagctctcaaagggagacctttccccttttgtccctcttaccctgtgatcacttcaggaaccgagaagccaagaaacagccgcacaggtaaaacttatttctagaccagtacagtggctctgtgggcaaaggctcttgccacaagcctggggaacggaggccaatggctgggtcccctgtggcagaaagaggaccaactcccaaacactgtcctctgatcttgacatgtgcaccacacacacatgcatgtatgcacgcttgtacgtgtgtgcacacaggtacatccatactcaaaaattaataaaaaaaaaaaaagcaaaagaaaataaaaactgtatcagaagagaaagtggggtgtgagttggggacaaactgtgagaaggccccgggggtggagagctggggcgagggtgggggagggtgtcctccagtgcagtgtagaatgggggtgctgctcagctctaactcacatcccctccacgcagcaaatgctcctcattccatggcctcagcctcagccagagaactaccagtgggcatgatgtgaaggcttgaaaagcactcccacgacccagatggctttcttgactctaccaccccactctgggtctcagcagagtagagatgtgtggcattgctgtaccagccaaactgtccccagctgacaccagcctggatcgggctgactgaacccagggctggcacaccaccactgttgtttgaaacccctggaccatacagtggccatgaccatgtgcctaggcactgatgtatactgtctcacccccacatcctccttaggattcaactgtgcagcaattagggtgtaacctcaatactccagaacgagacaggaaacaaaacctgatgagggaagcgaaccttctatctttgaaagtcaccagacgtttccacggaaaaactgaagatacttcatagcgttagcctggcagttctcaccctgtgggtcataaccgttagaaaacacgtatttctgattgtcttaggaactcccaaccataaatgtatttctgttgttactttataactgtaattttgctactgagaggtgtctctgttcctaagaccatcaaaaatacatactacccgacggttgtgacccacaggttgggaacgctgggacacatggctcttaactaccagcttatgtgagaaaataaactatagtagggcagaaccgtagctcctaactccccgacgccgtattataacccatatgcaaataacctccatctctactggctcacggcattcattttttttaagagtttatcttacagacttaatatacagagaactataagcaccttctccaagaggagttgggtgtaaacgggtagactcactttctgtgtctacagacagaccagtttcaggtctgctcagatacaggggtaagtggtggtaaagagacagttcgtatctatcagccagggacctcagagtcctctgaaggtacaggcagctgtgagctcacaacgcaggcactgggtaccaaagtcaggtcctctgtaagaacagcacaggtagttaacgtctgaagcactcgctccagtcccaagggggtttaattctcctgaaaagcaagctaaggagcaaaggatataagaacctccaaagtcaggacgttgactgctgtctcagtgcgccagcaggccatccaaagacagacaccatggaggctctggccgctggcgcttttattgttactgcagagagagctggtaatctctacttcacattccacattatacagagctgaaagcaaccaaacacggtccttccatgtagatcattttattgtaaaaatgtaagcaagtacaaatcatcctatgtgaaatcactgcgtattagcatcaacataatccaagtgggaaaaaacaagaatctgattagctgcacagcacagcacagcacagcaccgcacagcacaggaataaacattaagtttcaacagtgctaaagttacttttggaagacatgatgcaagtatggttttgcttataaggaccttagaaaaataaaaaaaaaattctgagtgggccatctttatcatctcttcatgtgtgtgtatgagtgtgtgtgagtgtgtgtatgtgtgtgtagtgtgtgtattgcatgtgtgtgtgtgtgtggtatgtgtgttgtattgtatatataccagaccatgaggtaataggagaatacactattctcgccaagatttttatcttgtctaatcaagtcatgtttctggctagaacacctttcttgtaatcattttaaatgtagtcatttaaatgaataatccaaacagaagtcctattagatccatgtttctgttaaatgattgctaagccctaacctttcatttcccttcaggaaacggcatcaaaagcatggttatcattcactctagaagcccggattatcgttttaaagtcatcagcgtgagtctgcgctccggcgggggagaatccatccagcgttgattacaggtgatcctcaggctcggcttcacgagaggtctcctcagcggaggctgagcaccggagttacaggttagcttttcccttcgcagccatgtgagagccggcctgcgtgtaggtgtgaattgcgttctgtgtcatgggaagaaaacacaggaccagtgagttaggaacctgggatttctcttaaaacgactcagaaatccatccactgtgaatgaattcagtgttgcgtaggggctaaaatgaagcgttatatgttgtgccagtaagtcaaagaaaatgcctagtaactgctgaactgaggcgataatggcactggaaaccaagctgtgtctgacccagcccagcccaggctcctctcccagccacaccactcagggctcaccttaggcttctcagcgttgtacttgtccagaagagcctggatgcgggccccatagtcagggtggacgtcagtgaaattcttgacctggagtcaaaaggaacttacatattagcatctcctcacccctatgtgaactgccagcatcttgtgcttactggtcaggggacgaaggacatttcaacaggtcatatcaggttctggagaaagacctggggggtccagtataaattctccaggctatgggctgagctgcctcagagaagccacctcacctatctgagtttccgtgtccccctctgtaaatgagcaagacaattatacttatgtggatcatagagacacatctggtctttatcctccattcctggcacatggatcctgaagcctgtggaatttactgtcgtccgcgtaccactgagatggttcgtgggaggctcagtgaacagcaggacagagctggtaccagacacaacgagcataggatttgaaggtgggacttccaatcccaccccgagcctatggatggtgtccagtcacctcataactgatgacctggtcagccatgcctatgtagggagaaccccatgaaagtccttgtatgacggggctcccagagcctcttggtaggtgtcgggaggctggtacggctgagaggcatgaaagctggtagcccttcctccccatatcgagctcaggcgtctcatccatttggtgagtactgagatgccctttatgatgaacagataatactacataaggcatttccctgggttctgtgagccatgctagcaaataaccaacttggcagaggctcctgtgaaccctgagacagcagtcggaactttcatgtgccagcgatcttgcgtgaaatctaaagtggaagggttcttacaggtttgacccctaaatctgcggttatgaaacaagttccagggactcctgtcacaactggactgaactgtaagacaaccaaacaccaccacaagggcaagaacctcttattgagggagaaagcatatgacagacctcacaggatattacggggaaaacacacctgaacaacttgtaccagccgccaataaacagctgacctcacagtggatacccaacaagccagtaatctgtgtgaaagggcagacttggcactgcctcgatttaagacgatgcacaaacagcacagaaaggctactcagtttatattgaacgttgttctgggacaacccaaaaaactagaagccagagagagggctccaggtagcccaatgagcagtcagcagacacaccgcagcacctcgactcagcccgcttcggggaatagctccgttcttgctctagaagaagcaagcttctactctgtctgaagaagagtcgcagactcatgacggtgaacctggatacaggcttcaaaccacaaaaccggaaacaatacctgtcatcctctgaaagcttccgggagacaaagcagagccacggctgctgtcacacacagaactgactacagctgaactgcacagcacccacaagaattcactctaaactcaactgaatttctacacactggaaaaccagataacaatgagtgtatgtatcacgccagacaaaacgctgagacaaggtaatcgaactttgactgagaattgctgcactgtctacaaagtcatcttagctcaggtaaactagaaactgcttttccttgcagggttctcccacacggctgcactacctccatgagccagcaggtgtcaccctctagccatcaaagccagactcaccgctttcttctgaatgaaaagctgagcgtccttcaggtggccggcaatgttctcacacaggcgtttcctctcctcctcgttcaacacctttgtgtagaatgtccgcacctgttcagcaacaagagagcaataaataaataaataaataaataaataaataaataaataaataaataaatcaaccatttttccatgaataaaactccaagagtctacattagaaatgcacaattaaaaatcacattaatattataatgaaaactgtcatatgtgatgaattaatttcttttgcattcatttgttggtaatagcttgtaactggttttcttctctgggtgtctgtgcagnnnnnnnnnnnnnnnnnnnnccaattttctcaggattggttgctgccacttagcacccacatgcttccaaggagcatgctccgtctagtgggcagtactctttcctggtcatcggcactacgttgagaccagctgtagctttctgcaacccacaaaacctaggacttgaactttaacttctcggaggcataacaccttcactagaggacacccccacaggacgcatacttcccgaatacctccacttgctacggggactcgatctcattactggaacctagagataacgtgtttagctgagctgcagtacctttgcaaaacatttaattcagtctgtctatggaggtaggaaggtaggcagggctggagagagggagggctggagggagggaggaggcaggccatctatgacatttttctttacatttatttatttactgaatgtggagaagcctgtgcacacatgtgccatgtgtagatgtgaaaggacaacttgcgggtatcacttctctcttctatgtgagttccagagctcaaactcagtttgccaggcttggctgcaagcgcctttaaccactgagccacctcgctgcccaaaaagtaatttctggaagcattcctagtggttcactgcagccagcttctcacgggagctcactgccaatctttcagggattcgttaccaagctacagagcttaccgcacacacacaactttattttttttctgcagcttttctgagctcttggtcactaagcccttgctttgtcctccaaggcgtttcttttttaaaaaaagaaaaagatttatttccttttatgtatatggatgttttgtctgcatgtattagaaatatacgccacaagtttgcccggtgcccagggaggtcagacaagggtgtcacctcccatgaaacggaagttttggattgttgtgagccacatatgagtgctgggaattgaaccctggtcctctgcaagagcaacaagtgctgctaaccacggggccgtctctccagcccctcttcgaagcttttaatctgtctttctgatgttcttcatgagaggatagatctgatatgagcaagtcctctgagccacaaggccaagggaatcatttttaagggaaaaaccatgaagttttctgggtactggtcacaggacttttattattgtaccacttcgctttgaacccataataccaggatcaagactggttaaaaatgcgagtcctacataatgataagaaaacttctcactaaaataagaaaacatagcataacacaaagctcacatagcaaaccttaacgtacaaatggcagtctcgtttctaaaggagttgtgtgggtttgctttgtaccaatcttgacctcatacaagcaaacccttgactgccaaggctatcctgcagtacatcgaattcacccatatctctaaaaataacctactataaaaggcttacctaaatgtgctatatatcccacaataaaatagcactagcccccccctctttcaaacaaaaacatcttcacagtgaatccagctatgtatttataaatatttcacttggaatctacatttttaaactgagaaaataaaaataggttctaactgaatttaaatatcaatttacagaaagctcccacaagggcaactaccttctcattctttggctgggtgtggtggaagttacactgagcgaatcccagcccacacccgggctcccagagcatccacgggaaaagccctcggggcagccattcataactggaaacagggtgagcacctgagccagggcagctagcagtagggtgatccgagactaatgatacagtctggggtaagaagactatcggattctctcaactatgacgggactagagtgaagggtgctcaaaaagagaaaagctaagaaaaaaaacagcagaaaagagagtcggccaggtatgggcgtggccaaacagcagaagttgagaggcagaggagaaaaaaggggggtgaggaggcggtgcagtgggaacaagcagccagcatggaaagcggaagtgaacaccccccccccactccccgagaacagcagagccgggtgcccaggagccctgagcggaacccacacactctcgatgccagttttgttgtgagttttccaggattaggattcaaacccaaggccctgtctgtgcaaggctagcaaagtaccattttcctggtcgtcagtggccgtctcggatcaccaggtctagtccctggaaactgagttcctctgccaatagacttgctcatttcttaagttcccaggagatcaccgtccccagcatcgcccaatcatttcaataaaggctgggggtgggggctgagaacgagtcctgatatgtgaaatggacagagtagccagtcagctctttggctctagccaatagagactgatttgttagagctaagtcttctttggattcaattcaaggtgcattagacactgtgatggtttgtgtatgctcggcccagggagtggcactattagaaggtgtggccttcttggagtgggtgtgtcactgtgggtgtgggctttaagactcatcctagctgctgggaagccagtattctgctagcagccttcagatgaagatatagaattctcagctcagcctgcaccgtgcctgcctggacgctgtcagctcctgccttggtgataatggactgaacctctgaacctgtaagccaaccccaattaaatgttgtcatatgtaagacttgccttggtcatggtgtctgttcacagcagtaaaaccctaagtaagacagacaccttaagaagtggccagtaagtccgatgtgatggcatgcgcctttagtcccagaacttgagagagagaagcaaggagggcacataggagtcaaggccagcctggtctatataggccagcagagctatataatgagactgatgggactcggtaatgaggtctgacaagaaaaacagccaagctcccaggaggagcccagaaagccattacctgagtgacattgtcttcattagcactgttgaagcgtttcacatctacagcgcactggacgctgtgctccagggctgagcgctgctgctctggtgcgctgaagctgttggggtaatagttgggggcaccacctttgaaaagaagcagagacatccttagagatgtcatcttagtcatccttagtgagtcatcaatctgggaaggagaggcccacagcagtaatcaaacacacatacattaggtgcccatgtaaacacatcacatactgggaaatgattctctctcctcaggtctaactacaggctcggggacactgccctgcccacaggcacgtgtgggctgcctgagtaaagagatctcaaatgccagtcaacacttcagaggtccttgtctataacaccgcctggtgcttacctgcaccaggaagtttcttcaaagatgtgacgtagttgtcactgagatcaggcccagagacaccgggggatctgatcgtctcatttggatgtaggctccatctaatcgttgactcaactgtacagagcaacctagttctatcccctccttccctggccaaatctgaagctctgagatgttcatagctggtaattgttggtggggcagggctagaagcctgcacttctgtctgtttcaatgaggaaactcgacaaaactcttcctcgcacgcctttaaggctttggaacatctctccttagctgattctaatgttcccctcaattctatttttactttccccacttggaaaagttaaaaaataaat

SEQ ID NO: 724 - DNA, 2204 bp, Mus musculus
atcacacggctacaggtgcctttatttctacagtccgctggtgctgggagcgcgcttgccttctcttgccttgaaagccttctgtctggacctagccaccacttgtcttcacggtgatgttggactccgtaacccatagcaccttcctgcccaacgcatccttctgtgaccccctgatgccttggaccgatctgttcagcaatgaagactactaccctgcctttgagcatcagacagcctgtgattcctactggacatcagtgcaccctgaatactggaccaagcgccatgtctgggaatggctccaattctgctgcgaccagtacaagcttgatgccaactgcatctccttctgtcacttcaacatcagcggcctgcagctctgcagcatgacgcaggaggagttcattgaggcagccggcatctgtggggagtacctgtacttcattctccagaacattcgctcgcaaggttactcctttttcaatgatgctgaagagaccaagactggcatcaaagactatgctgattccagttgcttgaaaacaagtggcatcaagagtcaagactgtcacagccgaacaagcctccaaagttctcacctgtgggaatttgtcagagacttgctgctgtcccctgaagagaactgtggcatcctggaatgggaagacagggagcagggcattttccgagtggttaagtcagaagccctggcaaagatgtggggacaaaggaagaagaatgacaggatgacgtacgagaagctgagccgagccctgagatactactataaaacgggaattctggagcgggttgaccggaggttagtgtacaaatttggaaagaacgcgcacgggtggcaggaagagaaactctgatggacaccggacaccaggctcatttgatggatttctgttgttggaaacaatcagatcaaactagacatttggaaagtctccctcctcctcctcgtccccctccttcccctcctcttcttcctccccctcctcctcttcaaaacctacaaacacactgataaaatttctgcatgtctcagcttacatttgaattcagttgttgtctattggggcgatgccatcagcccttaagcaatcgtcttcatcccaagggggaggaagggatggtcttgtggcaacttggtgtgacactgtctccttaatgaagtgtttggagctaagggagccagtgttatgggtgctgtttcacaagaggacccgttgcaccattaagacacatgatcctcccgttccaggggttctgagcggtcgactgaggcagcttgcctgtggttagtttttaggaaagggagatgtaagacttccttgctttagatttgaaattatcacagttatattccatagaagaatttttaattaaaaaaattttagtggctaagccactaaactgggacctaattggatgtagcctaagttactaataagtctcttaaccagatcaccatttccaaccacttagccacagtcacttgatccacggccaatccttctgaacttaacatccttgtagttagtcaccttgggaattgctacctagattgttacccccttcacctcactggtggctatcatcaggtctacagtgacctgatcaacagacatgtgcattaatttctaaatcactgctgtgcctatgattcaaaccgtcagcgtgttcagtttattgattctctctgaggtcagaatttattgattctctctgaggctaagacattaaacctttaccaagcagagaacgtcctaacaagccacgatagccgaacacagcatcgatctcttctcttttctgatgaatactcaaactttccaacatattctcttcacaaaagtaaagacagtgaatttacatcaatcaacgttcatgggttaaagtctgcactgacatttcctcgtctgccgttgcatgctgttggcatgcaaggtgttaatgacctgcaacatggtggagtgccctgaaccctaacttccccagagttgggactgtctagtgaccggcactgaatagcaatgcaggctgaagacctccaggtttagaatttaacctcaaaagtaacttgtttttaaaaagaaatgtgaattactgtaaaataatctatttttggattcgtgtgtttttcaggtggatatagtttataaacaatgtgaataaaaaatatttaacatgtt

SEQ ID NO: 725 - protein, 254 aa, Mus musculus
PPLVFTVMLDSVTHSTFLPNASFCDPLMPWTDLFSNEDYYPAFEHQTACDSYWTSVHPEYWTKRHVWEWLQFCCDQYKLDANCISFCHFNISGLQLCSMTQEEFIEAAGICGEYLYFILQNIRSQGYSFFNDAEETKTGIKDYADSSCLKTSGIKSQDCHSRTSLQSSHLWEFVRDLLLSPEENCGIWEDREQGIFRVVKSEAKMWGQRKKNDRMTYEKLSRALRYYYKTGIRVDRRLVYKFGKNAHGWQEEKL

SEQ ID NO: 726 - DNA, 53601 bp, Homo sapiens
aaaagccttcttgctgcctccattcagcattacatcataaagaataagatattttactatttgcagcacacggtgaagactttaaagagttaattatggctcactggagtccgtccccaagatcccaagacccagaaattaaactgattattttcaaatgtcagtcttcaagagagcattccaggcaacctcctctgtggaatctgaggttgacgctggtttgcaaggtgacccaccaggatacacaagggtgggttggaggaggttatttgatttcggccttcctcttgtatttggccatgtattttcagagatcgcatcatctgtacaggcttggagagaaaagaaaagcaaggagagctggaattctacttaccttcttggttccgtggggtgaatccacctaaagccatctgtaatctctgagctggagagaccagcaatgtggccagagttcaaagggagttcagctgtaatctggatgttacaatctgagccaatctaaccatgcaggctctgaggacattattatcagtcaagtgtaattatagataaaatagttttattaatcggcttcctaaggggactgtgtttatctgatggctgtgtgtatgatgtgtgcatgggagaagagggaggggtctgtgctgtgtgtggttggtctgtacggtggggaggacagggtgtctgtggggagagtgtggtggatgtagggggtgtgtctaggtgctaggtgaactctctgtatgagggatggaagtgtatgtggtagcactgacagcatgcacacatgcatgtgtgtgtctgcttgcccaggtttattcagctggacttgaaattgtgcctgttttatccactataccttggatttgtcatcacccttttcccaaaaaagaggcttttctatatctgtacaataattagctagagtctatagagttcctagttgcaaactccacctgcagatgccctccttggctgctaactgtcagccaaattttcaaatcttatctccagacctatcatggtttgtcttaaatgtccatcaccttaaaaatgtttgtcagttgcaaagtatcttgaatgggtagggctcctcctgaatattgtttggtctggcctaaagtcaacttcactcagcactgggtaggaaaaatgaactttcagggcccagaactgcaggtttgatttaaatttgatcaggcatcagtggggaggtgggtatccagtaacactccgaggctaggttcccccacagtgaagctgaaggccgagaaactgcccagagactgtggaacaggcacagccagcctggttgcctctgcccttcctggcaatctacctgaatcattagtgcctggaccaggcctctccacacacagcctttttctgctggctgactgtgcaacttgctgctcaccctagctggaacacttgacccaaattattccccacttcagagggccttgtgcaaaatctgccctctgcctttaacttggcccaaaatgacagctgaaacctggggtggatacagcctgaaagccagaaacaccaagtggctgcttccttcctgtagaggtagatagcatccattctcccatgggcacctcaaaaaggcaaactcaccaaagccccactattaggacttctgatgtcacacctgttggccactctgcagagtgatttgctgggattcctggagtttctttgctcccagaaaggcacataagggcccgggggaaaaagaacagtttagataaggaaataaacattttataaaactactgctccatttaagatgaaagaggactgttggccaaataaagtggccttctcctaactcccagggtttgtaaacttttgatggattccaaataaactaaagatgaaaaaatggatgaatgaatatctaccatgtgccagacacatacacctttattatttcaattgatctagtgagtagttaatattattttcattttgctaatttagaaatggagacatcacagtaataatcatttattgagtatttaatatatgccaggcactgggctaagtgcttcatatattacatataccatgttatctcatttaattgtcaccaaaactgtatgaagtgacaatttattttcagatgaagaaaccaagtctcaaggagataagtaacttggctaccaagggatagaactgagatttgaacctacatcaattagactcaaatcccagtgctctttctgttactggtttttctttaactgccttcttatgtagcttatgttccttgcaaaaccatggatatctttttaaattattgcatcactcaaaaatattcagccaagttccacatctcactggttctttggaaccagagagatatcactgtccatacaacatgaaacagaatcctacccatctcccttcacacattgagaaagaattaaaacatagtttcatgaacagggatgtgggtaagagtgatgtccaggacattgaagacacctgtccaattgcttcacaataatttccaaaaattccaatcccagacacttaccttaggggtggacaagttctaaggggagcccacttaggcctacggcttggggtacaagtgagtccatgttgacatgaacctgtgggtgagtcttggcagcttctcaattttgaggcctctccccttggatgtgtcagtaccagaatcattggatttctgttgagatatgatgttaaactctgtaataaagtgacacatcagaaaacttcataatagttttgtaaaagcataatacctaaattcttataccattctgtgtttgcaacagagactttctctaaacaagttcccaaacagaaccaaactcaggaaatttcagtgtatgatttggacacgtaaactttttaatggccaatgaaactgtggaagatggtaaaagattgcaaagacatggataaaaacaacaacaacaacagtacgggccgggtgtggtggctcacacctgtaatcccagcactttgggaggctgagaagggcaaatcacatgaggccaggaattagacaccagcctgggcaacatggtgaaaccctgtctctactaaaaatacaaaaattagctgggtgtggtggtgtgagcctataatcccagctacacaggaggctgaggcatgagaattgcttgaacccaggaggcagaggctgcggtgagccgaaatcacaacactgcatcccaggctgggtgactgagtgagattctgtcaaaaggaaaggaaaggaaaggagaggagaggagaggaagaagaaatgaaaagaaagaaagaaagaaatgaaaaagaaagaaagaaagaaagaaagaaagaaagaaagaaagaaagaaagaaagaaagaaagagaaagaaagagagaaagaaaaagaaagaaagaaaagaaagaaaaagaaagaaagaaaagaaagaaagaaagaaagaaagaaagaaagaaagaaagaaagaaagaaagaaagaaagaaagaaagaaaacagtgtgactcccagaaaaatgtaggagtcatattttattttttgggggcaagagtaagagcagaatcaaagctggtgacaaagtctcattttgctgccccacacaagtttgctcctaaatagcagacaaaatcagaggccttttcaatattgaggtccccattaacagtcagaggtccccttgttcataggtgctgatattccagacacatgattcacaacttacccaggactgtcacatagtgacacatgtaagacttcctactcccatgagtaggaagtagcagtcatgagctatccatgcctactctctccttccatgcacggccaggtttcctcttgattgaaagcgcccccaagacactgcagaacacagtggccaatgggcctgagctttgagttaggttatcctaggattgaatcccagctctgctacttaggtgtgtgacctggggcaaattactaaagctctttgagcctcagttttctcttctgtaaaatgggtataataacagccccactcctacagctattgtgcttggcacataataagcatccatttctagcaggtcaccccaatccttcatcacccaactcaaatgccaaatcccacagaaagtttttttctggctgctccagcactattagctcctcttctctgaagtcctacagcccctagttcaaaatttggcttgaaattaattaatgcctctcaatatttcttcttgaattctctgttaggttatctattccttgaaggccacaactaggtcttactctttttcacatccctcttattgatattaaatactgccctattgggttttttattgttgtatttatcaaattcacattttaacatttctgaaatcaggacaagctttattatctatctgcatatttaacatagcgcttcctctaagacaattgtttaagtcgatgacgtatcttataaccaacaacatcttagcattaagtcttgtttgactgatgaggctagatctgcgtggatccagcatcacttctcacctcccatgctccatcttcacatccttccactcccatcttttgaccaaggacatgcctacgggtgacagtcagcaggagtgaggtgtttagtctagagctatggaagccaatgtgtgtggtcacacatgttatcaagctgcacgtgcgatcattcacactggacaggtgaggaaacaggttcagaaagttaccttctctcagcaagtccagtgttcgcttgcctgcaaaaagagtaagtgtttaataattgtatgattgataatctattgataaccttcattagcatgaatcccagattcgtcaagctaattagcctgatcgggagggaccaccccattcactacccaagattccaatggcaacactgttagcccagtccgtcctctaacaacagtatgggctggccacaggagtcgtccattcctcagactaccatcccaaacaactctctcagaaagcacacctcatgtctgccacttcctatgtgtggtaggaaaacatctaaagaaaatcctgtcttcaggaatccttcctatgagaagggtcctcttggctgtgcctctcagatctgtgcttttatagaggcattatggcttcagattcacggggcttacccaaaatgtagaaacctctaatagattgacttccagtgtctttaccggaagaagaaagaccagcaatatggtcatgcagttgcatcaactatttcacaaacattatcataattaaacctataactataaaatcatatttttgttacagattttaatgaaatcaaattctgtcattttatattacaatattccccattgactttgccattgtttaacctccagggtgccttcagtactggaaataacagagacctttactgtcctgaggctcatagccaaggaagggttattaagagggccacctaactgttgcttcgattgaatcggggcttctggtcaggaagatggtagcatgaacagctaaagagtgagttggatgtaggaggatgagggaaaacacccaaagaggaaacaaagcaaagaaagaaatctgaccaatcaatcaaccaattgacaatcaacgaatgagaattgcttaagcacctacttttgcacaagtctgtgcaaggcatttggggggacaaaagattcatgactcttgtccttgctttcaaggatcctaccagcaatttgggatgtttaagaaaattggtatctcttcaacttagattctgcctcaccgagaggtaccaaatggtagcataatggtaaagcttgtggactctggtgcataggctccatatatggtgcattggtgtatcctgcagaggctccagtactgctttaagcttcatgtgctatgtgatattgggcaagttacttcaactctctatccctgtttcctcatcagtaaattttaggtgataataatggtacctacctcggaggaatgatataaggattaaatgacttaatacctgtagcatgcctagacagttctttgcacccggtaaatgctcagcaaatggtagctattatgattattcattgtggaagaggaagggcaacattatcctacttgttatggtaatgcccaaaggttggggctctcaaccaatatctgtgtctctctctatagcccattacaataactgccatttattgaaatttaccatgcaccaagaatcatagtagtagatacttcactggtgaggaaattgtgaccctgaaaagctgatagctcatctaatgtctcccaggtggcaggtgctaggagtttgttgttatatacacccactgacagaaatctttttgttcccaaatatttgagccaatagagcatagaaaattgcattttctccaacagactcttttctaaaaataatatgagaataatagtgacaggggtctaatccaaagccagtgcatttcaccatcacactgtaaatctctccttccaatggtattatctgtgaatttacctaaacttgtttttctaactcgcttttgttttcagcctgtgctgcctcttgggatggtggtgaagttggcaggttgagggaaaaaataaatgacaaagaaatgttcaccttggttaaagaaagcaagctctaggaaaagcatctgagatgtgaagcctgttatatgtagtgaaaagaataggatggaagcctccagcctctgtcagatggtatgccctttaagtcacatgattttatgatccatgtaggtattgagtgcgttcttgatcccaagaacgatactaggcaccagattcagtgaggtaccagaatttccactctatactaacagacagattgtgccagcaataaccatgaatcctagaaatcttgagccaacagagacagatgggccaccttttaggccagtgttgaggccagagcaaaagaagagaggccaacttaagctcctgtttccacagcttgcctttaacattggtcaggcctgagttcaatgcaggtttggccactgaccaactgggtgagcctcagcaatcatggcacctctgtttctttgtcttaaaaaagaaaatagtgatggctacctcccacgataattgtgaaaaattaccaaggaaatacaagtgagtcatcccagcacaatacttggtacatcatagatgctctttaggtgtgattctctcctccctatccgcaaagaactgccccaggagcacccagaaactgattagcacaacagttaagaggatgggctccagaggcaggcagcctagactaaaatacttgctctaccacttagctgtgtgaccgtgaacaagttacttaacctctctgtgcctcagtttcctcatctgtaaattagagatgatcagtaacttccttgtcgaatatgtatgaaaatttaatgtaaggaatataacaggtcaaaatgtaaataagccacacttagttagggctccttctactccccaagttttcactcatttaattcacacaacaaccctacaggaaatgtattccttttttcccattttacagatgaggcaactgggatgcagagatgttcaataggcttcccagactcacccagacagcaaatggcagatcagagattcaaacttgggaagtctccttccagaatctgttttcttagccactacgttacaattataagcccaattggtgttacttaatattgctgtatagccaggacaccagaagcaggataggctgggagttctaaaatgtctcattccttcttctgccccctccctccaccctagtccttttaccttcctcttccatccccagtccccattcttgttgtcattcaacactcataatgaagttcttagatgcttcatgttcaatatcatccaagatctccattccaatcaaatttaagtttaaagtgatagttacacttaattagagtcaaattcttcttttattttgggtttatcttaatcatcccttttatccactgatccagaagcctgtaatttcacacacgggcacccagaaatgctatattattcatttgggaccgtgagacaaacagagttcatggtcttgtacatccattgtcagaagacttttatactcaaataattgagtcagttgggcagccacagcccctggggaaaaaattgagccaaaagagtatagaaaaaatataatttctccaaaagactcttttttttttttgagatggagtctcactctgttgcctcggctggagcgcaatggcgttatctcggctcactgcaacctccgcctcctgggttcaagcgattctcctgcctcagcctcctgagtagctgggattacagatgtgcaccaccacgcccagctaatttttgtatttttaatagagatggggtttcaccaggttggccaggctggtcttgaactcctgacctcatgatctgcttgcctcggcctcccaaagtgctgggattacaggcatgagccactgcgcccagcccaaaagactctttctaaaaacagtatcagaataacatgttttccctaaaaacctctccactgagaagaatgtatatgttcagaaagaaacactggtaacatttcagaaatcaatgacaagataggccagtgcccaacaatggaaaacacagtgtgtgggactatcacagtgcacagtcccctagaaaccaaagaggaagagaagtacagaattttaaagcttgaaagaggcccaaagaccatgtaatccagttacttgcaaaccctttctaagggcagattcttttgttcaaatgaaatcttacccggaagatttatataaaagctgagatgctcttattgagtcaggaaggaacggggtggtctagagcctaacccactctactccactcccatcctctcacccgcaaaagtccttgtaagggctccagggagcccctggggttcctcaagtcacagtttgaaaaaaatcactatttcaatcccacttcctccttttgccactggggaaaaatgaagcccagagaagtccaggttacccagccaagataggggtctaggcagtcacctatcttccttcaacaatttttccatgatgacaccccgaatcctctcacgaactgccttttgtttctgcagactatatgcgtatttgtatttgtgtgtttgtaaccatgcccggtgatcccaagaaaacataacaaaccagtccttgctttcgctttaaagcttggagtctgccatttgaatacaacatctcggctgcccaagatggctagaagcagaatgcaaaaaggcacagggttataaatacctgtctcatagtgacctgggacactgtgctttgcagcctaaattaggcagagtttctgttgtcacgaagaagtactaaaaagcgggcagttctcagcgagacacctgagagctggcatccacatgaggagaggccccatcacttacattacactcatgaagcccagagatgttagctacatttttctaggtagcacagctaggaaatgatggacactgaatttgaatctaaaggcaactagctgcaaaacctgaggtcttaacactgggcctataatgctcttccttctcaccacatgggaaaaacggagaaagacatgatcttacaaaagcactgggctcagccagcctgggagagaggcagcgcagaccggcaccagggtggaatctctgtgtttcccctccagcttgcacagaggaaaattcctcagcaaacgcacgatccccgcacagctcccagggacaagaattttctgcttgtttactgagtcccctgggctgggagtggggggttgcagggcaggggtgagctgcgcacaaaagcaggataaaggtaaactttctgcatatgagaaccatttccccccctccaaggagccgtgtcacactgtatgtcaccgtcatcaaaggggctgtgcgtaaacctgaaaaaccaaacggacctgtctgtaggtgtcacttatatcacaaggctacaggtgtctttatttccactgcacgctggtgctgggagcgcctgccttctcttgccttgaaagcctcctctttggacctagccaccgctgccctcacgtaagcgccttttctttgcttttttggatgaatcgtaaggggtgtcagggctcagaggctcggcctggggcctgggtctgctcgtccatctccagctccagggccggcacctgcgctgggtgcagtcccagggcctccgggagctgtttgacacggatgtgacggcttgcctcagagagacctgcttgcctccgcaggccgtgtggccaccagccctcctcacagccaccactccctctggatcccttagctgaaccaaggggaattaagagaacgcgcccaggcgctcagttctctatcctccctaaagcttctttaggaagggaagctggattttactcagaaaaatattcagcttcaaggaaagccccccacctacccttctcccctgactgaattcctttccccaccggcctgcccactgtcccccaccccctcgatacagagaactcccttattatagtttggggcattttcaggaatttgtacaaaacagttttaaaagaaacccatttgccctctgacatctccccagaagagaatgcttccagaaaagcaatggttagggtttttccactgtgttctcaggccttgtcagactctgcagtgtgtggggtttctgtggggttgccccctgctgacagcgacaggtagcacaagctccctcctcaggctgaagccgggcctgcgtgtggatgccttttgtacgcccgaaagtgtgtcagacatcactaggtgcaatcgcttcatgttacagatgaggaaactgaggccagaaaggctagatgacttagggaggcagctctgtggttcagtctagtccagagacccagggaaaggggtggtttgcccatccgagtgaacgcttgattctgttgtcttcgtgttctctgcaatactgtttttcataatctaaggtattctcgggccggagttttcagtttggtcatctccctttttcagaagtcaccagagtggcaaatttttagatacattgttgatggctgatttttccctctaaaacaggattgaatatatgtattatgccccgtcctttgcatatatcggattgcatgatttaaaaaaaaaaaaatccccattttagagatgaggaaaccgtagttcgaagaggggcatgaatatttatataccacatctatatgaaaaaaagcttaagaatttcagcagtctgggtagtaagaaatgtgccccacgttcgcagcagcagaggtaggatttaacccctgatatatgtaatccaaaactggtaagctttgcatcgaagcctacagcaaactacatggcatacctttttggatcttcgctgcaccttcagaaaaacagctacaaacaaacaaacacgcaaactccctaagcgagctaaagaaaaatgaggaatcacttgacaagaggtcagcaaattggttctcacagttgctagggttcctctcagaagaacaaaccctcaagcacccaaccctcaatctttctttagcagtaagtgttgaaatactccactgggttctcctcagtgggccccttcttagggaggtccaagggctgggaaattgaccctcccttgctcacaagtcttgggacggagtggacatttgggtatcactgaggctttaaggaaggaaaaccgattttcttcccaatgataccactcagagggtggggttgaggaagcccaatcttggccacttttttctatattttgcaccctatggcctagttctgcccagtgatgatttggcccgtaaacagccaatgtgtagatgcttaattgggccaatttttggtcacatgcccagagtgaagttgatgatcaccaccagagtcaggaaggaattttcctcctctggcaaactggccaaggctgagtggtttgctccttcccctctctctgggaggctgagcaggggtgccgggttgctcaggccatgggagccacacctgttattgctgcctctgatttgtgtgacactgagaagcccacaggcctgtccctccaactcggtggaccctctctgtgtgcatttggtgtgtgagccagctctgagaagggttcagaagccactggaggcatctggggacctcagcttccatgccatctctgcctcactcccacaggtacctgcagccaactttctcatgtgtgaagtgagcccacctgattccaccaccttgtgttaatcattcttgagcttttcctacttactaggcagctagaatgatgactacatttgggggaaactgattccagcttccacggatctatcggtgggcagtgagtgagggtccagagtgtttaaggtacccagctaggctgggcaaagaatatccagttgtcctgaggtatctacctccaactggggtagaaggcagtgggcacaggagaaaagggagaagaggaaatcagggagctttttcagcactaaaagttcagtctgtgtgtagtggttggattttcctccaatttggtggacttgcttgaccaaaaaaatgcaaatataatcaatgtgtatgcatatgtgtgtgagtgcccaggtttggatgtgttggctcaatcaggtgggtgtctgcagaaagtcacagagttagggcagaccttgggggctgttttatctgtgttcttgtttagtagttgaagaactgagatttggagaggggcaagaggcagaatcataactccaggcccagggctccttccatgatgagccagctagtccctcacaaaatgaaaagtatgtccagaacagcaggccaagagacctcccagcagatccctgtctgtactggcgctgacactaggtggatctatcacagcgcttctccaccttttttttatcacttctcctaaggacactttttaggtcattttttcttaatcatctccccaccagaaatgtgagtaccagagataaactatacatctactgtagacctttggagcatgataaaacactgtaattaataactcagttttttgatccccaagaactcatctttgttccctaaagaggggggcaatatcaccccccttgagcaggcctggcctaacctcaggcctgtgttcacatatccctgggcctcagtgttacttctgagaaagggggctctggacatctgccttttcacacctatcctgctctacctccactaaagaagtccttaagagctaaaatgttcaattattgcaaggaccttagagggcctagagaagagaggctactgaatacaaagcagccattattcttgaactctcacacctactgcatgctggctaagtagccaaggtcttttgtggagagcccagagttaataacacccactcctgctgtaacaggaaaaaaaaaaaaaaaacacctttttctgcttttataaaagatattttttccaaaagcaagaaataattacagaagaaaaatagcatgctgtacacctgagaaggccctttacaaaaacttaatggatataatttgccttagaaggaattaccaaagggaatcagatacagcattgtgtatagcactagagagattacagatcaagtgagtaggccggtataaagaggagaaagaataacaatattaaaagaggtaaaaatactattgatcaaaaaatatttctagtttttatataatgccattcaatttaccaaatgacctttttttttgttaatacccaatgacttttgagagcaattagtgaggcatagatgaggaagatctcattcccactgtcgtgttttgtatttgatggattccttatttgacactgaagacctggggactgttttctgttttcttccgtgtggaattcacctctcctttctcccaacccaaagaaggtcatatcacaggcctgccatcctcttctttagttttctgagccttctggcccagaagaaaagggatatatttgtcttcagccctcacttaaaggaacttttctgaagtccagtccagaaagcagaagtggctttcagctcctgaggcccttcccttcctcataacctctcaccccatccctcagcatcctaccccctccctgcccccctcactcaggatataaaaccagccaatccgtgggaaaatcacagcccaaacccaggcagccttgacatctgtttgattgggctcccaggaggagatccatgcccacgataatctgcagagcacattaaccctctccaggcatcagcaaagagacttcccagcagagtctggaaactcttgggtgatggcccagaaaaggtgcctaagtgtcagaattcaaactcggttatatatttacatctggagaggagttctcatgcacgtttttgttgttgttgttgttgtttttgagacagagtctcactctgtcacccaggctggagtgcagtggcacgatctcagctcactgcaacctctgcctcctgggttcgtgattctcatgcctcaacctcctgagtagctgggattacaggtgtgcaccaccatgcccagctaattgttgtgtttttagtggagacggggtttcgccatgttgtccaggctggtctcgaactcctgacctcaagcgatctgcccaccttggccttccaaagtgctgggattacaggcatgaaccaccgcacccggcgtctcatgcacatttgatggtgatgatgatggtggttggagattttcaagcatctgcaaagaattgacctttggtttcagaatcacacaatcctgcccctcttagtactgaggtttgatttgctatataagtgtgccttggggctcaattgtgttttcagaaagagaagcagatgggctgagagtcagaaaactaaggacctccctgccacttaactctggcatccactggctatgtgaccttgagctagttacacaaattccctgagtctcaacttcctcaactgtaaaatggtggaggcgaggagggaaattggactaactcagtatcttccaacacgtggtactcacatcaactggcaacatgccagatgaatctggttaggggttgcaaactttttcttaaagggccaggtattttaggattagcaggccaaaaggcaaaatcaaggatatgatgtaaatatttatataaccacttaaaatgtaaccacttaaaaatgtaaagttttttttattttttattttttattttttatttttttgtgagacatagtcttgctctgtcgcccaggctggagtgcagtggcacaatctcggttcactgcaacctctgcctcccaggttcaagcgattctcctgtctcactctcccgagtagctgggattgcaggcatgcaccaacacacccagctaatgtttgtatttttagtagagacgggggtttcaccatgttgaccaggctggtcttgaactcctgacctcaagtgacccacccgcctcggcctcccaaagtgctgggattacaggtgtaaaccactgcgcccagcagtaaaattatttttaactgcaggctttacaaaaataggtgagggactgcattttgcctataggatgtagtttgctaacccctgatttaggtggcgcatgaaccatttttattcaaatgcttaaatatttatttttatgtatgtttaaaaaatcctgactttccatttatattgctaatataaagttttccttttaattagcatatttatgttaaaacaaaaagggagttgatgatttttttaagtattttaagtaaataatagtgctcgtagtatatggattgagtgaaattatcacagtcgtaggcaaatgactgaagtttaggaaacactggactagatgaagaattcactcctgccaatcttaaaattccatgtgtttaatatcccaagacacttaccagtggtgtgatcttgagcagctatgttccctttgcaaaacgaggaaagaactactctatgtcaacattatttcaagaatcagaaaaaagaattcgggtgaacagattgttttaatccaccaaacacagattattattttttctgaattgcggggagatgggattcagtagagagtggcatgtgggaacatgggaagcagcaaagttgagaccagcacaggcaagaatgtgtgcaagcgggggccctaggcctgttcttttctgccttccttccagcctcaaccacacaccctgccccagagctccttgccgccaccaaagtgtgtggggactggagcacagcaattagaatgggctttttaaacagacacacctgagccaccacccagcttcgctggctttgcatgtattacccggaatctcagagcctccatccctcacctatgaaatggaactgctgccagtacctatctcagagtggttgttctgagcagaccaggaagaatatagctaaagtgctaaagtactcagcatgaagcccaaagtgaagtgcttgttgcaattaccacaggtccacactcgtctccaaaaccttgggccgcacatgctgcagaattctgaattcttcacagatttaggaaggcgagatagtatatatacagtggagtacagattacccctcagggtttagggtttgctctaaacattaatatttctgcactgcatcataagaatattcactcagtgcaataaataaaactgcaaccatagttataaaactgtataacatatatatgttgtatgtatgtgtatgtatgtatgaaacagtatataaaactatataacatcaattcaggactgttttgtgctagaaaataagattgcagcaaacacacacacacgtacacacacacttcctttcagttttcagagctttcagatttcagaattatggattaatcacacacagtaattcttacctcatttttatttatttatttttttcggccagtttctgtggctcacacctgtaatcccaggactttgggaggccaagaaggggagatcacttgaggtcaggagttcgagaccagcctggccaacatggtgaaactccatctttactaaaaatacaaaaattagccaggtttgatggtacacacttgtagacccagctactcgggaggtggaggtgggaggatcgcttgaacccaggaggcagaggttgcagtgagcctagatcacaccactacactccagcctggcgacagagcaggattacatcttttaaaaaaaacaattttattttatttttattatttcaacttttagtttagattcagggggtatgtgtgcaggtttgttacctgtgtgtattgcaccatgctgaggtttcaggtgctattgatctcatcacacaggtactgagtatagtatccagtagttagtttttcaaccttggcccccttccctgcctcctccctctggtagtccccagtgtctattgtccccacctttatgtccaggagtactcaacatttagtgcccccttctaagtgagaagatgaggtatacggttttctgttcctgacttaatttgctcgggataatagcctccagctgcatctgtgttactgcacagggcatgatcttgttctttcttatggctgcatctcacgctgtttctagaagcatattattgaacatcataagtcagagttcaggggtcagatgtgagcaaacaggaaacataaataaagaggcaatattgcataatcagagcctccatgctccagtcccctctttgccactttctagttatatcactttggcaattgtctcaacccttttgcctcagttttctcatctaaaatggggatagacaggatatggcaagggtggaataatgtcactcgtaggtgacactaggcggtgcctgctcctagtgagtgacatatttgttatcatttttaaaaaacaagtatcgccctgctaggggctcctgcacagtgtggcttcaggagtacctcaccccagcctcctcacgacctctcctgctgttgcagggtaatgttggactcggtgacacacagcaccttcctgcctaatgcatccttctgcgatcccctgatgtcgtggactgatctgttcagcaatgaagagtactaccctgcctttgagcatcagacaggtgcgtacatttgaaggagcccatctgagtgcagccaggatgggctagggcaggaggtggtgctggccgcaggtggaagacaaagctgtgctggggcctaggaacaccagagttcagggcagagggctggagggctcctggatggaaggaagggcaacctcttgcagataaaaggtgctggaaccctcacccccaaactccctagttctgtggcctcgaggccgtgcacggctcagctaacctctctgagcctcgttttgctgccaagtaaaatgtacgtctcttggagttattatgatatttaaacaatgtagtagaaagaaagcccttagcccaggacctggtatgctgtgtttgcttggtcatggtggttttagccaacatttactgaacacgagctgtgtaccaaaccttgtgccaagcaccatctcatccttgccaaagccctatgagatgaacaattattatccccattttatacatgaagaaactgagatacagagaggctaagtgacttgccctgggcctcacagttaagctccatgcaagttgacccatcttataattgatatcacactgtggttattgatattaatatatcattattctctgagcttctatttctttttccctaaaccaggggtgatgagagctactataaggactaagggagccaaagggtgtaaatatgtagcctggcacaaaacaagtgttcagtaaatatgagcccctcactgttccccaggcctccttccccaccctccctcctctttctcagcctggatttctccacctgagaaggcagcatgggaccttgagaaaatcccatgccggagggaggccagccgagctttgcccccagaaaccctctgagggcctctgtcactgaggtgcttgggtgaccacatatcacagcacacctggctgactgctggcacaacaggagcacacgctgctcagcggtcatgcaagtgccaatcaagctgtcagtcctcactgagtgttaaccccatgtaggagtccagactcagtgtccggaggcaggcagtgtgcaagagaggccatgcctccagggactgcaaaaagtccactaccagaagcccctgcctctggggccagggaccaggccacactcacagacttgaggcacttacctacataatgcaatcccacacctgcccccaccccacatggacacacatacacacacgcgtgcacacacacacacgcacatgtgaaatctctcaccctcatctgtaaggtctagatcattgcatttggacttgaatcaaacagatacatcttacaattctcctttaggcctaagaagcaccttgtttcccagaaagacatgagaaatgtactgtgtctccttcccttgaactttggttaacaggttaaatctgaaggaggaaaatgaaaactttcaagtcgccgtgccctccctatgtttcccacagtggtggggcccagctccaggctctctctctacctatgcataaggccaggcctcacttaacccagacctgccatcatgagagccccctctttctgcctattctgctgggaagtagttggggtggcagtgggaggggcgggctacaaccagctgccccaggcaatggcctgggcagtgaagcagcggctctgtgtcatgaagacctggtgtgtcccaaatgggaagtctggctctgacactagctgtgtcatcttaacctctcatgtcccagttagtttctcatctgtaaaatgggaatgaccacaatgctaccttgtagagttgttatgctaatgaaatgagttatcatatgggaagtgtttaggacacagtccggtacctggtaagcacacataactgtttaaaaaattgaaggattagctggacgtgatggcttacacctgtaatcctagcactttggaaggccgaggcaggattatcacttgagcctaggaattggagaccagcctgggcaacatagtgagaccttgtatctacaaaaaattgtttaaaaattggcctggtatggtggcacatgcctgtagtcctagctacttgggaggctgaggcaggaggatcccttgagcccggaaggccgaggctgcagtgagctgcagtcacgccactgcactccagcctgagcgacagtgagataaaaaaaaaaggttggggagcaggcatggtggctcctgcctgtaatcccagcactttgggaggccaaggcaggcagatcacctgaggtcaggagtttaagaccagcctgggcaacatggagaaaccccgtctctacgaaaaaatacaaaaattagctgggcatggtggcacgcacctgtagtcccagctactcgggaggctgagacaggaggatcccttgagctcagaaggttgaagctgcagtgagctgtgagtatgccactgcactccagcctgagcaacagggggagactctgggtcaaaaaaaaaggattagtttcagtttgggataatgaacaaattctggaagtgaatagcactgatgactgtgcaacaatgtgaatgtacttaatgccactgaactgtacccttaagaaaagttaaaatgattaagtgttatattatgtatgttttaccacaattttaaagaatgaggttaacagaagtgatcaccagtggcattgccagagttccttaaatccaaccaagtcttagacattcagacacagctctctggccagaggcttccgcatttccatcaacgtcatgaaaggttagaccaggccattgctaggatcccttccagaagcttctgtgattcctgcatcaggcaatatcgaagacacagccttctcctcccaccacccactgagaaaacagaaattcccatcaagtcatgcggccagtgaaaataaaatagccttcgagactggcccaggttcctaaggctccctgagggatggagccaggctttcaagtagccaccggccctcgggatttcaggggaagctcagtatcactgacctccaaaaggtcgaagttgggtgtgaaatgttcacctggagtaaacacctctcttggagctgcctgggcaccgggtgagccttgtagcccctgctctcctccacaggtgggaggattagcaggaggggccttctgtcttttatcaacaaggacgttgccacccagagaggtgcagccatttggagtttctacaaaagccccctctggcaggggtgggtcaggagacagccagctttgcctctgggcactgctcagccaactttccctgctccatggccagcaggctctgagatacctctcctgaggtccttacccacctcccaggaaatactatctggaattctgggccctcctaaagattgttgcagtggcagcttcctgttcacccaggttcatgggcaggcactgccacttaccagccatgtgacctgcagccagttttttgagatatgctttcctctgcctcctggagttggggagattgaatgatattttgtgtacgaagtgtttagtcacgtgcctggcacttgggaagtgctcaccctagccaagaactcctcaccactccctgttgggtggaaaaacagccttccctctcctctcttcattgtccatattgaacaaaaataacaacaaaactccatctcaagcttctcagttcagaatttttaacagcttagatatttgagacctgagggaagggaaggaaaaggagaaaaaaaaatgatgtgccttctagacaaatgatgtctaggagagggaagggtggaatactcagcctatttaggaaaaccagctgttctcaaaaacccttcaaatggcttgagcagagtgccgctgaatctgtgccctggtgtggtaaccacaaaggattctgacctgctctttgaagcaggacttctgcttggctgcactgcaggcaggaggttggacagtccagattgcaaaatactctagaatttcatgaacttaccctgccttgcctgtggctttttcaaagtaaagaacgatgactactggaaaatgtatccaagtgggcgggagagttggttgggggggaggctgcatgtagttcacatgcatatgatatttttaaaagatggtttctccagtcgagttccagtagccaaccctccagtagtcattgagtaccctggccttgccactactttctttctggaattctttccttaacctccacagaccaacacccctcccctgacagccaatgtgccacgcacacatgcagcgcctcctttgctttggaatcttgcttatactttgtcagctgcagaggtttctaaactgaggttcctgagaggctttaggggtttcccagaggttccttagggaccaccagagaagggagtggaagtgacagttgagaagatggggcttcagtccttctctgtccacctccatccctaagcatgcttctccactttaattctgaagacggtagagcacagtgaggctgggctgcaggagccagaatacacccagataacccactcctagctctgccacttacgggttacgtgagcttgaaaagggtcacacccgtgagccttactttctccctttgtaaaatgggtaacatgacagaggacttcatagcattgtgttagggacaacatgagaaagcacaaataatttagcatgataacgggcacatactaagtgctcaataaatatgttagctataatattattgcacaatgtgagattttatttgaagaaagcactttttgtaagaaaaaaaaaagtgcaaaacccactggtcagagaaagaggcatctgcatccccacatgggctttcctaagcaagattcatgttttatgtacagaagcttgagagcagatacaaaggaaagaatctaagaacttctaagtcaaaaccagatcaacaaatacaaaatcatctgaaagtctgaggtgagccctgtggcagcgcccacacctcaggaggactcactgttggccacctctagcccagtggacatgcacctgagccttctgggtggccatggccccaggactgctcagggcttggctctcttggccccttcctaactccacgctcccaaggccatggctactttgcagccagcccttctcctgttttctctatacagtttcctatgctgcactggacttaacttttccatctcatggtctctttccataggctatgctggaaagccaggaaggggtatgggatggagctggactggctctgggaggaaacttgaaagccatttatcatttcaggttttccctcataaagtccttcctttcagtgacaaagctgcaattgatggtgcccctgctatccagttcattcaccacctctcttcagtgctgccccgggcaaaacactttcccaactccctatgctagtaaatcatgctaattatggtccaagtttgtctaactcgggcctcctctgacccagactgtctgtcttgtcccagccaagccctgagcttgctttactgtagtttttcctcagctagattgaggaaggccccgtttccctgagaacaaatgtattcccaaaataataaccaataacaggtgacttatactgaaaacttactgtcattcagatactaggctaagttctttacctgcatcatttcctcttcacaacaaacctcctaagatataggtactattgttatttttattttaccagtgaaggaaactgaggtccagagaggttaggacagtttgttagagttgcacagctaatccattgaagagccaagatttcaaatcaggaaggtccatctccacagcccaggctcagttgccacacccaaccctgtgacttccattggaaggtcccttccactccaacaggctcattggctgggaacaagaattggattcttgtacagaattcctgtagctggcaggttcatctagcttcacaaactttcttaccactgctccccaatcagcagaggaaaaagatcaagttctgctccagagggacataactgaaagctctaagctcaaacttcttttagaacctgcaaattttgcattctgctgcatatctattttgttgtaatataaaaatcaggccaggcacagtggctcatgcctgaaatcccaacaatttgggaggctgaagcaggaggattgcctgagcccaggagttcaagaccaaccagcctgagcaaaatggtgagaccctgttcctacaaaattaaaaaattagccatgcatggtgttgcacaactgcggtcccagctactcaagaggctgaggcaggaggattgcttgagcccaggagggtgagcctgcggtgagccatgttcgagcaactgcactccagcccggatgacagagtgagaccctgtctcaaaaaaaccaaaaatcaaaattttccctcaaaatttttgctttgagtgaggctccaagaaaatgaacagtgtgggttccaggatctttatataggaagggcttagggacaacaatccatttggaagagatggccaaaggacatgtctggaaatgattttttttttttggaaatggagtttccgtcctatcacccaggctggagtgcaatggcgccacctcggctcactgcaacctccacctcccgggttcaagcaattctcctgcctcagcctctcaagtagctgggattacaggcgtgcaccaccacgcccgctaatttttgtattattagtagagacagggtttcaccttgttggccaggctggtcttgaactcctgacctcaggtgatacacctgcctcagcctcccaaagttctgggattacaggtgtgagccactgcacccgacctggaaatgattttttaagaacactgcataagattgagaagacatcagttatctataacaaagaaggaagtgggggattaatggactcaccctctgatctttctcttgaagatgcataatgaatattatgtgactttcaattacctgctctgtgcaccctggggatacagcaccaccaccatcaccctctcctctgctcagtttcagaagcttgagtcttgtgtgtgtcctgatgattaagaattttacaaagtcacacagactcgcctgtgtccccagcttttaaaccaaagatggcagcattaagggacctaactcaggctggcaatgcaaagacaaattagctaggtttggtttctaagcttggtttctaatataactcctatttttttatgaagaaaataaaccgaaggtctagaaagggacaaagcagctggcttacacattaaaaaaaaaaattagaagtgtttgaaggaatgtaattaaagtggtgacacgggaagcccaggaggtaaccctaatattgacaagtataagtggatgatatttaatgagcacttgccatatgcctggccctgttctaagtactttccatgtattaatttacataatccttttaatagcccagataagtaggtcctattatttttattttgcagacgagtccaaggaggcaggaccactaagtgtgagagaccatgtgccctttcaactttgaaggggaattcaaaatataggaatcctggtttcaagtttgagaacagtgattttcaaggagcttcctggagctaataccttcacctccactcccagtaaaacagggttgcttttttccagataagttttaacttgaagaaaatattattcaaccataaaagaatccttcaaagtcttagcatgcccactccaaacaataatcttgaaggagacaagtggccaaaagcctgtcagattgttcatcacaaagtgatggccaggagtgatccagcccatgaagacattttgactgggcttcccgtggtgttttgtaaaaaccaagccagttgccacacttgaaaatagaaatcaggagatttcagttagcaatctggtcctggcaacacaaggcccacctttccacaaggcaaggggtcgggtagccattgtgcactttggcatgaactttccaatccccactgtctccacatggggccacttcaggcatagacattatctgctgaccctgcgggcatctggtgcacccacccagctctgaaagctaaagtcctccttctgaatttaaatgcatctcagattatagcatcacttgtgaaaattcccctagaatttctgaaaactccctctagttcaattcttccttccaatgcagctggccctgaaacaagtgtcctgacccacttcagacttcaaaggagctggcagagcctgctgcttaataatagtgacctatgggcattcagatcaagcctaccaggcccatgatggtctactggtcgacataggcagaagggcctcatggctcaactttcccaaaatgttgagattattttataaatgatagaagcgttgagaaaaacactttacatttccagacaacacaacccattaaaaataatatattctgcgggtatataaccccttatttgattgccctgagttcatgtcttccaagtagcaaaagggtcttcttcatgtcttcattaaggttctaaacactatcatcttcagtctctccatcctctttctgattcttcaaagctagattgtattttttattttttctagtcaggctctgcttatccattatttataattacaattacacatatctaccttcatccaaatcttgctttagtcagtcttgagatgtgtgcccaacttggtcctcctcaaccaagaagagtggggcgtggtaagagggaaaatgccacttttccctcttcagtagctcctttactgacaggccgcgtgaccttacaggggtcccgtcagtccccggaacggcaatctcctcacgtgtaaagtggagagagtgactgtcagtcacctggtcagtcagtcacactcactgaggtaggcctgtggtgggctaggccaggctccaagcactcctggttcagggcgagcaaaagctctaggtctggaggggagggatgaggaggacgcctgatgggcactcagtgaggaggaagagacctctgcgagggggagtgaggatgagcagagattcctcaggagaaggcagatggggaccacgttccatccaaagagaagtcgctgtgggaagactctgggccgtggagcctcctgaaagagaagagcaggagaggggctggtgaggaggggctgacagcggcgtccctcgtctgggcagcctccgctctgccactctcctcccgtcctgaggatgggacccccggaaaagaggcctgccatggcacccagagcagccattttcctcccagttctggggctttggaaggagcttgcggatgaggagagggagcctccgcagggctctggctcccctccaggggccgaggccgcacacaaagccgctctgtgggtgagcttcaaagcagagcgccgaggagcagggagccagcgccagcaacacctccccggtgtggggccgactccccgcctgggcgtttctccgaatccttgaggcccccttggcttccgcaaacaatatggccctcttcaagtgccaaagaaaataacaagggggtggaagcagagaggggaggggagggaaacgggaacagagccttggcgaaacctttccatgaaatcaactgtgccctccgacggccgcacaccgatggccatctagggcagggcccgcagctgaaaaatgtcaaggctcataaacatctctcacaggacgccagtaaagtccaaaaggcccctcaggtttactaaagccagaaatcagtagatgaaagctcaggccgaactcaggaatggccccttgttctgccaggaacccctgcctgccctgaagagcccccacgggcctggtaagccagctccagccagtggccagtgagcaagacctgagtcatcggtctcaccggctccctggctcttcctatctgccaggtagaggctacgacatcagcctcaagcaccctggcacaatattgacgctttgatcttaatgcatataaaattctgaaaatttttaaataaaataaatcaactgcccctccacccacccttcggtggtaaaagagatctctggaagacctttgagttttaaggggagcctctatttccttttttgtggaatagcccaattacacctactggataggattgttgaggggacctgagaaacttgagacgacaagaacgcgtagcgcctcggctggctgagggtgctgagtgagtagtagcacctgacaggcagaggacccacctcctgcctggaatcatcagcaactgacaatggtgcgagttctactcacctttaaacgctgcaaatcgcaccactgctatttgctgtggggtataacatgtgagggaccctttctgtcatcgtcaccttagccactctctgctctctgcctttcttttcaggccctcgtgttgtgttctctccagctttccccgtgcctcagccactcttcacgttccatctctgctctgtgctgacccggtatggtggtgtggggagagcaatggctttcaagttcaggctagggttcaaatccagctctgccacacgctggcgtgggttcttgggaaagtccttcatgactttcaagttcctcttctgtgatctcctgggggacgggggaccaaacctgtccaccatgaatccttaacatacaacgtgtggctgcacacatagtagatattcaataataatgtttgtaatagcatttaaatcctccaggctctgttccaggtacttttatgtatattaagtcatttaatctgcagaacagcactatgatacaggtgctgtaattattccaattttaccagtaaggaaactaaagcttttatttattgaatgaaatgaataaatgaatgaatgttttccatggcagatacaataattgtttatgtcaaagagcctgaccaagtacctaataccgcacctcttccataccttatgtccaccccactttccatttctcctaagaacagaaggacagaactgttgaacaccaaatctctacccctgggccaggcagagccacatgccagcctcccagacagatggcactcacaactgtctaggcatgtacacgactcctctaaaggagtgggggctctgatctcaggatagaaattactctgaacaccaccaaaaacacaagaacaacaatacaaccaactctcccatgaccaccttcctctggaggtgcctactatggtgacgcaaggactgtcagactctgggcaatgtctaataacccaaggttcttggcacaagattgccagtaactgtgcagaaacaaatagccagcattgggcagctgccctttaaagcatagggaatcaaaaccagcttcaaatggtttctgacacacggtaggcatttagtaactattgaattggttggtaagtttctgtgtgccattctacatacattaaccccaaactccataatagtcctgggcattgagcatattatccccattttacagatgaggaaactgagacttcaatgtccacagaccttgccaagcggaaagtggtagaatcagaatttcaacccagcttgtcaaacagctgagtttgtgcttttgatatcatgttatctggaatcaaataactgaagggctgttttctttctttctccactaaatgcctttttttttgagcatcagcaccaagactggttctttcttgcccctgtcattccctctatgatgccaaagttcatctgtaggatccagtccctctggttttctctgcagaatagaaggtgacctgggctctgcagaacacccagggctggaggccctttcaacttattggctgaggaatgaggatgttacttaactgatgcatccttcaggggccctctcgaaggctgtcttgggactgttgtccctcacttctttctcctttggtgcagcctgtgactcatactggacatcagtccaccctgaatactggactaagcgccatgtgtgggagtggctccagttctgctgcgaccagtacaagttggacaccaattgcatctccttctgcaacttcaacatcagtggcctgcagctgtgcagcatgacacaggaggagttcgtcgaggcagctggcctctgcggcgagtacctgtacttcatcctccagaacatccgcacacaaggtcagtgttcagagggccagacctccaggggagggaccaggattaggaccaaacaactttgagaagtcctttcccatcgtgtgacttgcacagcaaaattttactaactggagttctcgttaatccaaaccttcaataactggaagctagtatgccagaattggggattttagggaaaagggagcgagttacaaaaatgcaaattgagtgcatttaaaaaaagagaaagaaaaacggacaccacgttcagggactgcccaggcaccaggctgataataatacagtatattcataatgatttgaaaccacacaggatggacaaaaaagaggtttgtgcttcatctctcattaagcagaagaggaataaaattaaatagactaccttcccttttctacaggagtccaactaattatcatttcatcacattcctaatggtcaaggatcaagtggccagaaggtggcgccaatagcattatttaactcttcaacaggccttttgcatgcagaatgtcgatgaacattttttcaatccagaaaggttctttgagaacatcgagctctaatgtctcaaagtcacacatagataaaggaactgatatcctgagacattaaatgacttcctcaaggtcacacagcaaacagggctgattcacagaaagtcagtacaaagcaagggcttggagatccgaaagacctgtgttccaaccctggctccaatactccgagctacggaacctctggcgagtggcttaagctgtctgaatccccactgcctcatctgtccaatgggataatgacacctccatgggctttttgagaggattcagggaaatattacctagaacagcatatgaagatggaaatgcagtaaatggcagctgtttttccatcatcattaatataatcaagaggcatattataggatgttaaaggaagcctatctcagctcagttttaagaaggatctttttaaaggttagtaccttcttttgaaaaggtaattcagaagatacaggagataggacgatccccaccactggagataatcaagtagtctaatagccccctgcttgaagaggaggatatgacagcgcctcttgtttgcacagaaaaaccacagaggaccctcctgctctgtgattctttggcctcctcttgatcctcatccatcatgagcgcttgaaggcagaaaagctaagaatggtggcccttgggcactacatggctggggccctgggagccaaaactccagtgacaatgacctgccaagagctgggatctgtgtcctgtgctcagagtgggcactccctgaaagaggacaagtttgaccaagtcacaacggctccagaagaaggagcttgggactccatttaggatcctcccaagggaacaggctcgcacaaaaatcctagggccacagagaggggtgtattttattctggaaaaagatgcagcttggcaatgccagcttggccaaatgtcaagtcaacctcatttgtctccatgctcttgtgcagcccctgtgctggcatctcccaccacaagcacctctcttccctggcaatggttgcatcaaaaaacaaacaaacaaaaaaaacctgttggccaggcacagttgctcaggcctgtaatcccaatactttgggaggctgaggcaggcagatcatctaaggtcaggaattcgagacaagcctggccaacatggtgaaaccccgtctctactaaaaatacaaaattagacaggcatggtggtgcgtgcctataatcccagttactcaggaggctgaggcatgagaatcacttgaacccaggaggtggaggttgcaagtgagccgagattgcaccattgcactccagcctgggcaaaaagagcaaaatcctgaaaaaaaaaaaaaaaacaaacctgtccctggttttattaccccagggccctgtgcaaaactaataggctaaacctaaaaaagccaactgctttttaataggtcatacattacctcttcttattgtaaggaattcctgcaatcacaatgccacctttaatggtgggatttcaagcactctctaggccaggagtgttccatattgagcagtaaaactatctactccaccaatctactccattctgaaattcctcttttaatgtttctcaatcagatatgtggattgtagattgtggagatatatatattgtgatcaaagttcacactgtctcccatttgcccaggagacatcgtttctgcctgtgatcctagagtaattattattaccatagcactacctttcatcctcaaaagtgtctccatttagatcataaattctacagttgactgggggttattacctcatgtatgccttatactaccccataggttttgactctggcagaacaggacacagaataaggcagttttatggaggagaggagctggaagggggttgtaaggcctcagcaccatccagctcggtaggtattgcagtaggatttaagggcctagcaacctggggacactggttgctgggaagcaaggtcagaggttggcttccacagcctaggaggggaatgagcccctcttcaatctcccatcctgttctcagtcggccctttggacagagtcaactgaggcgcgtggctgaccaaaaccaatgagaacatgacgccaagaataaaaaatcacaactgtgccctgctccagtctgcttagcaagtagagattagtcctcgtgttggaccaagctaggacataggtatccttcagcctaaactgctatgtgaaaacacaatctcaaactcctcattcaaccccagcccaccccattctacagaggagagaaccaaggtcctgacatcatcttccatatcctcattaaactcagcattcacatagagctttgcacttcttgcaacctcctatgcccattctccccactgaccagcacataacaggcattccaatccccaagggattagaggccatgtcagagactatagactcttagccacaggggagcttagtgggtattttatctcgtgatgtcaatgagaaaaaccaacaagcccagagactgagtgagcaaggctgcacagggatcagtagcccggcccagctcagagcccagccctggaccccagaccagagcttactccccagtgcctgctcagaaaatctgcagaggctgctgggaagcctggttctgggtgctccctccaaatgacctttaataatgaggaaattatcacctctcagggatggcttcagggtgacactctaagaccagatggtctccaaggttccctctaaattgtaaccaacctcaagagggacagtcactccacttccctccaacaccccctctcctggcctggccagtggaaaccaggattgcatggtatggtttctggatttctttttctttcccaggttactccttttttaatgacgctgaagaaagcaaggccaccatcaaagactgtaagtaaccaagctcaagccacccaaggctctgtcaaggttgtcattggtacatgggcttgaccattcttttaggatcatactgaaaagctgatgaaccaaaacaatcccagacctggagaaagcagtggggaaaagcgtggtggaaagagtgtgacagaaagagcgtgggtgtgggtctgtaggaccatagcttgggtctatggattgcttatcgtctgagactccattcccctatctgtaaaatagtgtgacccttgtgggtcgtggtaagtttgagaaatgatgcacacaaagagcccagcatgcgccaccagtgtagatgctcccaaaccagtatccatttgtcatacattaataatactattagaagccttgtggttcataatgcttaagaagactctgagctcactaagcaggtagagtttataattataagacgatggaggatctcaaatagccttgttgatgctgatgattaaccttccctgtttcacttgggcagatgaagaaggctcgggaaagggatctttggtgctttcatttttcaaagatgacaatgatgattactattagttactgagtccctggcccagaggccaggaggaaatgtggtcctgggcaaaccccattcccccatgggcttcagctcagtcatctgcagagagggagcagagcgcatggtgatttccaaggcctctgagggctgcaagctggaggggcagacacagagggactgttcttatgggttatgattttttcctccttacagtcccaaacaatcaactgaggactcacgttacttggatcctagttaacaaaagtttttggaatttcgtttttcgttttgtttttggtgctttagcacaggaatggccagttcgtggaccacacgctacgggcttaagcaggtgcaccctgctctgcagaccgcagctgccctcacacgagcagctctgcattctgccaggtttcatcactcggggccccggggtgtagcatctcacccacctgtgaacaaagctcacacactgtttcctggtgctggtagaatcccttgtgatccatctgcagcagcctgggggatgtaaatcccagcttttaccaccacacctaacccagtcaaagcccctggaagaaatgagcctgtgaagcctgggagacattactgtggccaaaggcttgagccacaggcaggcatttgctttactctctaagtagtagtgacctagacctgaccaaccctttctccaggggtcagtgtcttcacctacaaataggaatcacttaccagcctgccttccacacgacaaaaggaagctaatacaatggaaagagaaggtgtgtccagtaagttcttttgaagtaggtgtaacctgaatatataactagccacagttagattcaatgtgctgatgattatgatgatgaggataaggatgaggatgacagctagcatttattgagtgcttcctatgaaccaggccctgtgctaatatctttatagacattgtgtcaggtaatcttcccaatatgagacaagccctagtgctatagcctttttataggggtagaaactgaagcttagaggttaaaggtgacatgcttagaaggcaacagatgacccaggtgtgtctaaatctaaagcccttcatgcctttgctccccttacccatttatttctctcctgtttccttcattctttgaacaaacatttattggacacttactatatgccaggcccagagctaggcactgtagctgtggtgatgagcactatttgagtcttgctctcattgaggcaaggtcggggtagagatattaaataacccaaatgataaatacataactgctcatcacgatgatattataaagggaaagatcagcatgttttgtgtgtaatggggaaagagtgcatttaaactgggtccagggacagctatttggaggaagagatagttgaattaaagcatgagaagaagttacccaggaaaagagagagaagaaaaggttccaagcagcgaatggccagtgcggaggtcacgaggtggaacaatcttggtgtcttagagaaagaaccaaagaaggccagtgagtctagcattagcttggccagtacagtagccactagccacacggggccagtttaattacttaagttatattaaaattcaactcctcagttgcatagccaaatttcaagtgctcaatagccacaggtggctgccatcttgaaccgctcagattctactgagcggttcaattctgtgatagtggaggcgtaataacttgtataacactcacagcatcagtagtctcagcagcatcagcagaaggaggggtgggagctgaggccgagagcaggatagggccagatcactcaccactttgtgggcagcagagttaggatttcattctgagcaagctgggaagccactgaaaggtcataagcacgaaagtgatcagatcacatttacattttaacatctcttgggctgctattgtctgggtcagaaagcagtctagccaggatgctcctgcccagaggagtgatgatgatggtggcctggacccagcgatggggaagagatggggagaagtttctagaaatagaagtggtggggcaagggctctgggctagcatctctggagcatgaactcatggagacaagccctctgctgatggttggtgccatgggctcttccctgtctgctccatttgggagcctagaactagactgaactcagggttaagaagtttaagtccacctgagagccagccccagaggctttgccttattccagcctcaatgccctggccaggacaccatggccttcccccgagacccctgaggaccatctctggctctcccccaaccctgatgatcatgctttccccaaacagaaaccctaatggatagtttgatgggcacaaggggaggtatgaagacgacaggttggtagtttatacaatgagcccattccagaaagtccaggacacgtgatcatggtgcctatggctcaggtgatgtttcctgatctcagatattccctgacccaaaaatgagaggctgcctttcagtgctgatgtcccatccaaagaccaagacctggccaataaggaaagtggcatcctggggctttcagcaatgttcccattgggtcttcaacgaaaatgaatatagctgtctttaccatttattaagcacttactatgtactaagcataacactgtgccaagtgttctgcttacattatcacatttaatccttgttctagctccattagggagtgttattatctccatttgcatctgaggaaactggaggtgtaataacttgcaagtaagtgcaggggtgagattccaacacatttcctcaaagcctgtgctttttacattgtgtgctatgcacactcacacatgcacgcacacacacacatattcacataggcacacatgttcccatgcccttctattcactctgctgcccactaagttgagatccaaggcctggaaactcctcaagttctgggcccagcttgacaataattcaaacaacaggatgattttcaacttagtgcccactgaaggtgcccagacacacaagctacaaaactgtcagagctggccaaagtgaaacaacccattccctttctgcttggtctcttctctccacctgtcccactccccacccacctccactgcagaaatgccagtagagggtgttctgggcccaggaaccaagcctacagtcctgggttcactgccaggcacctccctgctcctgagcctcagagcttctctgcaccagcctggcatggggtgtgggctccatggctggactgctagtgtcatggggatacgataaacttgtttcggaaaccctgcaactcaggcccccaccccagcttctggagtgcttgcaataaacaattgaggatacatcctttggccacattttaaaagtgtccaggctcaaggccaaccaagcctctccaaatcccacagactgcagagagcctgggccatgtctcccctcatcccccaccagctgcagggacatagtcaagatgacaaaagttgtgagcaagggagagctgcaccctgaaacacaactggcatttacagagaaatatagtgggttcacggtggtgctacagatccaccacccagcgctggtggaggttgatttgggaacctgcctcagtattaacattgcagtaatgactttggccccctgcccctgccaccaccagccaagcaaggccttgactagtcaaccaatgagtaccttcaaagccatcactgcagaactaggaacagacagaacagggttatctcagcaagacccacggaagaaattcccatcagcctcataaacccctctcatgctgatctgtactgtgttcctcctaccaagccagatccccttcatccaaaacatgggagaaatcattaaaatcaaaaggacaatgtttttcctcccacttcttgccattttggcatttcagtgaacgcttgttgtctattcacacttaataattcacctttgtttatgactccatttgttttctcttctcctaaaagattaaatcaaaacaacagatcgatctgggggtagtaatagacatatctcataagggtggggaaggttgagtgagcatctgacaatagcaaatgctcaacaaatcttagctaataatggttcattaaatgtctattgaacacctgctgtgaaagacatgataaagtagtagttatgaacattagctttgcaatgagaactctctggttccaccatctggaaaagattcttaagctctctggacttccaatccctcctcaataaaatgaaaatcataatagtatcacccagggttgttataagtttgaaatgagatactctatgtgaagcccttaccaagcacttggcatttagtaagtgctccgtaaatatcagctgatagtggaggagaaaaagagatggatctttccagtaaggtaggcccagtgttgtgataccaaggaactcacaggtgctctctatggggctcataaggggtctaacccagagggtcagttcagagaaggcttcctgaagaggtcttgtgagaggtccgctgggtagaagtggagagtggggagtctgtgcaaaggtcctgaggcagaagaaagccttgcctcaatggaaccatttgacctaagggaagggaaaaagttgggaagcagaaagagataagactggagatctggatgggggtcagtctgtgaaaggcctatctaatgtgcagccttcatcctggaagaaatggggaaccactgcaggatgttcagctggcgaggtgacatgacccagtggcactgagagaggtcaccctaagcagcagtgtggggcacaggatgtcattcctgcccttccttcattcagcagtgacagtgtacatactagacgatgcagcagggatagttgtacagtataatatagtatagtatagtatagtatagtatagtatagtatagtataggtaggatagtatagtatagtgtagcacagtacagtatagttagtatactacagtacagtgcagtatagttagtatagtatagtgcagtatagttagtatagtatagtacagtacagtatagttagtacagtctagttcatatagtacagtatgtacagtagaatacaatatatggtacagtatagttagtatagtatagtacagttattacagtatagtgtggtatgattagtatagtatgctacagtataatacaatatagtatagttggtacagtgcagtatagttagtataatacagtacagtatagtatagcacagtacagtatagttagtatagtatactatagtataatacaatatagtatagttggtacagtgcagtatagttagtataatacagtacagtatagtatagcacagtacagtatagttagtatagtatactacagtataatacaatatagttagtacagtacaatacagttaatatagtatagtacagtatagtgtggtacagtaaatatagtatactacagtgtaatgcaatatagtatagttggtacagtacagtacagttagtatagtatagtacactgtagtatggtgttagtacagtacagtacagtaatagaatagttagtatagtgcagtacagaacagtgcagtatgatatagtatagtatagttgtcatggtatactacagtacagtcagtatagttagtatggtatagtgcagtataatgtagttggtgtagtatagtatagtacagtatagcatagttaatatagcatggtacagtacagtatagttggtatagtatgctacagtacagtatagttagtacagcatagtatgtacagcacaggatagttagtataatatagtacagtatggtgtggtatagtacagtatagttagtatagtacagtatggtgtggtatagtacaatatagttagcatagtacagtatggagtggtatagaacagtatagttagtatagtgtggtgcagtacagttactatagcatagcacagtggctgctcgatgatactgagcacctactatatgcccggcagtgtgctaggtgctgcagggttatgttgggaaacacaaatccctgccccctcgtgtgcacagacagacagtgaacttcatgaataaatacaccatagaatatgctcgaatattctatgtaaaatgcggagcagtggggaggatgtgcagacccaacttgagtggtcagaggagacctcactggaaggtgattttgaaacaggattgagatgagggcgtgcaccacaagtatccaagggaacaacgtgcaggacaagtggaagagcaactgcgaagtccctgatgtggaatgtgcctgcacgtttccggagagcctgaagccagggtggctggggcaaagcaagcagggggctaagagaagcggtggagacgagtgtgagctggaggggcagatctggtgccaccattttaaaaactcatatactactctggcaatgcttgtcctggtgtctcaggttgtgactcacagcctgagttattagttaaatcagcacggagttaacgtcttgctttctacccttcataagctctagtctctttgcttctacttgtgtctcttccagtctgttctccacacaggagcaagagagatcttcttaaattgaggatctttgctctacactttgatataaagtcccaagtccttaccatggcctcctaggaaggccctgcacggacctcgatcaaaaccagatttatttattctcatcagggtggggtgagattgaatacaagtgctcctcaaaggcacatcttaaagcatcttgacacctgccacctagtaatcacccccaaagtgcctaatgtggtgtcttctactacaaaggcattcaattagtatttgctcatttgggtatgacttgaggtctgaatgtggcctctatatccctttccactgctataaattattctatttcagatgctgattccaactgcttgaaaacaagtggcatcaaaagtcaagactgtcacagtcatagtagaacaagtaagtgcaggatgccagttttcattctaatttcttaaaaccattcctcagacaaagtcatctactttaataagctttgaaactaaatgtttgagttggaccagttactccccaaggaaggtagtaaagaaatcagtgattgcttttatacgtattatcaaagtcagattgatttcttctcatacgagtgggtgagattaagcatctgacaatagcaaacgctaaacaaatcatagctaataattatccattaaatgtctattgaacacctactatgaaagacatgatcgtagttgtgaacattagctttggaatgaaaaccccctgggttcaagttctggctccaccatctggcgccagatccaatcctgggtccactgtggcttcatctcagaggaggataacaaagaaaacaccgggaattggcaatcctattagcttccccagcactaagagatcggcccagagcagtgtcaagcttgtaatttcacaaatgtgtgtgtagaaaacaattgctatgtgctgggcataattctaaccacttggtatgtattaaatcattaaatcctctaacctgtcctaggagacaggtactctttattatcccattttatagatgaagcaaccctaaaagtttatggttataaaggtaggaagaggtgaattcaggacccagactcagataatgggactccagagctggtcttaaccaccatatcatagaataagagaaataccagcctttcatgaaaaacgaatttgcaggatcagtccacccagacagttgtggctgtggaatcagtacaaccatgctgcctgtcagaaagaagaatgaaaagatcatttgactgtcatttcactcattccataaaagttaaactgtagttccatagaacatctgtgagtcacagtgttgccagtcatgtaaattgggtgtctctgaatgtgtgtttcacaattgcttcgatgggagacacagacatgtcacagctcagtaagtttccaggtagagcaatcagtcataacaatgggaaatattccacaaagcagcaattctcatgacctagtgagaaattgtacatctcttctcttaaaattaaaaaaacaagctgggcacggtggctcacacctgtaatcccagcactttgggaagctgaggcgggtacaacacctgaggtcaggagttcgaggccagcctggtcaacatggcgaaaccccatctctactaaaaatacaaaaaattagccaggcatgatggtaggcacctataatcccagctacttgggaggctgaggcagaagaatcgcttgaacccaggaggcagaggttgcagtgagccgagatcgcaccattgctctccagcctgggcgacagagcaagactctgtctcaaaaaaattaattaattaattaattaatttaaaaaacaatggtaaatagttaatgttttccccttttcaaaaggcctccaaagttctcatctatgggaatttgtacgagacctgcttctatctcctgaagaaaactgtggcattctggaatgggaagatagggaacaaggaatttttcgggtggttaaatcggaagccctggcaaagatgtggggacaaaggaagaaaaatgacagaatgacatatgaaaagttgagcagagccctgaggtaagttaatagcataaaatactatgagccttcaagaagagttatatacaatggctggctgtagaaaattacactgtttttgcaggttttttacttgataatggaaaggtcatgagacaaaactttggttcttagttacaggtaggattatggtttgtaaattgacacgctgtccttagcattcttggcagcattccccagggatcactctgaatccaggccatctcacacgcccacacacacaaagaaaaacacgttttgagctgagaatggtgaggttcagtcttcaagatgtctgggaaaggtttaagtgtaagttgataacagggcatgaaaataccagggtaaccaaagaccagccttgtcacctgagaggaatgaggagacagtgtttgtgttctgttgttttcctagggtgcaagctctcccagaatttctcttctgcttgctttttcagatactactataaaacaggaattttggagcgggttgaccgaaggttagtgtacaaatttggaaaaaatgcacacgggtggcaggaagacaagctatgatctgctccaggcatcaagctcattttatggatttctgtcttttaaaacaatcagattgcaatagacattcgaaaggcttcattttcttctctttttttttaacctgcaaacatgctgataaaatttctccacatctcagcttacatttggattcagagttgttgtctacggagggtgagagcagaaactcttaagaaatcctttcttctccctaaggggatgaggggatgatcttttgtggtgtcttgatcaaactttattttcctagagttgtggaatgacaacagcccatgccattgatgctgatcagagaaaaactattcaattctgccattagagacacatccaatgctcccatcccaaaggttcaaaagttttcaaataactgtggcagctcaccaaaggtgggggaaagcatgattagtttgcaggttatggtaggagagggtgagatataagacatacatactttagattttaaattattaaagtcaaaaatccatagaaaagtatccctttttttttttttgagacgggttctcactatgttgcccagggctggtcttgaactcctatgctcaagtgatcctcccacctcggcctcccaaagtactgtgattacaagcgtgagccacggcacctgggcagaaaagtatcttaattaatgaaagagctaagccatcaagctgggacttaattggatttaacataggttcacagaaagtttcctaaccagagcatctttttgaccactcagcaaaacttccacagacatccttctggacttaaacacttaacattaaccacattattaattgttgctgagtttattcccccttctaactgatggctggcatctgatatgcagagttagtcaacagacactggcatcaattacaaaatcactgctgtttctgtgattcaagctgtcaacacaataaaatcgaaattcattgattccatctctggtccagatgttaaacgtttataaaaccggaaatgtcctaacaactctgtaatggcaaattaaattgtgtgtcttttttgttttgtctttctacctgatgtgtattcaagcgctataacacgtatttccttgacaaaaatagtgacagtgaattcacactaataaatgttcataggttaaagtctgcactgacattttctcatcaatcactggtatgtaagttatcagtgactgacagctaggtggactgcccctaggacttctgtttcaccagagcaggaatcaagtggtgaggcactgaatcgctgtacaggctgaagacctccttattagagttgaacttcaaagtaacttgttttaaaaaatgtgaattactgtaaaataatctattttggattcatgtgttttccaggtggatatagtttgtaaacaatgtgaataaagtatttaacatgttcaactgtctgtgtatcattcaattcagcatggtagcctcagcaaaacactgacaacctgtaaaacctttggtgattcttccatttcctagcaggtgtggttggagatttatcttttatttttggagatgggttcttgcttgttgcccaagccgtcctctaactcctgggctcaagtgatcctcccgtctcaacctcccaagtacctggattactatgaacttttgctaaatccacaccacacctggcaggctggagattttcaaagagcccaaaaaggtgcaagaaatatatggagtaatcttaccctccacctttaatatcataagacagaggttcccatgacaaaatggagttcattgacgcacatagcctacagatgcatttttgtttggtgcacatagtattgtctgttttcttgaggttttcttttatttcttactgttacttcattgcctaatttagaaatcgaaagattcacctaaaaatccaggtttctagcttctcttttaaaatcatatctggcaacactagtttctcagtctcttgtggtggtaatttcctggagctaaattgaagttgcacctttggacagaggatttggttacttcctactgccttctggacacgcaggttgtcagctgccattcaactttgttcttgcactattgatggtggttgttaaaacatccagaatgcctttacattttgaatgtgggacccacgtcctggccacctgaagatgtaagtaccatgttaatggaccacagtcaggatgaaaggaaagactgtccaggagaagagaaattagctaacaggagggaaatagggagttttcaggcaagagcttggcagtgacaataaagcagagccaagcatctcaggagcatggcagggactggggtgggacaaacaggcagaagtgggcaggactgcagagaaacacactgtctggatgtggatgctttccctcccactccctgggcaccaagcagttcagagaacaaaaacattcgttcttcttgctactcaagaaattttcattttataaaaccattaaactagcatcctctttgcattagctttctagggttgcctgtgacaaattatcaaaattggtggcttcaaacaacagaaatatcttctttcacccttctggaggcaacaagtctgaaatcaaggaagccataggctctaagaaagaatccttccaaaaaaaagaaaaagaaagaaagaaaagaaaagaaaaaagaaaaaaaaagaagaagaaagaatccttcccttcttcttcctcttctggtgactccaggcattttgtggcttgtggctgcaaaactccaatctctgcctcggtctccacataacctgctccttcttctcccctttggtctcttagaaggacacttattatttgatttaggccccacctgagtaatcaggataacttcctcttgatctttttttttttttttgacacaaagttttgctcttatcacccaggctggagtgcagtggtgcaatcttggctcacggcaacctctgcctcccggattcaagtgattgtcctgcctcagcctccctacctgagactacaggcacacaccaccatgcctggctaattttttgtattttttagtagagatggggttccactatgttggccaggctgatttcaaactcctgacctcaggtgattcgcctgcccaggcctcccaaagtgctaggattacaggcgtgagccaccacgcccagtttcctcttgatctgtaacttatgacattgcaaagatcctttttccaaatgagtcacactcacaggttccaaggattagaacatggatatatcttttgggggatcactgtccaattcaccacactctttaaagtaagagttttacttaaacatatagctccataatacaattcattgaaggacagaaaatacaagggactgtttaaaatgccacacttggcccagcaccgtggcacacacctgtaatcccagaactttgggagggaaagacaggcagatcgcttgagcttaagagttcgagacttgcctggccaacatgatgaaaccccatctctacaaaaattacaaaaattggctgggcgtgggggtgtgcacctatagtcccagctactagggaggctgaggcgggaggatcgcttgagcccagaaggttgaggctgcagtaagctgtgatggtgccactgcactcaagtctgagtgacagagtgagacgctgtctcaaaaaaataaataaaatattacactttgagcaaacaataccaaagcaaaacaacaaaaaattaaagcaatagataatgcaaaattcagttatcaaatagtcaaatgagggaataagtacttgctttgttaaaaggatctgcaatagaactttccatagcaaacttcccatatattaatatgtgattgtttacatttttcagaggttcaaaattatacagagctggccacgtgcagtggctcacacctgtcaatcccagtacttcgaaaggccaaggcgggcagatcacttgaggtcaggaattcgaggccagcctggccaacatggtgaaactctgtctctactaaaaatacaaaaattagctggacatggtggggtgcatctgtaatcccagctactcgggggctgagacacgagagtcacttgaactcgattcaagcgattacagaggtggaggttgcagtgagcccaagatcatgccactgcactccagcctgggcaggagagtgagaatccaccttaaaaaaaaaaaaaaaaaaaaaaaaaacgaattatacagaactttttaagttgacttccactaacccctcacatctttaaaagcactgatttaaaaaaaaacgttaaggccttcagtttggcttaccagagagtttaaagtggaatttggctctttgccctttggtaatgccacgaactaagaggcaaagaaatggcccaagtagcttgcttgtggcttttctcccagaaaaatgagtgctaagaagttcttaaaacacttccatagtacaaatcacaaatcagagtgatgccctttacccaggaaagaaaacattaatgtggttggtcttgtttttgttttttgtgattgagtctcactctgttgcccaggctggtgtgcagtggcacaatcttggctcactgcaacctctccctcctgggttcaagcaattctcctgcctcagtctcctgagtaggtgggactacaggtgtgtaccaccgcacccagctaattttttgtatttttagtaaagatggggtttcaccatgttggtcaggctggtctcaaactcctgacctcaaatgatctcccctcctcagcctcccaaagtgctgggcttacaggcatgaaccaccgtgcctggccgaattaatgtgtttttaaaccaaaatcctgacatttatttgaaacaaactaggcaatccttcacagtgcttctaaaagcccagaccaagccctccttttagaagagcaagtctcatgagcagcgtgaggtcagagatgatcaggtccatgcacatttgtgtctttccacaatgtctgactttcttgaagtaatctcaatcacaaaagccacgagctgcacggagttcctaaggaggcagtttgcctcagtgcttcccatttgctcgatagtcagagctgcagtcacacaggctcaagccactccacaagtcagtcaatgtggcagatcatacataatagtatacttaaaatataaatgttatagattaaacatgccacaacaaagtaatattgaacatcaaaagaagaaggataggaagaaagggttaatgaatcaattcagggagagcgactaaggcaaaaagaatctcctggtctgcgccaggcagtccgagagccttcagtggcagatgccaggtgattatcatgattaacagcaagatggtgtagttaagacggccatttcaagctgcgcaagtcctgttctttttatagccacagtcctctagtgaggactgagagtggaaaagtgtgcttgttgatgtcctcatctggttggatgcagtctttatttattaagcaaacatcttgtccctgttcgcaaagtgccctatgaaatataagatggagtctctaagatggagttacttatgtcaaggggcttgacacagcaaaagaacagatttttatatattaagagtctaatatttacatttttagatagtggtgtggcagagtgtaggtgaaaaacacctttttttttttttgagacggagtctcgctctgtcacccaggctggagtgcagtggcgcaatcggctcactgcaacctccgcctcccaggttcaagcaattttcctgcctcagcctcctgactggctgggattactggcgcctgccaccacgcccagctaatttttttttgtatttttattagagatggggtttcaccatagtggccaggctgctcttgaactcttgacctcgtgatccgcccgcctcagccttccaaagtgctggcattacaggtggcagccaccgcacccagccagaaaaacaccttttaagatgagaatgcaagaaatgaaaatgttatgtccacacaaaaatatgtacagaaatgttcataccagcactattcataatagccaaaaagtagaaacaatccaaatgtccatcaaatgataaacggataaataaaacatagtaaatccataaaatggaatattatttggcaattaaaaaaatgaagcactcatagatgctacaatatgtaagaatcttgaaaatattatgctaagtgaaagaagccagtcacaaaagaccacatactatattattccatttaaatgaaacatgcagagtaggcaaatcttagattcatgatggcctagggctggggactaggttaagaaagaaatggagagtggctgctgataggtacaggtttccctttggggtgatgaaaatgctccaaaattgattgtggtgatggttgcgcaattctgtgaatatacaaaaaaaatttactcgtacactttaaatgggtggtttttacggtatgtgaattatatctcaataaagctcttattttaaaaaagagagagaagaaaaaaggaagaaggaagaaaaaaaaaggaggaggatgagggcaaggacaagaagaagagagaggaggaggaggaagaaaaatgaggaggaggagaaagggacgaggaggaaagctgggcatggtgatgtgtgcctgtagtcccagttactcaggaggcagaggccaccctgggcaacataatgatatgccgtctctaaaataaataaacaatgaagaaggcagtgtgaacgaccaactgtgtcaaacaccgctgagaggtcatgtaagacaaggactaagaatggaccattggatttttttgtggggtaaaatatacacaaaacttaccatttagccatttttaggtgtacagttcagtagcattaaatacattcacactgttgtgcaaccatcaccaccaaccatctccagaagttctcacctttcccaataaaaagtgcagtggcgcaatcttggctcactgcaacctccacctcctgggttcaagcgattctcccacctcagcctcacgagtagctgggattacacgcacatgccaccacacccagctaatttttgtatttttagtagaaatggggtttcaccacgttggccaggctgatctcaaactcctgacctcaggtgttccacccgccttggcctcccaaagtgctgggtttacaggcgtgagccactgcacccagcccgatatatctattttctatgtctacaaatataacagtctcaaagcatactcaaatacggggggaattaggcaggagggtttgacagaggagtaaagaaatttgagctaaaagaccaagaatgagtttgtatctgtctgctagtggtctgtttcctgaagcccgtaactcaggaactcctgaaagtataaactggtttggttttttgtttttagttgttattgttgttgttttcagacaaggtctcactctgttgcccagactggagtgcagtggtgcaatcacgactcactgcagcctcaacctcctgggctcaagagatcctcccgcctcagcctccctagtaactgggactacaggcatgcgttaccatactcggctaatttttgtattttttgtacagacagggcttcgccatgttgccccggctggtctcaaactcctgagttcaagtgatcctcctgccttggcttcccaaagtgctgggtttacaggcatatgagccaccacacccggcacaaactggttttgaatatgaacggaataaagattttcaaggaaaacaaattttcatttagtattcagaactcatctttaaagtcttccatgtgattttcaaccatgataggcaaatatgggctttaaaaagaaggaagaggaaagtgaccagtggttctgagcccttgttttaaaaagtcaatcacaggtaagtgagcaaatggacaagagatttaagtaattttcaaagttggggcatttgctattttatcagtgtctcagaaggctgtccaaaggctatagatttaaacaaataacatggagtcctcgagatactggcatttccatttttaagggtaaacatctgaaaatgatgatgttcaaattaagagtctggtagcagtttacagttacatatggagtcgaaagaaagaaaataccatctctgttcttacgtacagattatttattgtaaaaatgtaagcaattacaaattgatctgttgtgaaatcagtgctgaattaacattaatgtaactccagtgaaaaaaatgaatttgatcaattattatcaggaataaacattaagccatgacggtgctcaagttatcttctgatgacactgctgtattaaatgtacttttcctatgagaaccttagaaaaataaaaatttctgagtagatcatctttatcttttctttttatatatttatagccatattttaatataataggccatgaggtgatatgtaaacatacataatttcaacaaattttgtcaaataaaatcatatttctagctagaaacttgccttctaatcattttaaatgaataatccaatcatccgtcaaaacaaattttttttttaaatgactgttaaatcctaaccttcattttcccctggggaaatagcattaaaattgttacacaatctgctatagaaagtgggattctctattttgaagccactagcttgcatttgcacatctagcacaggagaatcttcatccagtgatgagcgggttacacggatgaacgctaagcttcgctgcacaggtgcagggccccggcctcacagatttgccttctcccttgccgccaagtgagatccggactgcacaaaggtgtgaatcgcattctgttttaaaagaacaagatgagcaggttaatcacctcatgggcagcaacgtgatatttactcagttttaatatgtatgcaaatgaaaataataattcagaattcattcactttaactgtcttaaattgcccagcgctaaaatgaagagtatgtgttttgccagtgaattctttatctctcaaatgaatttctgcacagctgcctaagaaatctaacagtggcaggtaatggcccctgcagactgtaatgctaagtggtaactaagtcatgcctactccaacccagcacacacagcctctgcatggccaggctgctcccagcttaccttaggcttctcagcattgtacttgtccagaagagcctggatgtggctcccgtagtcagggtggacctcagtgaagttcttgacctaaggccaaaggaaaataaatgcaagcattactctaactccctactatatcactccccagggactgtggtttcccagtgtttattccataggggaggaaagacgtttcagcaggaggcagtactacaggtgtttaacaatgccagcctcagagttaagatgcaggtccagtgaacactctgacatatactggctgagcaacctcggataggtcacttaacttactgagcttatgtccctctgccgaaatgcgcaagaaaatgacacctaatcagtataattttaaaaatactatttggtctttgtcccccattcctgacacagatctaaaacccttcgaatgtactgtcttttatatactactaagatgattcatgggggcctacatagattcctgatggaggctcacaccaggaagaacaagcacgcgatcagaaggttagaacttctagccccacccccaaacctccagggatgggagaggggctggagattgtattcaatcacccatagccaataatttcatcaatcatgcctatgtcataaaacctccagaaaaacccacaactggcaaggtcagggagtgtctggattagtgcacacatccaggagctagaagggtggtccactcagggaggcacagaagctccgaggccttcccccatgcccctcttccatttgtctattcctgagttgtattctttataataaattggtaatcataagtaaatcattttcctgagttctatgagtctttccag

SEQ ID NO: 727 - DNA, 898 bp, Homo sapiens
caaggctacaggtgtctttatttccactgcacgctggtgctgggagcgcctgccttctcttgccttgaaagcctcctctttggacctagccaccgctgccctcacggtaatgttggactcggtgacacacagcaccttcctgcctaatgcatccttctgcgatcccctgatgtcgtggactgatctgttcagcaatgaagagtactaccctgcctttgagcatcagacagcctgtgactcatactggacatcagtccaccctgaatactggactaagcgccatgtgtgggagtggctccagttctgctgcgaccagtacaagttggacaccaattgcatctccttctgcaacttcaacatcagtggcctgcagctgtgcagcatgacacaggaggagttcgtcgaggcagctggcctctgcggcgagtacctgtacttcatcctccagaacatccgcacacaaggttactccttttttaatgacgctgaagaaagcaaggccaccatcaaagactatgctgattccaactgcttgaaaacaagtggcatcaaaagtcaagactgtcacagtcatagtagaacaagcctccaaagttctcatctatgggaatttgtacgagacctgcttctatctcctgaagaaaactgtggcattctggaatgggaagatagggaacaaggaatttttcgggtggttaaatcggaagccctggcaaagatgtggggacaaaggaagaaaaatgacagaatgacatatgaaaagttgagcagagccctgagatactactataaaacaggaattttggagcgggttgaccgaaggttagtgtacaaatttggaaaaaatgcacacgggtggcaggaagacaagctatgatctgctccaggcatcaagctc

SEQ ID NO: 728 - protein, 249 aa, Homo sapiens
MLDSVTHSTFLPNASFCDPLMSWTDLFSNEEYYPAFEHQTACDSYWTSVHPEYWTKRHVWEWLQFCCDQYKLDTNCISFCNFNISGLQLCSMTQEEFVEAAGLCGEYLYFILQNIRTQGYSFFNDAEESKATIKDYADSNCLKTSGIKSQDCHSHSRTSLQSSHLWEFVRDLLLSPEENCGIWEDREQGIFRVVKSEAKMWGQRKKNDRMTYEKLSRALRYYYKTGIRVDRRLVYKFGKNAHGWQEDKL

SEQ ID NO: 729 - DNA, 180026 bp, Mus musculus
  misc_feature (1)...(180026): n = A,T,C or G
ccgattccatacgcctgcttgctctgccacttgtttgcaatgcttcatgtgctcatttccacaggttgtgaatgttgtgtgtaatctgtttgtgcattggctcactttagatctttgatagggtttatctcataaaaaattaggccacacacaggaaaaaaaagataataatggtattattttagtgtgttgggtagcaactaagagaagaacatatatatagataggtgagtagaaaattttgggttgtggtgagttgcagcctggttagcaattcccaattcctagtgtttgtgataagttagaaaagttgattaaaattgtttgccaaatccagtgcacacatatgtgcttatcaggggttgccataaagccttcactgagaagttcaaaaatttcactatgatgtaacatagtctgctaagaaaaactgacaatagacaagttagcagggatgagaaaacactatgagttgttggtgaccagccagtaataattctggattccaagatgaagacgcaaagacagatgctgagtcaacaatccatttttgtgggctgtttcactgaagcagagggtgccatatagccatttgattggacagaaatggtctgagccaacaaaagatgatgtagtagaggatgcccacaaaatctatctgtccagattcttcttggctctcatttgtgacattttcccccattggggcatggaactggacgctttaagcagtggcatagggggaatcttaggacctataatccaaaaatatgtcagagaatttcttcttggacagtgctatgcagcactatggtggggatgtttagggagagcaatttagctttcatggctacatttgagggaaagggtctctgggttctctgaccatccctaaggaggaggaattctcacttctgagacttctttgagcagcaggaaagaggaaaggaaggaggtcagaggcaagtgttgcttcgaggccttcactttgaagtatgttttttttctgaatcccaatatatttgtaatacaaacatgcattttttatggcacagaattattattatctggtttgatttaagtattttaatgtagacttattgttctttattatgtcgcaacttgtcatctaaatttgtgtagaaagaccattgaggagggttaatataaaggtactgagcatctttcaaatactaatctctctctctctctctctctctctctctctttctctctctcctataggctgacacccatgacgtggtgaaaactcagggtgatgatgttctgcaataagaagaagctacttggtaaggcttgaattctttagatgacacaaaacaataggaactgtaatcttattttataatggacgtttgattcattccgaaaacacacacactgattggaagttaaaaaagcttccacaattgagtatacccgtgtacctcttgagggcttatgaaacaaaattcagaagtttctaacatctcactaagttcctttgtgtgttgctgtggttgctctctgggaattcccagccaccttctgatctctgtcaattttcttaactgtggctgcttccaacaagacctggtgttgcaagcctttgttatgttaagaccgtggtccaaaatccaggtctaattctatcaatatttgaaacaatttctgtgtacacatgaatgtagacatggaaaaaatgggcaaaactttatacattaaaatgaggatgtggggggagaaagagagggtggcagggagactagtgcttcattgggagggaaagcacatctagagtactggacttggtgaaggaggcctgtacctgctgtctctctgttcttgtacctgggtggatccaccaatagtttcttagtcacctttgcagaatagcattcaccatctccaccctcccaactgccaagcctttgtcattggtgaggcaggctcatgcttcaaatctgacctcactgcatcatctccctctagctttgcttccttatgtgtaaagcgaggctgggaatggcacgtacttaatagcattgttttgaggactcctgaaataatgcctgtgaaataccctaattgtatcgagattttagcaagtgctcaaatcagctcttgttattactgttatagcaaacattaagtctccagtcatgaatcatgtatagaaaacaacataacaggggctaaagattgtatttgtaatttatagtatctagtccaggtataccagaaggataaatttgctgtgaagctatagcagccatagagggaataaaacttccagtaaattgaattttttgactctttgggctggatggacacatttgcattggcttatcaaagagaaaaacaaaccccaaccctttagcacctgtttgaatcaccttacttgcttttcaaactcttttgtgaggacacacacacacacacacacacacacacacacaattgtgggaagatttctttttctggctttaattctctttacttatctatttaaacgccagttgatcccagaagccaccagtcactgctgcaacccaacaggagcactctgcttggggcacatctctcagttgtatcaggctgtgtccccgagtcaaatcagaaactctggaggttgggctcactgatttaaagctctaccgctcaccatccttctctgtgtttagattaggtttccaaccaacaagattttgttgaaagaaaaaaaattaaggaagagaaaggcttaagtgattgatttagtttgagggaatattgtgaaagtacctccctagaactccccaaacctaacaatctcaccgcttaaatagatacttcatgattggagacattctttggtctttggatgcactccaaactaacgtaagaatctcagcctatgttgtcaaggttttacacagggtccccaggttctccgtggtatgtcattatttaatgacttcagcagaatacaactaagtgtctgaacaatgtcttgaaaatcacgttggccagaggaagaacgcactgtaggtaactgacggactgtcgtgtttattccatctgtgtgcacttgagggtcctagaaggacctcccacttctccatcttatgattggtctgaatggtgttcctgctccccttagagcctaaggctgagtgtttaagatctgctcacagacaaactggttaaaaagagaggtctaactgtcttgcttacttttgctggctggaagtgagagagaaggagtctgtaaaagagcccagattaggaagatagtaaccatggccttcaaggactggcagcagggttgatgatcgatcattagccaattttcactggaaatgtttagaaaattacttcaaggccatcttgggcgacagtgatagcagcatttggatgactctcttttacctcttttgtttttatttattaaaaaaaaagacttcttgtatgcattttttcttgagaatttcatacatgcgtataaaggacttttgagataattttctgtttaaaggtgcaccccacacttcctagtttaatgatcaccacacaaaggcaatgctttgctgagaagtcatagttaaggaaaggctccgagctaaagtgggcttttagcagctgcaggcccagcccttgtctcagcgccttggcttaccttttcccacctgagggcttttttgtctttttaatttttttcccctaatctgactctcgttttatgggtcctaaaatcttatgtacatgaagtagcatcttaattgtagttaagcagtccaggcaaatagtgttctagaggtccctcccccagactgtattgtgccttcagtgattgacactgtgtctggatgctttgaagtgtgtcttcccacttctacttccaagcatagccaaagtattctttttgaaactgggagtggatttaataaattattagcctcatcagataattactttttggggttagggtgggattgggaactatacgctagctatcccttgtcgaggttgagtgtgccataattttcactcatttctagggccacttctgatccttatttggtcaccatggagagtgaaacacacacagggtgcagagataagggctcttccagcactgcattgctaatctatttgtttgaggaaaacatcacatattattagtttttgcaactttgggggagtgaagattattttattttactttatttttgttgttgttctttgttttaaacatatatacatataatttttacatatgtacacatgccactgtgcatgtgagaaggccgcaggatatgtatatatacatatatgtatatctttatatgtgtgtgtgtatgtgtgcatgtatgtttgcgtatgcttggtgcctgtggagatcagaagagagcattagatctcctggaactggagttacacatggctctgtttagcaatattactgctgtgaattaaacccaggtcctctgcgagaacagcaagtgctcttaaccactagttatctttcctgcaccagagagtgaagactatttctgtcatctacatggagtaggactttgaaagcattccccatttttatattctgcagtgggttcagaaccaagtctaagagaattcgtcctcttctgtggtaccttctggaatcactaagatacttctgtcacctgcctctgttacttttctcaatggccacaaaacatacaaacctagttatcagcttgacgtgtgtcatgtgggtcttacattcagccagcagcatggcaaagcagctcactagctgttttctaggatggccaattccaagtgcaggtcacgtagtgttcagcgtaagtgaagttgagcaaaaacagctggggtgattgtttgaagaacacccagctcacttattcatctgaataccccaagtacattccttgatttagttggaggagcagaaaatgagggcaaacgtccttctgggtcgtttgggatgttatcctatgagctgttatgaaacatctctaaaagcttcaccctcatgttatttatgtcaaacaatcagttctttataaggcgttattagaaattaatgtctgagtcatgaactattttgcttttcacgagaagtgtgttttttggtggttgttattagcagactgtaaataaaaatcaatcgtggggctggtgagatgtctcagtgggaaacgtgcttgcagcacaggcctggtgacctgagcttggtccctggtaccacataaacctatgaacagagagctgtctgcacaaagttgtcctgtggccatctcacgtgcactgtggcctgtgtacacagacacgtgcacatacacacaccatatgcaataataaataaagctgaaaagaccacagacaatttgactgtagagctgggggctcaccttgagcaggcacttgggtcatggctttgattggccaccaactttgcttctgtaccttctatacaccacattgctattgaattttaagctgttattattattattatttcttttgctacaccttcttaagcgattggcttggagatgatcttttatagagatcagcaagcctatttttctgagttctgattggaatctggtgggccttttactttgaggactaacatcttactctgggccagataaagtcctgcgtgatatggctgttttggctggaatcctgtagagatgggacacactcaggtctcaagagaacagcattggaaagatgaaagtgaaaactagttaagaacagatcagggagagagagtcagtcagttgggaggcaatgccatacgtgtagtacaatggatttgagttcaactgtaagctcctgcagtgcagtgcaagtcggcagaagcaactgaagccaaagaataagatgggaccagaagattggaacaactgacagttagtttgaggtcaagcagtaaaattcagtgaaaagctgagagaagccagatcgaatctgtccgcttggagaagaattggagtcagaacagttgagtgaaccagctaggtagagttcaggaagaaaagatatgcttattcagcagtaagcctctgcgatgacaattacattaggagaataaaagttgatttttcacgttgaaaaaaaaagtcctgcatgtttgatcctttccttttgtttattcggttatactcccttcttggttttcttttcttttcttttcttttcttttcttttcttttcttttcttttcttttcttttcttttctcttctcttctcttctcttctcttctcttctcttctcttctttctttctttcttttataatttccttcatcttacagtttggatatacatttaaatcaagttttttcaattttatctgttctagttcattcactaaatgtatattccagggggctggagagatgggtcaacacttgttgttcttgtagaggacctggatttgatccctcgctcccttgctcccacatggtggctcacaactgtaactccaattctagaggacctgatgccatcttctgacctctgtaagcttctgtgtgaggatgatacacataaactcacatcagccacacacacacacacacacacacacacacacacacacacacacacacacacactccagttccagagcacccgatgccctgttccagcctttgcaggcttcagcatgcagacggtacacacaaactcacactcgtacacacacatacatataaaagagtcaagatttttccaggtactttatcttcttttctttctctctctctcttttttcattgttcatattgtcctgcttctgtttcattgataccatgcattcctacatatatttaagacactcagtagaattaaaaagaaagtttaacctattctcccacctgccccagtatcttcttctcttccccttggaacatgcctttgaagtggtaatacaatttatcattcaaacctggatcctttctgctagtgctgaagttgtacctgggaccttatgcgtactgggtgagctctctactgttgggttacattccagctccaagcagagatatttttgagaacgaaaacaaacatgcaaacatgttgcatgcaaaacggcattgtcgccctgtttataacacactcccaacccttgtatctctgtcaggatctgagtttgcccttggcctccgtgggaggaaagctcttctaatgtgattggctagagttgcttctatttttttttctctagtcataccgactcctttcactttctagtttattatctaagctttcttcaaaattaatggccttctcccaacaatacttttcctcttccacacatattttctgtaacttcactgggacaagggaaggcatctgctttaagtcttttattaacacatgctgacctactccctttggagccagaaaaatttggtgattcattaaaaatttggtgtggggtgcttctgtaaatcctatattccctggtgaccaaactctttttatcactgaaaccatacctggaaacaggaaacattcaggtttaaatcattgcatgtcagagaagacactcccagcgggaattcttacagggtatttgtgtctagcttcctcttccaggataggactgccctgttgtataccatagcaacatatagaagaaagctaatttttgcaaagataattgaggcctagtgtagccaagctaagggcagagacctgtaaagatttagagtcaaagccagaatgttttagagtttaatgaaaagataccaaaatcttctgccagaatcaattcatgaaaacttagttggtaaagacaataatcaccaaaaaattgtagacacaatgattaagactcaagcccaaggacttagaagcaaatggagggcttcctggatctaatcaggtcttatggtgtgtgggcaacatctgattgtttagggagagctggtgggaatctattagaatacaactatagaagacatatatggctcagccagtgaaggtggcctgagtttgaatcctggacccatgtagaggtaggaggcgagagtacacagaagtgtccttggacctccatactcaggctgtggcaatgcagatgtctccccataccatacggtcacatgcagaatattaaccagattgaaaacattttagaatgtggctatctataattctaggtggataactccttggtttgtagggttaaggttgtggtgttggaataagtacagtttggcgctcttggatgtggaccacacaaatgtggactctgaagatgacagttccctggttgtgtatcatctaagccagggccaattaaaatttaaatgagtatgtataatttttgacttggagctgaagcctctaagtctcctgtagtgtgttgatggcccaggtcaacttttgccgtttgtaaagagccctttgtacaccctcacaatactactacttttttttttggaaagaagtgttttcttttttcctttttctcttcctcccccctctttttttttttttttttttttgtgttaaggtagcattgcacaaatgaatcacctcaatattttaagcctcactctccaagtactactttggcttttgtctttttttgtttgttgtgggacaattgagaaaatgaaatggccaagcctttagagccaggagtgaagtttctcttaggtgattggttgcttgtaaagctgcttcccagtgacaagaaggcacactcaggggttgtgaactgatcccatcagtccagtcttgctctttatcagcagctagaagacgcaggctggacggcaggaacaactacacaaacttgactttccaggcaagaagagaaccatacaggtggatgttagatgaacagtgcacctcacaagtgacttagttagtcatatctatatgactttatttggctatgctgtattttgtggttttgtgtgtgtgtgttgaaagtaattttcaaggtatgttggcttttagtgaatctttctcttctagaaatgacatgactccttaagagaaagggttatagacttcgatttttaaaaaccttcttttaataaaccagaaacttccacttcaaagggtctttgtggagctgaattgatgtacactagagaaataaaatgttttgttttatggattttattaaagaggaaatgcaaaatattgtagcttctcattttgagataaaaatgtgtgtgtgcattcttaggtgtttgtatgtgtggtatgtgtgcattcttttgtgtacgggtgtgcaagcacatgcattcatgtatatgtgcattcttgtgtgtttgtatagtatgtttgcattcttttgtgtgtgtgcaagcatgtgtactcatgtgtgtctgtatgtgtgtgtgaccattcttgtgtgtaaatgcaagcacacaatgccacagtacccatgtagtggtcaaagggcaatgtccttttgttttcgccctgtttgaggcaggcttgctgtgatttttctctgcatacaccaggctagccaggctgagagcttccatggattcccttgtccccgcctccatctccctgcaggggttttgagattgtagagacctgtgtggtgcatccagctttcacatgggtttgggtcactcaggtcctcctgatttttttccaagacagagtttctctgtatagtcctggctgtcctggaactcactttgtagaccaggctggcctcgaactcagaaatccacttgcctctgcctcctgtgtgctgggattaaaggtgtgcgccaccacacccggctccctcctgattttaaaagtcctgttacccagggaaacatttccccagacccatttagaactttctaactggtttgcaacattcaggttgaacagaaacctacgccctccaattcaaaagagaagaactcaacagaaaccaaagtgactctagttatgtcacttttacaagttatacctgtttctatgggtttaacattaaaactcataccttatttttctttcttttagaagtggagcgggtggtgaaagccaatgaccgtgactacaatgagaagttccagtatgcggtgagtacacagcacagcatgtcgggggcagccttgttcagggccagcagtgggattcctgccttcagagagccttacagcaatgaaaagctttccttgttggcccatcttacaggtgctggctgtactgtgtgcttgcacacatatttctcctctgctttaacaactccgtgtgcagggggaaggtgataaaatacattctttctcaagaacttatgcttagctcattttgatgtccacttaggtagtagaatgtgctggaaaagcctgagcataggctatgaaagtattggtcgatgagaaagtgagagtcaaggctgaggatcgatgggatgagtttgaggattttcttgaagcaatttttgggaaatgtggaaaacatatgcgggatgagattcctaagtgctgaatgactgagtttatgaagcaaatagtgagatccattagttcaagtgttcaagtgttcacggaggcgttgcctgtggagggagggttttggtcaaggaacactagtatttcatttctattggcagatcattggcagagtatttaaatgcaccagcactgcagtttggtgctgtggcacacttagcagaggtccccaacagctcttcttttatcctgtgtggtagtcatatagatctgtaatctaaatttgactctctgtgtaggtttccacacacagaatctggaacttgtttctatgactgctttctttctgtgaaagaatgtactgaggctctgactttattcatcagttttgtaagtggaatcaaagcagctttgccttggggaaggatccctctttcaagatgatggctatgcttcttagaaaggaagggcagggtgacctcaggcgatgaatgtcactctgtgcagtgacatatggacaccagcagacttaaccctgtaccctcacatccctgctttaggtaatcctgtatctgtagaggatagctccttaaagccttgaccataagatcccagtctgcttgtctgtctatctgtctgtctgtctgtgtaggtcagaggacagcttgtgagaacttgctctctctttccaccttgtggttctctgggtagaactcaagttgttaggccttgtggcaggtacctttatctactgaactatccagccaggccataggtatatatttttagatttcggggaaaatctgtaaatatatatatatatatatatatatatatatatatatatatatatatatggataactatgtatttaagtacctacctacactcaattatttcaatgtataacaagtacttttactccatgagtataagcaaaatcttattttataagattatacagctttcttctctggtattttttctgtaacctatgaggtatttcaatcataattatatggaagataacattaccctcttgagcctaccacccaggcagagtaagcattaacaatttgccatacatgtttgaggtctgtcctttaaaaccaatagtatattaatgatgtagaaatgatatgaacaaagctacaaatgtgtggctatgttttttgttggtttcctgctagcaccaaggtgttataacggtaacctggggcctgagcagagtctacatggctgccctgttttggactgaacatgtatcaagaagcaaaatccattaagccctcagagctaaggacaacagaagcttagagtgagaagctgccagtgtgggttatagagattcatttctagtgggcagtggacaagctcagagggacttgaggtgtctggcctttactggcctctctagcagaatgtgagctgtagctctctcagtctcattagggctaattaaaggcaatgacctcatagagctactgtgaggactaaggcatgaaaggacacagtgactgttcgtctctgtacatgtaggatttgaacctatgactttttactaactggaatacccttttagctaggcaactcccttaggtgtttgcccagtcttacccagctttaatggaagtggatttggaggatcccaggaaaaaagaacatatttattggagtgatattcccaccaaaacactgagaagaaaacagagtaaactcagtcctcttatgggaaagatgataggagaaataagagttctcaaatgtggtggaaagagcacttgaggctaagacgggaactagtgtgaaccttttctcccaggactagcttgtgagctgattggttcctctgagaatcatgtatttcatctacatattgtgaggaattttctgttagggttgcttacttaaggattaaattagatcacttcaacaaaatattcgataataggaacaattctatcacagtgtttctcaaccttcctaatgctgggaccctttaatatggttcctcatgctgtggtgacacccagttctgaaattattttcattactacttcataactgtaattttgctactgttatgaattgtaaatatctgcattttctaatggttttgggcgaccaacatcaaagagtcgttcaaccccccaaaggggtcttgacccacagggtgagggctgctgatctatcggatgcttcttgtgggccagccttagttatagatttttctcttaaacctaatggagctgtggacgggttccacagtgagtttgggagttcctgtagggcagtgatgctatcacagtggtgctaagaaaacacggagaaactcattaggcctgtgaagcactcacagtagatatcatgttccctgatgtaagaccgtgagatgccttaagtctcatgacaaaccgtgaacacgatgcagttgtggagaagggagggtgtcacacgacaagagctcagtggctgtggtagtggagtttcctccttggatgagccaatttgaaagaatgccaacccagtgaggtacttgccagcttcctgttctgtgcaaggcatcagcaaaggcaggacattttccatcagcctccctgtggatcgtgatagacactcagtggatagtgaaggcaaggatggtagccatgactgcttaacactcacggtgcttcccaactaaaggctgtggacctgcacatattactaaactaccatactcacacatgtgatctcctgacagcaagtactttcgtcgtcttgttttatgtgagaagacatcgaggtacggaatagtccatgtcagtgaccttctcaaacgtacatagaacaaatctgttggtactgctgtgaggtgattagcatatatttcagtcttccagagcatccactcagatgaaggaaatggagcagtgtctactaacccatcgcaaccaagaaatttgatggtgggaaggctgagactgcataaggctggtttccacagtctatgattttgtgtatgattaatatgtctttcttttgaaaagtcctagaaaacaaacaaacaaacagaaaaacaagtgtaataaaacaaaacaaaaatcaacctctctccccaaccaaacttgcccattctccacctcctcccttcctgtcatggaccccgtggaaactggtgatttgtttttattttattttattaaaaagtaaggctaactatttcatttttatttcaattcaggctctgataatgttaatgttggcaagttaaaaacttgtttttggaaggtgctgggaattgaagttgggactgggcttatgctaggcagtactctactactgagctatggccacaagtgaccttatttttgtactctaaagatgaagaaaggtagagaactatagatttttcaaaacaagtccatacaatgtgcctgtgtttctctgagaccaattagctcaggaataaaatgttcttgtggatatatagatgatttattgnnnnnnnnnnnnnnnnnnnnttcctagagtgcctgctctccacctagcaacatggacatttgctgctttactttacaaagaagatctgagacagtgtccaaactgaacacaaagctcaaagggattaggaatatgtgaggatatgggtgctggcttcttaaatgactgcaaaacacatgtgcaagggagctgttggcttatgatagcggtgtgttctaggccagtgggattatccagcaagggagtacagagtctgcttcccaacttcaaggagcgcatacatctacacagaaagagaagaccagcacaccagaataagccaatagtgagaatggagaggagaggctaaattctaattgtgttatggggtctattacatcagggagaggagaacgcaatgttagcgaacattttggaggaagttttgatagagtaaatgggaaatgatctcagtctcatgtgcttatttggactctcagtgttgggaaggacaacactgagcaagggtcaagtgtgccatgtgaagtcactgcagtccaggcaggcgagatgaagctgcgtgaagaagagtgtcacgctgggcatgtgatgcacgcccattgttccagacctctagggctgaggcagaatttctgcaaaggcaaggcaggccctgtagtttgtatatgggtgacagactcctagtagctggggagccaccaaataaaatagagttattcgtggcctacagattaaataaactgcagcttagtgctgagcagaaccctggtgtggcaagagttgtagatttagaactttgttgtacttaggaggagatgtgcgatattgaaagaaaaggggaagttgtggtgatggctggctgtgcagcgaggggcagacacttggggctgatgagacagaaggaaggagggagcctgcggaggggaggggagcaatgactgaggagaacagggaagagtaaggtggaagtttagggaagggagcagctcaggaaatgggtggctaattggttctaaaggtgggctccaaggggactgagagctacggggaaaccctgttgatcacgaccagctggaagaccttaagaaagtgattttaatcttcctcctctttgacaatccatcaggctatacatggcatgcaaaatattatttccaaattatggtgccttactttcaaactcatcactgaccttaggatatattctatattacccagccatagactgtcattgtctagcagtgtcctctacatcttaggaatgtaggaaactttgtatgaggtcagactttaaacatggaggtgcaactttacaggattagatgcacagattactataaacttggcatgttaaatgccaacaaatgttaacaacattgcaatgaatataaaatcatacaaaccttatatacacaggaagtatcacaggctcgattcactgcatgataagattggagaggttctgatggtcaacatcatgcacctagcgtgtagttgctgtactaaacacaaacttggttgcattggtaaagatcttgaaggcaaacatgcaacggtcacattcttccaactatctagcacatctctcaaagaacacataataacacagaaaaatcattcttcaaccctcctaatgctgtgaccctttaatacaactcctcatattatggtgacctccaactgcaaaattatttttgttgcctcttcataactgtagttttgctactgttacgaatcataatgcaaatatctgtgttttcagatggtcttaggtgaccactgtgaaagggttgtttgacctcccaaaggggtctctacctacaggtcaagaactactgatgtagaggttcatagtctaattgaactttgtgacctggtccaagactctgacagaacttgaccagtgcagttaagtcacacctgtagggaatgctactcttatgattagcaactacatttgggttctacttgctcaagactgcctcagcagccactgcaatgtgtcccgtataaagaagatatctggttcctcccacggatagtcattgggaagttgtacccagggactgtattgaattgtgataatgcagcaggatgatattgtgtgggttgggagacatcctgctgtgttagccatgaatcaccccttttgtaaagtaatgtttttgactttaagttacttcactttatacgtccaagtgtcaatgtagaagggttcctgtcattgttgtgactggataaataaatacccgaaagaaacaacctaagaaaagaaagctttcttttgggccatagttttagaaatcttaaaatattttctgtgagataatatacagttggaattagaagaattaggataggtgatccccgatggtaggatttcagagtcctgttagaggttggctgcttccggatggatttcagttaagacttaacaactgaaaagacgcaagaggaagaaaggtaaccgccccagtgaagagaaccacaaattcagttttctttgtagtcactgcccttatgaaacagggcaaaaccatcatgtgaaaaaagtggggcaacttagcaacaattttgaagctaacgggaaaaccactctctccaaccgtcaccaagtggtttttcatcatgttttgcagttttatcagctcaaacaatatggttctatgatcagattgctaaaatcacagtaactgtcatatcttatattttgtaggttgaagatcaatcaaaatattcatgcaaaaatctggtatctaattcagtatctaatcagtaactaattaggaaaccaatgcttagattttgttgtattgttcatgtgactatgtttcttctttgtaaatatttatgataaaatattttgaaatatgtttaagtagtggaatggttaaaccaagtgcattcacatataccttgtttattatacatactggtttgtggagagaaccgctgaaaatatacttctaaaaagttgtcatttttgttttttgagacaagatcttactgtgtagctcagattggcctggaactcactatggagactaggttggtctgaaattcacaacaatcctcttgtcttagctttctagtactgagcatatagttatgagtcagtctcctccccgccccccgaataatccattttttcatagacaaaataagctatttaggaattaaagttcagttttaatacttcacagatgagctggttcagaactaattgagtgtttatgtgtctttgtgtgacattactgttaatgacatagtagttgaaagggttagtgcggagcactccccaaaacattctggctcgatgagtgggacgttctttgaggaatcaagctcagtgtagcaaatgtgtagactggcaatttaaatctgtagctgctaaccccaggaaaggtgtctccagtggctctggtttcacatctcttcctggttgtgagcttaggagtccagctgtagctggtcaggtgccatggagatatgtaggagaggtgacatcaattcgcgtcaattaccagaaagtacagaggcagaggattgttttgaagccgtgtttctgtgtttggttatgtgcatttgtgtgtgggcatgttcacatgggtgcaagtgcctgcagaggccagacagagtgattggatccctctggccggagtgagaggagctgtgagctgctctgccaggtcctgggaacagagctcagatcctctgtgagaacagcacaccatcagaacggctgagccatctccccagacccagaagattgttttctataagtgacaggaaaagcctgacaggcctctccagtgctgccaacttagctcatgttcactgaatcttagtggggagttattttctaaacctttcccagctagctagcctaaagaattctaattctaactctagaatttatgatttatagaagtgtgtttataaccttctagaggaaggggagccactaaccctaaacactttgcagtctttggataatgcgactaatcgatgtgtattcactccaggagctatcttgatttataaggatgttttcacacaagtatataacacacattgactgtgtttcctgccaggtttcctaccttttcctctctccatgttagcctctttccttccccgacagggtcacttctactttcatgacataaaaataattttgtatgtctatataaaatgtaggaatcacaaatgatagaaaatatacaatatttgtctgagtcttaattcatgaaatgtgataatctccagttgtatccattttcctggaaacaacatatgttcttctgagatgaggtctcactagagagccttggctggcctagaactcactatttatatctggctggtctagaattcagtatgtagaccaggctaccccggagttcactatgtaggctaggctggtcttgagctttcagcagtcctgtctctgatgacaggtgtctgccatcacgcccagcaggagagtttcattactctctgtcaatcgaggcaaatacatatttgtttgctttattctcctctcttcttgatactttccattttgccttttgtttggaagccaaagcagaacaaatatttctcctagttcatatgacaatcttctgatacctgtgagtgaatggccaaacccgagtcccagaataagcacctgaaattccatctcttttcaaagagcttctgtctttttttctgtgactgcttgtggtagaatgttccagagtcaagcacagtattctagacactgtttgactagtttgatgtggaagaggaagtgttactgcagtggatttattaatgaggaggagagagtggcagtcttttggagatagttgacagtaacctcccacttctactaatagtgacagggattgacactctgtcattaagtcccttttgctattgtgtcctgtgcaggtttaccgagcacgacttccgggtctctatcaatagctacactatggaccagttgaatcagcaactctgtgggtggggtctaggcatttttaaaagtgccaggattctaatgaccaatcagggttagtgatcactggtctaggactggggagatggactagtggagaaagtccttgccacacacacagagcactagagttcagatccttagcactcaaaaaaaaaaaaaaaattgcaggcacgcctggtggctggcctgtagtcccagggcttgggagttacagacggagtatccatggaacatgctgctagctagactagccagatcggtgatctctgggttcaagtaagagaccttgcctcaatatataagttggggagcaatgagaaaagacacccaatgttgaactctaacctccacatcatagacacacatgcatgcatgtttgttcacacacaggcacctatacacacatggacagacatatatatgatgtataccacacacatatgcataaacaggaatccctgatctaagtgaggattaacactattttttagacataagtgcttcccttttcagcactagagagttccttacagatcgttcttggcccatggataatttcatcttgtttacttacaaattttaatttctataacttactgagtttgtctacgtcctgacatttgtataattatattgtactactattgtatttttttgtcataccaagaaatgcttttagaaaataaacatttactgaagttggcctgggtgcataggtttataatcccaggagggtgagcctgaggagtagttaagagttaaaagcttagaggcagactgcttgcatgggccaccattccagaatgagaaaacctctaacaaaaggcagagctgagcccagagacctccgtgtttcacctcctcactgcctaagaggcactgtctaatttgcaaggccactggtgatccttactgggagtgacacagagcacatgctactgggttcacacaatgcctccagcattgattctaggtctattatttattaattttacacataatgagtattttgtctgcatttatatctgtgcatcacgtgtgccagtgcctgaggaggccggaggtgtcagaattactgaagctgtagttagagcaggttgtgagcctcccatgtgggtgctgggaatcaaacccagatcctcagcaagagcaagtgcccttatccactgtgccgtctctccagccccctccagcatcgattctaaacacagctgaaacctcaatggattcttcctcgtgtgtgtgtgtgtgtgtgtgtgtgtgtgtgtctggatgaactttgctttctaactcttaccacagttacagtaagttgggcaannnnnnnnnnnnnnnnnnnnnnnnnnnnnnnnnnnnnnnnnnnnnnnnnnnnnnnnnnnnnnnnnnnnnnnnnnnnnnnnnnnnnnnnnnnnnnnnnnnnnnnnnnnnnnnnnnnnnnnnnnnnnnnnnnnnnnnnnnnnnnnnnnnnnnnnnnnnnnnnnnnnnnnnnnnnnnnnnnnnnnnnnnnnnnnnnnnnnnnnnnnnnnnnnnnnnnnnnnnnnnnnnnnnnnnnnnnnnnnnnnnnnnnnnnnnnnnnnnnnnnnnnnnnnnnnnnnnnnnnnnnnnnnnnnnnnnnnnnnnnnnnnnnnnnnnnnnnnnnnnnnnnnnnnnnnnnnnnnnnnnnnnnnnnnnnnnnnnnnnnnnnnnnnnnnnnnnnnnnnnnnnnnnnnnnnnnnnnnnnnnnnnnnnnnnnnnnnnnnnnnnnnnnnnnnnnnnnnnnnnnnnnnnnnnnnnnnnnnnntccctcaccccccccccccatctttcgatggtttctctgtgtagccctgcctgtattggaactagctctttagatcaggcaggcgccaccaagcctggcttggatggtcatctattaaataaatcaatcagtccccatggttcttggttatggagcctggtatgtggacttcggttcatgtcttacagtatccatcagagcagcctccacacagactccaagaagacatggtctgctcagcactcacaccaggttcctactgtgtctcttattgaatctctgagctagcgcctgacttttcatgcatgccattaggcaatcttattgtcaggcctgaagcaaggttagggcagtgtcttatctagcctcaaaatttggtgaaaattcattaaacctgtgcatgccatgaacacaaaatattgaagaatgacattttatttataaattataataatttataaattattttaatgatacaaaaaaaaccctttaaagtcctctgactccctcccctcaccaacctagatacttttctgttctaatttctgacccagtcctctgtttatccccttcttccctgcacttctttgccaggcaaagtacacccaacaaataggatattgcctaatcctgcctgtgagggggccttggacagaaagaccagggttgttacaggatcaggaagaaccggagtggagccacagagttctgggggcttccttctaatgcccagctccaacctttgagggcatcgcttgaggctctgttatttatgtagaagcccgaggtgagaagagtcctaggaaggattattgcttcgagtgcccttccttgttaacctgactcctccactgtgcctttgttattctcttcaatgctgagatcctgaagtttggcccagtttccagactgcacagcagtgtgcgcaggatctgtttggttctaataaaaatcaacttcgtgtggactttatgctcccaaacctctctggagttaggaagatgagcccaactgagctagctttaacatcaacccgatgcagggcctgctttgctcccagaaggctctgaagctctgagatggactgtggccaaagccaagggcctgtccctagttgaggctggatatgtcagcaggaggcacaaaaacaccctggcaaagcagaagcaagagtcagcagaccagtagcaaagctcccagaaagggtccctgaagcccagtcttactttactctttcttgtcttttgaaccccgcccctttataaatcagtgggaatttgaagtactttttcaaacgtcacaaaagagaagttaacattgcgtttggaactatctaaaatgttttaagtgtctatgcacctggacagacaaacaaaagaagtagtgtgattaaattaacctcagaggagaatgtaatctgttcccctggtaattgtccaaattagtcttttgtcgataaatcattattcataggacattactagttctagtataggctttcagatgctgaaacactaaactgatgcctgagggtggaaaagggaaggtagttgtcatggctgtctggcagcttgggaagggctcttcttgacactgcttggatgggaaatgatctcccaagcagcgtgatgacactggattcaggctgaaagtgacggctcgggctgattgaattaatgtgaacctttcgctgcactgcacagatcagaggatcctttcccaagaggcagtctggggattccatatttctgattcacctgcacaaacacagtgttttaacatgggactctatgaagtgtcctgtttggcctcagccctcaaaacagctctcagccttggtttctatttcctcatttgtaaaaaaacggtgtggagacactctggctccctagatggtctgaggatcatacactgtgcttggcacatggcaggcggcaacacctctcatctgtggtgaaactgtcaccctgagagccagccgtgctcttccatccttcctgtggtctttgtctttgatctcaatagagattgcccaacacaatccccatttgtgaaatgaaactgaaactccaggtatacccatacacagataacaggtattctttgctgtagatacaatacgtgtgtatggacagacacacacacacaagtatacatgtgtatgtatcacataatcctacatatatgcacatatgtgtatacatgtaaaaatacttgtatgtatatattatccttaccatagacatacatctatagtaaagaaaatctgcattaagcatgagttatctcaactttaagcttttagctaaaatacacctaaattttttcttttttctatttttttttgttgttaacacaagggattcttttgcgtacagtctcatcaggttaatctttcaaaataatatatttttattaattctttgagaatttctctaatgtattttgaccatattcacccctcacccttagtgacttgaggtcctgttaactaggagagtcgtgtgagaaggctccctaaggtgaaccttctgtgctggctgccaacgtttgcacagcaggggtcacttcattaaataatgtcaccagtttacaagtttcttttctgtttattcctgcctttctcccccacagatagaacgcagccttactctgtgtatagatttctgtctatattgtagtctaggcggccctttacaaacaggagctgaagagtgagtgactgttaggggtggcgttcccacagctccttctccctacaaaaggacattttgctcgcagcctggaccctggctgaggagaatgctgtgatgctgctggtagccaccatctctaactccctctccacacagccccttctgcagcgtgtgtcagtgcattctcatccgtcttcccattctgagcccggaggaatcgcaccaggcaacatttgactaccatggaggagctttggtatcagagaggcaggtgccaccagacctgactgtgcagccatgtgccccaccgtgcatcctttggagaagccttgcgtaaatgtgggtgtttcacatatttcctgagtggtacaattgtcttctggccacttcctcctttctgaaaagcagtctgtgggtgggcacagctctttgcttttaattccacagtttagagattcttgttcccttggcggggttctttatttccctggaatgtagagtggatcatagcaacacgacacatgagttttcctgtagcaagaagaggtagacatttgtatagttgtcatgacatacaagtgtctcatcagacgaagaaagcggtctccataatgttgaaatcatgggactcttacaaaagctcccgggggttggcttgtggcattcacagaaacacacagtgtttccgacaacccctgagctatggagggctacactccatgatgcaggttacactctgtgatgcagtcagtgtgttaggcatgagcagacataaagtcatgccttacacggaacaggaatgaacctcgaatgtattagtaatgcttatgtttgatgttaggttggaggaaaaaaaacccctcaaactaacttagaccgtagcaaatgtgaacacagtgtggtgaaaaagcaggtgggggatagtggagcctcggggaaggcctgctctagttgctctctctctttttagattttatttctttcctgtcagggtctcaatacaaggcttcaaactcactaaagttccagactgactggaactttccaccttcttgcctccacctcctgagtgctgagaacgtgggtcccaccatactcagctgagaatgtgggcatgtcccactgcactcactgctgagaacctgggcatgggcctccatactcatgtccagtatatatctatatatacacacacaccacacacacacacacacacacacacacacacacacacacacacacacacagacacacacacacacacacacacacacacacacacacacacacacacacacaccacacacaccctagccctggtttaagtgaatctgagcctgacccggaagttgtagatgggagttgaactcttcatgatggagcatgtgttggaggtgattgagaaaagagtcaaaagtacctgctgcgtacaggattgggtttggagtataaaaagcgtgtgcgtgcatgcgtatatgtgtgtgtgtgtgtgtttgtgcatggtgcatttatgatgtgtgcgatgcatatatatgtgtatatagacaacacacacacatattgctgagatgtcacacattagttttgcttctggctgaattggcccctctgttgtgctgtggcatttgggctgaggccttaatgtatggatgtagccatccagggctttctctttcccattcgtactgcacaggaagtgtttgagatagtcctggttcaccatgagcaacgagcagaagcagactcaggttagaagagtagcaggaacaagaaatacacacttgctgggtgaagtcatagactagagtttttcttgttgtgtcagaatttgttccatctagtacattgtattcaggaatccctttggggttatttcaggaacctctcatgaaatcccatgcttgtataaatatattgacttagcaaaatacttgtagttcaaggtcttatctccatgatggtcctctaaatatgtgtgagctgtttccagggaacccccaaggaaggtccccaaggctttggtgtcagtttagcagcacttgctgtgggttttttattttatttttttattttattggctctgttacgttcagcaatatagttatatggcatgtaagaatcccattgtcacagccttccaggttgctggcattttcttcagaggcattacctgtctgtgaagagctttctagtatcactttattcctctgctggagtggccagtagtgaacggataaaggctcctggtcactgagctcctgtttgaagctgaaaagagggtctagttatccactctatctgcattgctcctcgacaggggcagtgggattgctctcacaggggactgccagggggctctgaggaagtcgtaattgtacaccaagccaacagccactaggactggaactgaggctccatgagggaagagggagatatactgttatcttcagtaagaaggtagcagaaggctggggatggggagtgaggcaaatgagagctgattactctgtagagtcagggacactgcttgtgctggaaagcagcagcagcagcagcagcagcagcagcagcacagaggtgaagggggtggaggctccacgtgcagagtccccatctggcagctatggaaccttgtgtaaaatattctctttgaaccttggtttttcctgtaatggaatggaataactagtacccatttcacaagaatgttctaaggatagaacaagttaccaaaggtcaagttcttagaactcatggcaagtgcttggtaaatattagctgtcaccaccaccaccaccaccaccaccaccattcacagttattctctataccaccaacttgcttaaacctctcatcacagccaataaaacacccctcatccttactctattgattctgtatttcatcaagtcttattatctcaatcttgttatgttatctttgtgagcgagataagcctcaggggaacatagataaatagatttatgagtgattaaataaaacattcattgtatcttcaaagagtcatacagaaataaatataacattgaatatctagtatatagagagtatgtgtgtacatatacacatgtgtgcgatatacctttatttacttacttatttttgaggcagggactctcacaggctgtagcttgacaagtaggctaggctggctgtccagtgattacaagtgcacctttctccccacccccatttctatacatgggctctgagggtggaagttaaacctttgtgttgcaaggcaaacgctttaataactgaactgttcctcagacccctgcatttcctataacaacagaatagagagcttacaccaatctgtagaaaggccattggctgtgcaccaggctttattatttcagtaatattttcttttcccatggtcttgtccttttaaatgtatttgtctttatccttataagaatacataaatcacatgtatttgaaattttctgatggcacaaagaaggaatcataagttaacatgatagtttaaggacacatgaaagacttttcatattagtattaaaagtaaatacttagggaagaaagccatatagtggtagctcctttacaaatgacctaatggtcatttcaggtgattaaaactcaacatggaaacacagtgaggtgcggtttccaaaatgctagtgaaatgctagggtgacttaatagaagagtccagaatacatgacagctaagtccagttcttgagccatgcctgtgcttagtatttggatgtaggcactgtgtcttaacacagatgtagagaagctgggatggattctgaagagggtggccaggaaggaattgctataaaaggtcatggagaatctttgaggtttggggttgtgggtcagagacagaaagtgtagtgtgttctgtgaacagccttcaaatattggaatacatcaccgggaaaggcttggtctaagaaccctgagggacaagtcttggcacagagcaagagattacagtgaggtaaaattactttttctttgtcataaagattgtttctggtaattcctttccaaagtaaggacaggctgccttgtaagcagtgggtttcccaccccagaagatctcttgacgtagaaatcccttgtcattttcccaaatggatcatactttggggaggtagaccagactgatcatcatctatgtgctccaacatgagctcagggatcctcaagcagcagagtgggtgcttctgcaatgtctaccaaagactgggcaagaggagaaacatctcagaagccaacctgtgtgtgataagccgtgactctgtgggtcatacgacactcagtctttttttttttttcgcctagtattaagacaatgttatcttgggaaatggaaaggtgttggggcatggagctttggacttcctagacaactaactgttctatcttgttctggcatgatctgtgctcagctttgtctgtgtaaatgttataatggacaatgcctccctgcaagttaacatgatgttatttatttttcaggacaatcgtatccatacgtccaagtacaacgttctcacatttttgccaattaatttatttgagcagttacaaagagtggcaaatgcctactttcttttccttctgatactacaggtaatctttaagctgtatttcttcattagctattttttgaaagtattatataattccaaaacacatgttaatttacttagttaaattgttcatgattgtataagactaatattactagattttttgtgttattactacttttttctcttaaaaacaaggcagggctgagaataggtaaaccaaaaactgcatttttattgacttaagacacctaggtcattttaatatgtacctttatttgaactatgtaagagcctcaattttgtttgaatcatatagaggtctgataattgctactcatggccttcttcctttccttctccttctcctacattggcggagtggggtttcactcctaagactataaagttgtggaactgactttgtcaaatttccctttaatctaagaacaatgatacattgtgtgcatttataaaggaaatgatgtttgatacatcatttcactgtagtgtaactatttttcaatcattcaaagggtttattagtagtctgtttaactaaaattgggcctaaatggaatttcaactttcatcagtgttttgggaagaaaagggcatatatcaagaaagagtcaaaaccaccacaatagttcatattagccagtgacttatttcatttttgttttgtatgatataattagatagaattggtagatccaggttaggttgtgtgctgtgtttaagagctatgaagatgactctaacatgtgagatctaggtgaagtgctgtgtatgatcttgagttgaatactgtatgtgttaatattttgattgtaaataaaagagatctatattagcttcagcagaagatgaatgtattccaagatgtaactgaattcgcagacagtagccactgcagtaagatatgacttttctgtctctgttttcttccacattgtcaggtcctacctatctggcagtttagccagcttcacaagtcctccaactcctatgaagaaatgagaggaggagagggagagggagagggagagggagagggagagggagagggagagggatcgaggagagaatcacttttttgttgctattagctctgattgcagctgtctcctaagtcagtcactgttggtcaaggatttcctgcagttattttcttgagcagatgtcaagacactggccaggatgaagtcaatgcaataaacctaaaagaactgaaattagagggtttgaaatctccctaagaaaaaagatatagttaaaaataactgtatatttcttgtgcaaacaaaacaaaacaaaacaaaaaacaaaaaaacaaaaaacaaaaccaaaaatcagattagaccatatcagaccagaccagaccatactagatgaaactgaccaaccaaaaacacttaatgaatgaacaaattgctcttcatgaaaggaaatatagcccagggtctctccttccagtgtcagaaaattgcttttggcttcttgatgaggcctttcacagcatgtcagaatttggaatttatttttctaatgacatccttacttagagtctcaggcttttgttcatacaatttaatatttggaagggacagttgagatgctctgtttagtattttattgatgaatgtctgggagctgtgaaggggagatgatgtgtaaagcgatagatcagcaatcggggagcaatagtggggtcttctgctactcacccagtgtttctctaggaaccttttgctttgtttttgtattgtgtctctttaagttatttttatttgaactagcatgtaatgatattcatatttatgagctatagtacaattcagattatgcatacagtatgtaatggtcaagttagggtaattagctttctacatccttaggcattgatcattactttgtgttggggagccttgaccgtgtatcttcaggttgcttatttgatctgtagtcaccaaatgtgttgtaggatgctgaaacttacgtctattaacactcaggttttttttttttttcttttttgaggtttaaggaagtgcacagaatctattatatacaatcgatttaggtttgaattatttgtcaggcttgatccacccccccacccccgcccatgagagtctctactggactgctctctgcctgacagtcctgaagcagattcccagtgaatccgatttgattaaaaaacaaaccaaaacacacttgtctaatagggtcatgtgcttgttactaagtctgccttaggtagtggcactagcggtagaggcacacagggatagtgtgggagtcaaagagacccaggtacatattttagcagtctttgtgcttgctaggattttcaatgccttatatgcttcagttataaaactgggatagggaaataaggacatgatattagttctgactcattcacaatgtattctgtgcacagtcaggaaagcattactaatgtgaatacatagcccatgagtttgttcaaatcattctagcatagaaactaactcaaaatttcagagcatccagtgatttaagatgcagatacccgctagcccctttctaaggtagatgatcaatggctctctggcaagtgttatgaagagagattggtaacttcctaaagactgagatgagaagctgaggcaccagtgacaatgccacagccagctgaaagatgtgtgttggagaaagagctcaaggagcccgtttttaagtttttatttttaattttaatcagtttgaaagttggcataaaggtatttctcaatgtgttttgcaattgaatgcatgtaattgaatcatcttagctagtttacttttgtacgaatagccgatcataatctcatttatttctacaagtcttatacaattaattgacaaagtttggaagatgatgtacttctaatttaaaaaatcttaaacgatggaaaatgttgcttcagctcattccagaaatctcttccctgacatggttcaccaccattgtgccactggtcctggtgatctcgatgacggctgtcaaggatgccaccgacgactatgtgagtattcatgcctgagaaggcttggtgtttccctttaattgtatttctaccttttcagaaacagagacctagccagtggggctaaagaatagtcaagggtgagacagagaggaaggcttgtaattaatttatgtgatgctccttcacagttgttgtatgcataatttttaataaatctataatttgatgtgagccatctaaaactggccatacacaagtgtataatgcacttgcttaatgtggtatgtgttcgtcccctaatgaagtgcttaatgagtttcaaggtacacactgacactgtgacatccagggtgaaaaaaagagagcctgacacaactatgatgtatgtgtatgtgtgtttttgtatgtgtatgtatgcatgcatgtatctatgtatacacatatattttgaaatacaaaagggaaatcacttattcttctgattatgtctatgaactaaagcttcatgcctccgacatcacaccagttcatctgagggtgtgcactaacatgctgagatacctttgtccctgagtaagcttattgtctctttgatacatgtgtctctaatttgggctcttgttattggaccttgacagctcatatagaagctcttatctgaatggcttctagtttcagagcctaaagggaagctcttcatatttgcatttttcctagagatagaagatggttgctttgctggagcatatgaagcaatatgaagcattatatagtctgaccacttggtcataaaacataaacccttggccaagtgtgactcagcatttcattcttatttctgttttaagtgagtggtgtttcataatatcactgttaacaattaggatttctgaagaataaaatatatgttgttaaaagtaatttctcggtttttaaaaccacagtgcagactgatccgctatagcaagtgcagagtgcccctgtgagggatagaacttgcagttcctggtggaagttctcaaaactgtgtgggttttctctggactacaaggcaaatggcgtgctgtgttcttagaagcaagtagaaatgtgtaaggattagagttgtgggtctagcgtgcagcatatgtgtgcatatgagtgcacacacagagagaagattccggtggtgatgtgtgtgccaggatgagatgtagggaggtgagcattgattacgtgtatgggactctgctccaggtaagtgcaagctgtgctcatatttggacagtaacattgtctaaatagactaactcgaaatatgcccagtgctgctgttaggattgatgaagtgtgacttaagataggtctctcttaaatttttttttcagttccgtcacaagagtgataatcaagtgaataaccggcagtctaaggtgctcatcaatagcaagtaagaaatccgttctctggcctgcctgcctgcctgcctgcctgcctgcctgcctgcctgcctgcctgccttcctgccttccttccttcnnnnnnnnnnnnnnnnnnnnnnnnnnnnnnnnnnnnnnnnnnnnnnnnnnnnnnnnnnnnnnnnnnnnnnnnnnnnnnnnnnnnnnnnnnnnnnnnnnnnnnnnnnnnnnnnnnnnnnnnnnnnnnnnnnnnnnnnnnnnnnnnnnnnnnnnnnnnnnnnnnnnnnnnnnnnnnnttcttcccttcctccctgcttccctccttcttttcttttttctttttaaagatttattttatatatagtgttctgcctgcatatatgcctgcaggccagaagagggcaccagatcccattatagatggtcatgagccaccatgtggtttctgggaattgaactcaggacctctggaagagcagtcagtgctcttaacctctgagccatgtctctagccctctttggatttttaaatgattggtggctttctattttaattatatgaatatttctgtcctttaacttattggaaattgaagtatatcttgatcatcgtttcatgagtctttttcacacctagcaaattctttgggagtttcttttgtggaacacagacatgtatttgatattatagtaccaagaaagtagcaatgataggtttttatatgcctcctatagttgatttagaatacattatccatagtcacatggatttccctcgtatttaatttcatgcattgataaataccatccatggaagcagaactaacatcagcagtgacttcagacacgagtatgtttacccaaagaacagggaaaacactagagaattgggaaggaaaactccaagctcctttccaatgtttctttttatcttacttacttttttgtatggaccactttccatatcttttaaatttttaatgaatttcctagcttatgaagtaataggttccgtgtttttagacatgtatcatttgtgtgattctccatcttccttgccccctttccactgcaccctctcacctccagcatcctcctggtccaaatgttctaccgccttccccagtatcctcttttaaaggttctctatttttccagcctcatgggctcctttctcattttgtgggctctagtccaatttactcccatcttgacacacacatttaagagttataggctaggatccacatatgagggagaatatacagatttgtcttagcctgggtaaatagaatgtcccgctgagaggtgcctcagcggttaagagcatttgttcttgaaaatgagttcccagaactcacaactggcaactcacaactgcctgtaactttagctctcagggaatcagatgcctctgacctccaaggacacctgcattcatatgcacacacacataattaagaataataaaacaattattaaaaagaatgtgtctagggttggagaaatagctcagtggttaagagcacttttcattgcagagaacctaaggttcaattcccagttaattccaagggatccagtgccttccacatgtaccaggtacacacatatgtgtacagacatacatgtgcacagagcaaaacactctgacacacagaataaagtgaatattgaaaaaaacacaaagaaaatggtttccatttccaacctttttgcctgcaaatcacataattctatttttcttctaggtgatatgaaattccatgtgtatatgtacctgtcttagttagggtttccattgctgtgaagagacaccatgaccaaggcaactcctataaaggacaacatttacttggggctggcttacagttccagaggtccagtctattatcatcatggtgggaagcatggcagtgtgcaggcagacatggtgttggaagagctgagagttccacatcttgatccaaaggcagccaggaggaggctcgctcctacactgggcagggtttgatcactccctcaaagcgcgcctacacagtgacactcttcctccacaagagcacacggtattccaacaaggccacacctattctaacaagaccacactcctctagtgccacttctcatgggtcaagcatattcaaagcactacagtaccccattgtcattgatcattgatgatgatcatggatatatagagtgatttcatttcttagctcttgtgaatttagcagtattaaacatgcctgtgcagatatctctgtggtagcacacagagaccttggatatatgcctgagtgtgacagccacgtcctacagaagctctattttcagccttctgcaaagccacaacatgttttccctagtgattgcactagttcacactcccatctacagtgagcgagagttcgaaacctgcatcctcattggcatctgtggtcatctattttctccatggaggccattctgactggggtgagatggaatctcaaggtagtttaattttgctttattctgatggctggagatatgatacacttttaaaagtgtctactggctgtttgcattcttcttttaaaaaagcatttcttcagaacagtgacccatttattgattaataggatttttggcatttaatttataacatatatgcaattatttgcatattcatgacatttaccccctttctgaggcagagatcacagggattccccccactctgtaggctttctgcttgttccattggcagttactttctgttttacaggaacattttaatttcatgtttgctatttgtctgtcggttcttgggactgtttcctgtgctatcggtgttctattcagaagtttgttgcttatgtctgtgtctctaaatgtttcctctgtgccttgctttagtggtttcagtgttcttggctttaagttatttaagaatagaataaatattgaaaaaaaaacccaaagaaaatgctttccatttccaactattttcatgcaaatgtcatttttcttctgggctaaatgaaattccattgttcatatggaccccattgtcatggttcattgatccaatttcaaatgatcatttttgtgcatggtgaaacatatggttctcttttcgttcttcaggtggatatccagctttgacaacattattaaaaggctgtcttttttttccccccagtgaatgtttttggttcctttgttaaaaattgaagtgagcatagctgcatgggttatctatggttcttttattattatgtcccattagtttacataggtgtatttatgctgctaacatcacactgtctttattactatggatctgtatttgaggtcaagtagtgggatgcctctggtgtgttctttctgcttagaagtgctttggataaatgtttctccatatgaaatttggattttttttaggtctgtgaagaatgtcactgtgacactagtggatcagtagattccttttggtgggatagttattttcccagtaggaatcttgaaaatccaggccatgggagtgtttccattgtcttgtgtcttctacagttttatctgccagtaccataaggtttatctttagctctatccctgtatacttttgagttatcatgaatggatatttttcctgatattttttcaagaagtctgttgtcaatgcatataaaaactattgattatttcatattgactttgtatcctgctaatttactgaaactatcagcttcaagagttctttgatggagttcagtggattctttgaagtatagaattatattgtctgtcaaatggataatttgacttcttcattttcagtttttactctctttatatttttttcttgcctgaataagactgaaaagaaagagcacccttgtcctgtgccagtgtttaaaggattggtgtgatgctggccagaggcttgccatatgtagtctttagtatgctgagctgtcttctgcataattttggttttgtcggggcttttctccccctcctccaggcaaggtttttctgtgtagccctggctgtcctggaacttgctttgtagaccaagctggccttgaactcagatctggctgactctgtctcttgagtgctgggattgaaggtgtgcaccaccactgcgctgcagtcatcagagatttcttatcaagaaggttgtttaactttgtcaaatgcctttgctgcatctatgaagaagatcacataatttctgtcttaagtctgttaatatggtatattacgctttattgatttgctatgttgaacctatcttgtattcttgggacaaaattatcttgcttatgatgagtactcttcttagcgcacccttgaattcaatttatgagcattttgctgaggttcctgtccactagagagattggtctgcagctttctttctttgtctggttttggcatcagagttataattgtttcataggatacatttgattgtgttccttctctatcctataggaaagttcgagaagtgttagtattaaatctttcttttatatatatatatatttttaattaggtattttcctcatttacatttccaatgctatcccaaaagtcccccatacccttccccccactcccctatccatccactcccactttttggccctggcgttcccctgtactggggcatataaagtttgcacaaccaatgggactctctttccagtgatgactgactagggcatcttttgatacatatgcagctagagtcaagagctccagggtactggttagttcatattgttgttccacctatagggttgcagatccctttagctccttgggtactttctctagctcctccattgggggccctgtgatccatccaatagctgactgtgagcatccacttctgtgtttgctaggccctggcatagtctcacaagagacagctatatcagggtcctttcagcattgaaaaatttgtagaattcagcagtgaatccatccaacccaatgtatgatagcgtttacgggacccagtcttatgcaggtcttgtgcagataaagacagctgcagggagttcataagtgcaatgactacgtcccttccagaagacatctttgtggtgcacattttccctatcccctggctctgacactctttctgcccctcctctgtgatgtttcctgataggcgcttacactttgtagttgagaatctgcaacaacaataaaaccccacactactgggcttagtgtgttggttgctggtacacactgagcatgtctctctgtgccttctaaatggaagagtgggactctcgatccatgggaggattaatgctccctacactgagctacgccatcttactttgattggaatggagacttttggtttacacactggagaagacagtgggatcacatattgtggtcacaccattgtgattgcagcatgtaaaaagatcttgcatatttgaaagaaaaacttgaggagaagaatctttctggttttcaaaagcaatgtcaatgagacattctttcatagatttaacaatgaattcagaagtaaagaaatgggaatagtttggagtgctatttggattcagtgaaagcacaaaaataaaattcatctttacctcatgttgctaattcacaataaaaatatttcagaaagtttcactctcaaaaaattaattgcacttttcaaaccatcttggcttggccctttcttgggcagtttccctttgccggctttgtagacaggaggatttgcttgccaaagggctgacttctgtacacaggctgcaaagttgttatagttattataacaattttccatcatagccaatgactatgctgcatagatagaatttttaagggttgagtttctaaagggcaactatttccccaaatgaggtgcatcttgatataatagggtgttgtaacgctttcaaagtctgcacatggagtttttagtagtagacctattttcctttaaggtttatataacacagagaactgtgaaagatccttcaaagcgcctctcacacaatattgaatccaggtttggtaaaggaggttgacaccacacacccctcagcaaacaaggtgggaatccagctctttccccctcacagttgtcctctggccttttactctcccttgtcctccagtgtctggtgcacagtgtgtctggccccattgtctttcctcagcatctggggctcatcatgtgtgtctccccattgcccctcagtaaggctcgaattgttcttggctccaattggatcccattcctgttgtaacctgattctcttattatagacaacaatgggacttactcatgcagcaggccctattgtatctctcctttataaaaagtattagattgagggttcagaaaacccaagccaaaactccagagatcttggggggtggtgagactattaactttagaaatgtagtcttgtttcaatccaagctcaaagattgtctatactgaaaagatgttttttgatagtatttggttgattgctcacttgcatcaaggcttcttcctaaaagtttctactattggatcgttctgccttcaggtccctgagatatgcttagtgggttaattttctccatgaattttaaattagcagatgaatggtctattatggatagaaatgttggaatgttaagcttatgaatgaaacactgaagttacttttgaccttgctttctagatccaagttaatttatatttgacacattctgttgttttgtgtcccttgtctttgccttttctgttctattcctctgtgcaacggtcttttcagatacaattgtgattgtattactatattctaccatgctggcagcctttctaacctccaacctacagaacttatgggtgtggtcttatttagaataaaattgtttacttttgcaggtataatttagatgttgaggtaagatgaccctggatcagggtatatactagactcaaccacagatatcttgagatagagaaaagagggcaatatgggggcggagggagagggacaggggaggaggnnnnnnnnnnnnnnnnnnnnnnnnnnnnnnnnnnnnnnnnnnnnnnnnnnnnnnnnnnnnaggaggaggagggagcaggtagcaggcattcgacctacctagccccacaagaagggactcaagggctactggaagctagcagggaaagcagacagacctacccccttttcctgagggattccattcttgcgcacaccctgctaacagaccatcctactcctttaagccatgtattcggagtgattcgttccctcagtccagagaacacttaaagcaggccagtgacttctaaattagacctaaagacaaaagaagcttggaaatgtcctcgctgttgagatgagtcgcaggtgcaattgaccagttactaaaataaggaagtgcggggagatcccaggagacgggaactgaatgttgctgggggaacggaatggactccaaaggacggaggaagaattgtgctccatgccagatgggcaaactaccaggtctgcctggctctagacgctggcatggagggtagagatggcccgcggggcctgcacagaccttgccttccgagcaaggcgttttgaattggctggttgacagtttgtgttcgcccctggccccatctggtgtccttgtccctcccaggcatgtgtgttcagattggcctccccttcacactgctaaatttaaggcttcatttagaatcaaatgctctcctggccggctgcctgaggagtcacatgtggaatgctgaggcacttaggcagggggatgaggcccttgctttgggagagggggtctggaaaccatatgaactgtaaatagttttagaatataaaaaatattaagtcttctgccagaaggaaagaattgttccccactcccccttccttgacttagttattaagtgtctgttggaaattactggccctgatcgcacagtctgtttactgtctctatcagccgacaaggggcgtcaactctttaaacacttgcacagtagaactaggatctgagatcatagagcccacacttaaactgctacgtgcctgattttggaaggaaatttgctttcttccatataatttttcccactgaaagtttaatgaaacaaataatacaatatatatgtaaagatataagaaaaagacaaattaaaactagaaaacaggacgtgcactcttttttcctgtgccccaggatacacaggttctaagctgcttctggccccagggacagctcagtgagcgtcctattttcttggttgtcattttgcttttacacccaacccttcattacagagggaaattccaaaaggcttttattttccttgtgcgttagttcccttggctgaggggctgccctctttctgctctcagcctggcaggggcagcctctctttctgttttggagactagctgctgattcttcaatcttcgctttcttcttcctttctctccggactgcagcatgtctcttcttgcatctccttttaaggacgaagaccagggaactttggagttgagagacaatgaaggaaaatagtattcaacaatcatggcagagaacatttgagaacagtggctatttaaaactgcagatttgagtgtttttgtttttcttttaaactttatttattgtaattttttatttctagaaattagaatataactccatcaatctcccccttcctgtttctccctccaatccctcccaggtacccacctattctctctcaaagttatggcccccttttctttaattgactttaatttttaattaaattttattttatttaaaaattttatttattttattaaatattttaagttttctttattttttaaaaagatttttatttattattatacttaagtacactgtagctgtcttcagatacaccagaagagggcatcagatctcattatgannnnnnnnnnnnnnnnnnnntctcattatgagtggttgtgagacaccacgtggttgctgggactttgaactcaggacctttgggaagagcagtcagtgctcttacccactgagccatctcactagcccttaagttttctttaatttaaatgtaatatatatcatatatgtgtatcatatattcatatatatatgtatatgcacacacatatgtatttaccaaatatataaatataacctaatcagtgcatataatgttacttgtatgtatatcattttgggactatctagtgttgaataatcgatagggaaactcttccttgggaaagactttctctttctcttaggatctcttagttgcctatagccccatgtctagggttggggcccatgagattcctcccttccatgttagcatgttggcattgtctccatttaggcagtatgttgttgaggcttcacggtgtagcttccatgacatttttaggagacacagtctgacatctgacttcctgtttctctggttgttgcaatctttctggcccatcttcagcctctcatttcctgagccttaggtgggaatgttgtattggagatgtatctattgggactgggctctacaactctgcattttgattggttgtggtttccatattggtctttatcagttacaaagagtcgtttccttgatgggagatgagagctacactgattgtgggtataaggacaaatgtttagaatatagttgaggattatgctggcttagtaaggtggtggctatcagttggggcaggtggcacacagtcacttgcttccagcattttgatcaactgtttgtttgctggcttgtttccattctttaatggattctgttgcaaagcgaagtctctttaaggaagaacagaggcattattaaaatttattactgaattcatttccaggaagtttatgtgaactcactctcatgtctgaactgatgaatgctgttttccaacagcatcactgtgactttgagtatcagcttcttaaacatctggctgttgagtgtggagacccaccttgcacaccccatttctttctttgtttttttcaaattttagttttattgcattatgatgagaaaagatacataatttcaatttatctgaacatttaacaacacattttgagtaaatagattgacatcacattcttctttcccttttgtaccccaactccttcctgagagcctcccctcttcaaaacctgcaatacctttcattttatcatactctttaaaatttataaagtattttaacaataaaaatgagtattatgaaagttgtttgatataaaacaacaatcaattgaacagtcttatgtagatgcttgtctacagcaatactgaaaatacacacattttctcaatataaattttaaataacttcaaatatattaactgtatgatattttaaaataatatatctttattagttttttaaatgaacataaatagataaagtctttttatttgtttgcttgttttgtttttagtagagcttaaaatcttggctcttactgtggtacaaacacaaaataagaacactttttggacattggagttcattgtaataaagctgtacttaaaggattttacctccatagtagataagctaagagctgaccgttctgctgctccaaggaatgaattgtaggcatgagttttggatacagatttcctgctgtggtcaaagctatttgacttgagtgattgttgtcattctcagcccgcagggaacaggttacattcatttaagaaatgggcacacccaatttctagtgattgtgttttcgaacacatttattagctcttatttattattttttttgtgttacttgcctatttatactcatcatttaatactgacctgtatttctttctattctgctaggaaatatattttaaatgttgtcttctaaaggaattcctccagtgggaagcaatgctggacactaggatgtcaccttgggaatggacactgctcccattagcatcctccttatttcctttccacaaaatagtacagataaaatatatttctattttaaaactttcccacccacttgtactggctagttttgtgtcaacttgacacagctggagttatcacagagaaaggagcttcagtcgaggaaatgcctccatgagatccaactgtaaggcattttctcaattagtgatcaagggggaaaggccccttgtgggtgggaccatctctgggctggtagtcttgggttctataagagagcaggctgagcaagccaggtgaggcaagccagtaaagaacatccctccatggcctgtgcatcagctcctgcttcctgacctgcttgagttccagtcctggcttccttggtgatgaacagcagtatggaagtgtaagccgaataaaccctttcctccccaacttgtttcttggtcatgatgtttgtgcaggaatagaaaccctgactaagacaaattggtactgggagtggggtattcctgtgacaacctgaccatgttttggggaggactgtggaaggactttggaaccttgggctagaagatcggtgttaagtgctctgtcggatgttgtgtaggagcttggaagatgatgttgagaatactgcagaagatggagctctggtgtgtgaaatttcagagggaaaattaaagacttttttcagggccattcctgttttgattgtgaagattctgtagttctggttagctggggctgaagaatcagctgtgattaacaagataccagtactactaaagcaaaaactttgcattactgggactattgatgctggttagctggagctaagaaattagcggtgattaagaagagaccagcatcattgaggtgacatcttctgggaagtgttttctgagagcacagtggctgcgttccagatatagccaaagttgtaccttgtgctgtggctggacttggtaatgtgtaagggtcacccaggtggtactggttttgaagacatgaaggagttgagcagagcagctgaggcttggcactgtgagaggccatggaaggccattggtgaaagtgcagcctcagttgcaattgatggcccaggactgaaggggtcatgcagtgttttggagatgccagtaccatgagatgaccaccaagagcagcagcagcagtggagtacaggcatctggagcctagaggatgacgtgtgtgctacaaagggcatggctggagaagtgacccaagcccttggaggagcccagattgtgagttggatcccagacattggatggttggagattgacttttgcttttgattgtgactgtgccctgatatttaccctcttgaaggaagaaactgttttagtggagcccacagttaagagactttccccagtaaaaagactttggattttaaaagagatggatattttaaagagactgaaattttaagaatatgtaaagactgtgggacttttaaagttatttagatcttggggatgaataagattgtaagggttgaggcttactagtgatgtttttgtgtgtcaagttgacaaggggtcaattgtactggctagttttgtgtcaacttgacacagctggagttatcacagagaaaggagcttcagtcgaggaaatgcctccatgagatccaactgtaaggcattttctcaattagtgatcaagggggaaaggccccttgtgggtgggactatctctgggctggtagtcttgggttctataagagagcaggctgagcaagccaggtgaggcaagccagtaaagaacatccctccatggcctgtgcatcagctcctgcttcctgacctgcttgagttccagtcctggcttccttggtgatgaacagcagtatggaagtgtaagccgaataaaccctttcctccccaacttgtttcttggtcatgatgtttgtgcaggaatagaaaccctgactaagacaccactctttgccactgaaagcctctggctggtgtagtctttgtaggaccacctctggccacaccagaacactggcctttacataactacagcgtgatctctctttccagccctccatccacagggtttccctcatgtaccaccctaggtagacatcttcccagtgcagttctaggcaggtagaatggtcactagagtctttgtgtgatgctgtggcaacggccagtgctgccacagctcacacgcacatggtgaagtcagtcttcttccgcattccttcttgtcagcctcttcagatctggctgataccttgttgggtttctccctggctggggtcaagctcggccaatagtgagtgctctgtatttgtggaattcagtaaaatacacttacttttttcagctatcagggtgcattcagagacagattatctcacaggcaccggagactgagaagaattgtaatctatcttgtaggagatacagcttgactctctgaagtgaattctttattttaaaaaccaaacaaacaaacaatgcttttattctctaacctggtatggtttgtgttttaaccatccaccctgcccctcacttcttgctcttccttgtattatctctgttataatgtcacagggtcttgccagcaagaatagtcatatgaaactatttctcacctttactccagagctaaataagtacacgacatgcatgtctacatacatagctacttcacttaaatctctactcagcaagtatctcccaaactcacaggatgctaggcgtggttctatatgttaagaatatagaaacaagaaaccagacacagccttagctgtgtaaatttccagagggaaagacagtttaatggtttaatgtaatttcaggtttcctatgcccagtgggaggcgccacacccatgcacatgtggtcagcaccaattggacttagggcattagttactgggttgaatgccctgggagggagttggaagtagatcactagtgcagtgaatataatggcctcttgctagaagtaggatttgtcccagattggaaatgatctgggtgatcgtaaggtctccatcaaggtggggaaactgggataaaatggagttctgagagacaaacaaaagccagctattgtgtttatattttagacagggtcttgttctatagcccaggctgatcttgagttcactatgtaacctaggctggactcaaacttgtggttatcctcctgctttagtatcccaagtggtggcactacaggcctgagccactgtgctcagtcaagagccaattcttataggaaagagtgaagaatgccaatttcagttgtatgttatatgtcaggagaggccatggaggcttttcacaggaaaattgtaggtataatacagaaatttctctggttgcagcatagatactggacacaagaggaagataagttatgtccaggtgagatggcaatgtcatagactttggttgtgtcagtgaaggctttaagcataagtaggtttgtctgtctatctatcaatctatctaattatctatcatctattattgatatatcacctatcctctatttacctatcatctatctttctatatatcgattaatcatcttttccatgtttcaaaaaccaaccaataaatctataaagcatctatttatgtatattttatttacctgtcaattaactatacttatcaattatctctatcatcatcatcaccatctatttttctttgttggggtttcaaacacacagacacataaatagaacagtacagtgaatctttacctatatattacctcttgatagctgtcatcaacttcttgatattttgtgtttatcctcatgttttatgattttttaaaaaatccttttccttcatctatctatctatctatctatctatctatctatctatctatctatctatctatctatctatctatgtaagtacactgtagctgttttcagacacaataggaagagggcatcggatctcattgcagatggttatgagccaccatgtggttgctgggaattgaactcaggacctctggaagagcagtcagtgatcttatctgctgaaccatctctccagcccacattttgtgttttttaatgatttaattatgtatgtatgtgcgtgtttgaataagtatatgcatatgtgtgtgtatgtatatatgggtatgccagaaaagggcattggatccctcagtactgtagttagacctgtaaaaatatatttatatttatttaaatattttaatttattcagattattttaattatttatttaaaatatttttaaaaatatatttacccatgattctatatacttaccaaactagcagtaattctatatatcatctaatactcatacttttagacatgttttaaaggtaataatgaaaggatacagtatttgtttggatgtgcatgagcatccagtgtgtgtgatcaggagttcatagctcattgctgaagccctgagatgagaaatgaggggaagaaacatgctgtggtgatgttagtggctgcttcatcattttttccccaagactgtgaaaccagaggtctgttgagaaattcattcattctgtagaggtgaagaatgctggaagttactaagggttcaaagccaaatataaagttgaaagcatctgagcacctagggtaacagtgagggagtccaaaattcaaagaagataggaagagcccactaaggatctctgtgtgtgttagtcatcttctattgttgtgatagaatacaggagaaaagaaaattaaaagacagaaagggttattttagtccaaggtcagttgactccattgttttgggacctggagtgaggttcagacaatcttgacagggtacatgcaggatgagactgatcactttgtcactgagaagcaaaagtagggcaagggttatggtctggatcctaattgtctcctcaagatgctccctcagtggtctagcttactcttataaggtctcatgaatcaatttcctcacttctcagtggtaccacaggctgtggccaaccctttaacagtgggtctttggtgactgctttgaaagcacagcagtataactagtaagtaaaataaagctaagggcagtcaactgtgatgaataagacagacatggggactgaccacacagtgtcactagagagtctgtgattggactggggacacattccccatgggaggaaacccaggtggccagcacgcacacacagggagcacaaatggccctttcaaagacttaagatagaaatcagcttgttgtccttatgatgaagtgccccgtgacaataaacacagtcacagctattagttaatggttgttcagtggcaaattcaagtgtatgttttgtgatcctgcaacatgcacgctttttagttcaattttacataatttctgtcaaaagtaggaagccaatactttatccttgcaaagtttaagaaataaaaaaaaattccagcttctaatccacattaaacagaatttcctattttcaggtaatcaagatggcccctgtgatgttaccctctgcaggcggaggcctttagtgacgttttctagtttttgtttaaatgatttgttatgatttgttgtccataccctggagacatgagcttgaactctgtttcttctcataacagaggtgctgaggatacaaagcggatggtccagtgggagggagaattatctagagatcaccagccatgtgatttatctcggcagtgctgagagaaatgccaatgatgtaatggttgaaggctcagggaaaaagatattttacttatgaccataagtaaatcctgattgaagtcatggttctgagaagacaagtctggagggatcagaataataaagaccaggcatatgcttttccgatgagctcactgtacatgggggcaggacacttggaatatcttgaggactgaaagttaatatatcccttattagacagtccctcggctctatcaatttttctcgctgggctactgatgacaaacgcgtggcaaacactttactagtgaagtcattgtttgaaagtgcaggtactcttcattgcgggctggaagagtatccatgctttccaggtattagaagacaaagatgatttacttgtgtctgtttaggaaccagatttatatttcccactatttcctaggttatttggtgaatatagttgttgctaatagcccttgtagccctggtactcagcatgatgtctagcttacagtgattattctggccatagaagggtggtcttgaattcattaatggaggatgacatcacatgtagtcttggtggtcactactcaaaaatttcacccatatgttatcctgtttctgaggagttaacaggataggcatcacagtttattttaaagtggattaatttttttcttagaaactaaactaaacttagaactaaatctgactgtagatctaataagtggcagggctcataatctcttggggttacttttacttaggctttgttttaagaaattaaaggtgttgtttccagaaacgttaggtcccaagagcagagcaaaccatatcagaccaccgagcggtgctttgtatcatcactgctgggatttcacatttctacttaacacttttcatatataaatctataatatataatctgcttgtctgatagctctcaaaaatttagttaagactgttatcagaggtaatagaaaatgcaataccggtcctttatcctggaattacaacattcagagctctttcccgagagatgtgtcaatcacttcttgttcgctgatgcctgtggctgtgctgtcaaaggattctgtctgagcagctctgctttgtctggtcagtctagggcatttccctcagtgttaacgcatgctagtaaagacaataatattcctctgaaatgagtttgatttccttatggccttattatggattaatcggatttatggaaggtagaggggctctggaaatattgattcagagaagtttcttttgtataacatttggtagctttattattcaggcagaactaataagtgaaggcatccgctggcttccaaaaggtaaggcttgatattgtctgcatgcttctgcctctgaatagtacccagtaggactcaagaaccaggcaggacatctacgtggctggttgctcttctcagcaatgtgttaaaccatctgcaccatagcactacaacttttacttttctctgcttttcctttcctccatccttggtaaactcagtgggaaagcccttcagctgctgaccatggtgacccgctcatgtggttttcgccacggtgtggctaagaaaaggggacaaaaaggagggatgtatccgttttcttcaaaagaagtagattgcaaagatacgagtgtcaggttcattctcagcgttatgaggcctcacacatcagtataattatagtggcttgaggcaggccaagctatccattttattctagctcatctctgacagtgctggggttgaaaagaatcagagccgtctgctatctagtgagcatctatgtcaggagaccatggctgcatgatatcctccgaccagatggtgttgaatactgggactgtgcaccatcaccttgcttaaatccttccagcttttcagggcccactctccttttaagcaggtaggatatgcttaacacagaaagaaaagtaaataaatggatgcagagttatatggtatgacttttatagccaaagttgggttctaggtgaagccttgtcacttacatgtaatccaaagaaagctttcatggggctagagagatgggccaggggttaagagcattggctgcccttcttgaggacctgggtttaatttccagaacctacgtgatggctcacaaccacctgtgactccagttccaggggacccagtgcccttctttggcctccttggccattgtataaatgtagtacacagatatacatgcagcctgaacacctacacacataaagtaaatcaaaagaaggatttattatttgttttgcaacaaattgacctataaatgtcaacttatgtaataatgagaaaccaagctgtttgactgggtacagggtggatatgaagcattgccatctctctggttccctgagtttccattcaccagtggcaactgctcaagcgtctctggaatgccttcatggaggctttcaaggcttgagtgatggctagtttttattaaattaatataaactagcatcccctggaaggagggaagaactgttttcatcagactggtgtgtgggtgagtctgcgggaacatcttattgattaatgattgatatgggagggcccatcctattgtgggcagtgccatatctagacaggtggtcctgggttatataaaaaagctggctgaacaagccttgggggtccacccaggaccagcattctcccagtggtctttgttttagttcatgcctttagtgaaggaagtgtaagataaaacaaatccttttctccccaagtgtttggtcatggtgtttatcatagcaatagaatcaaactggaagtatgttaaaatatgtgtgtaagcaatgaccagcatggcagataaccctaagggtacagaagtgacatatataccttggcaggaaccaacagctctctaggtcctgctcaacaaaaggaaaattgtctctagcactagaaacctgccagctacccaggactagtgaagccatggatcctggaggagacttacaaccaccactttattaaaccaccacaggccttaaatatactgtaatacttgtccatatacccacagagaagtgtagtcttcactcctcctcaaggaaatttctcttcgcaaaaaatggagaccattacagaaaaccacagtcaaatgcccagttgagagcccaaggcaatggaaatatctataatacaactttcccacctaaggctcagggaacactgaagaagagaggagttgtttgtaagagccaggagattaggtcgtctgctgtgagactgtgtctcctaggaatgtgagacccataaagtctcaccaacatggctgcctaaacaggagctaaacaaggatgtcactcatagacatgctaacacggacaggggaaagctcacacagcctcattggtacatgaagaactgcaggctactaaggaataccagagtaggaaatgctgtcttcccagagaagagcacagcaactgcttatccaaaaccaagtgctcagtcccgaaaaacatacatgtgagtaatgctacacagtctgagcatacatgtgagcaatgctaacataacatacatatgagtagtgctaacataacatacatgtgagtaatgctacacagtctgagcaggctttatttaggaaaatgtatgcatgtacatatacacatacatatactacatatgcatatatatatatgcgtgtaataacaattatggaaaagagagattatgaatttgaaagagaacaaggaagggggtctatttggaggaaataaaaggaagggagaaataatatagcaaaatctcaaagaagaaaagaaaatttaaaaagaaaagcttgtgtaggaacacccttgtctcaacacctggatcctaccacataggtgtgggtctagacacacctcttttagcctaacaatggaaatgagatcctgtttcatgtcagtgcatacagacccatcatcatcttcttttggttacattattcttctgaatatgcatgtagtacagttaattctgctgaatacatataatctgtgataagtaagcattccatggtaatatttgtagtttctaactggtttctgtaagtaatgctgcaatgaacccccttgtatactcatgtttaaactcccatataatcagctccttaaagagggatgcctatatcaaagtgtatgggcatctgaattttatatagatatttcaaatagagtaaatattctaacttctgtgaaccccagggtcctgtatgatctgagtggaagcaggatccagctcatgcatggtcatgaggattaagggagataagataaatattaatagtcttactacatgagacaaatctagatgtaaaactatttacattcaaatagactaataagctgtaacgtttagtatcctgcatcccaagtatcacaaaggatgtgcttacacataaaataatttgctgtatctgaagctcaaatgcaatggagtgtcatttgtattttatctatgactccccacgtgaaagaatctgtgctcaggggtgcaataagtaggtactaaaaaaatgtggattgctagaattcatgttgtatgtttagggaaatggtaatatttaataaatgttctttttagaaatattggttttttttattccttaatttagttagcagtcattcaagaagatatattgaatggcatctgacctaggcagttgcttaagttccgatgatacagtgctgaataaaagtgtctctgatcaggagatatgtctgtatttcctagtgctggcatatgctgcatactaacggaaccaagcttagtgtgagagggctgatcggctaattaagggagaacaattacattttccttctctagtattctttttctcctcggcaaatcccccctcttctgccctggagttagtatcactaatgggaaaccggaagcattcttttggtcccttttaccatcgaaacttctgccctttagcttcagtcatgggtcggagtcttgcttatgggaaactctggagccaagagtgcggtgcagtactgctggatgctatttcaatcttaggcttgaaaacccatggagtttccagctaagtctccagccctcagcatactgtgtctttgccagagaaagtaagtacagaccaagtcataacaggttttgggagaagttgccatcaccccctttagttaaactctactccccatgttctgaagggtggggtgtcctgagtggttccctacaccttgtctacttgttatggttcttaaatgccacctgtttcatgggatcttctggatctaaatgttgtgacttttttttttttaattttggattatttttggattattttactaaggtaaaggagatgttattatcccatctgttttagaaacatctggttcaaggaagacctaactagatcgtatctaagtatatggtgattgggagaatggagccaaatcttgaattctgagaatctcagagcaattaagtcaacttatttcagaaaactaataggttacaactcctatgcatttggaagggaacaactaggttgaacaatgtcaactccttggggttgtgttgttttcacagtgcacaggctatctggtgtctcctcagcagagcccggatgcaggatcccttgagacaggagcctgggcacctctgcaacatgcacacagtcacagccgggagcaccagtacccactgcttcagctgccacacgagctgaaatctcacaaatccatcaatactttgaggatgatcttttaagcaaatctcttccctaagctgcaggggacattgcattgctctcggtagtggtggcagcagaaaggacaaagaaaagagctgggttcagaacacagtaattttgaccgtttgtgagtgtccattgatttttgcttatttggtagcaatgacccttagtgtatattggatacatgtccaagtttctatctgagtaatgttgtatgtattttgtaagatagaataaaaacaacaacaacaacaacaacaacaagacaatgtgcaaagccctacacttccgttggcactatacacattgattcttgcgtagcagcttaaatagaggatgcatgaagacctctcacaaagcccacggttttccaatgaccccaggcaccttatctgcaaaaactctaatagcaagcatggagttgcgtttttccccatctaaagaagtctactttgtgtttcttcataagactctaagtctatcccagtcttacgttataaggggtatgctctcttcttgttggggctctgccacttgtctggcagaagtgtctgctagttcgtggtgtaggttgtttcagagggagttgggtgaggctatgctctcagggggaggtagcacttacagtttcctgtggattcttacagagggtatagcatagaagtaggaggtgtagaatttcaaaacaaaacttaaggtcgtcttagcttcccaaaacagactttcgatagggaccccagaacatttcagtagcaatgtaataaccataagctacagaaggagtccttccccactccatcatatctccagaagacagtccctgagagatgccactgatgtccaagggaggtgttcccaggagaaataacaatacccggtaccttaaagaggaagacaagtgagggtcacaagccttcctgttttctcagcacactgagctagacagaacactgaaaagtatggtactgaaaaaaaacatcaaattttggctagagataaaaatgctgcagctgagaaacttccagaacaacatgtacttggatctgcattaaagaacagttctttgagccttttagccaaatgacccagcagggttgatagtgtgaggcagatttcacagatgtataaatatttaaatctattttccatcctataaagcaagtagatggggctagttttgaaaagcctcacagcagaattcacctggctgccttgacttactggggacacctatcttgctctagcatccttcgtctcaaaggaggggtttctaagaagcaggatgagaactatcagtgttgaaagcaaagctggtttacatttcatggagtttatgaaggcagggtccatccgttgtcacagtatccagccgctggtcatctgtttctgtaaggcctgtctggccctgggcaaccctgactcacttgtaactccgcggctagacccaatagcgcaatcgcctttcatcgcaaccctttctgatcttgctggagagtgggcatgggataccattacaaacacaaccttcaaagaaagcttgcagcttgttgatctctgagctgctggcttagcctgtcagatgccaccccagtcacatggcttctgagagagagtcgtgctgttccggtacttactagctgagagaccgaggaggacgtagctagctgggtcttttgagagaccacagcggctgtataaaagtggcatcgagttgggatcatggcatttcacagaccctcagccaagagttcggcatcttgacctttgtctacctgtgtcactgctcactgaaaatctacagacaaatcattttacgtctctaacacccacactctttgttggttgtgaattcatcctttaatttcccgtcttctcaaagtctcacctgattcttctagtctgtcatgtgcttatggttatttctcttgactctactttttattctactccactagtgagcaaaatatttctgttctcttctcagactgcagaatgaaaaatggatgaatgttaaagttggagacatcattaaattagaaaacaaccaatttgtcgctgtgagtattcaaattatatgacttgatcatagattagaataacacacattgaagcactggcaaatttagtaaacccacaagattctagagtaaccaaggagggatcaccattatatattagtacaaattcttagttatagatactttaaaagagtgacttttggtgacacagtgacttggatagtgcagagaggttctttctttctgctctctgaaaaaaaccccagaaacgcagaaacaatctaagtcaatgtgtgagttatttttataaataagagtttaaaaaatgttgagtaccctaaaaaaggttttcatacatttagaatgttatttcttagtgctgcaattagtgtttttaaactgcaccacatttgaagaaagcacactaaaggtaaatatatgttatgattctaaattgaaaaaatgtgaattagtgagtttttgaacatcaaatgcattataatttatatttgtaaacaactaatgttgtggtttcttaaaaatcaattcagccattgaaatgtaaacagggaaccacagttcaagttaaatttaaggtgatacaaatgttgcagatcagaaactaaaaattcaaattattatagtgatttttatgtattaggtcatttatgaaaatttttgtgttgtatgctgaatcaagttgtattctttattaaatttgagatattttatgatggaaaaatatggccctaaaatctctttaaaagaacaacaacccagttgggagtgcttgacattcaacctcagaatcgcccttctactgccgtaccatctatgtgctccaagtgcagaggagcatgcgcaaagagcatgcgtgaaggagcttccgggtagacaaaccatttgcagatgagttcacacttcaagtggctaattctctggcaaccctaagattttggaaattagccgggaacccaaacaaaactaagcaagatgttgtcaggacacccaaagcaggtctcaaagtgcctgtgtggtttgggccccttggagactcgggatggtctgccaggttctcatttataatcaatttacttttatttcatgtgacttaaatgacacgtctggcttattttccactcattaaagattaggaacatgacagtaggaggtagcacctgtcaaagaacaccctgtgtaggtgagaatgaggtagattgttaaaggacctggccggaagtcaaatgtctgtttactgtcggcagtgccttctgtgaaataagtcccaggaggcaactataagaatgcgttttgaattctaattgttctaaattcaaatgcctggtatgtggttcccacattggacacaacagatatcagggtaccaaggctcacaatcctctcatctttctgatggagggatggcaccaaacccacactctcaataccttagagcccttcactctcttcccgctctggcaaagtacaagcaagactctttggtccacagtcccaaagctcaggctctgactgtgtcatcagtgaagagttaacgaaaccttcccgttatcctctgcccgactcctgctttttggttcaagagaagaaaaggatccacaaatcctcagaggcaccacagtgcctcttaatcaagaagcacttcatgcaaggtttctatgtgcagctactccacactaggaatagtttccgaggcaagcaaagctttttcacatgaagggctgtgattggcagagaggactggtgtggttccctgctgcctggaggcaggacctgcccgtgggccttatgtccctatagagacagtcacagatctctagaaaagacccatttaggactttttattctggagtaggccttaggaagcccacgtatgaagataatgaccacaggctaagactatgccacataccaatattacaatccacttgctatgggttaactagcttactgctcatcttgacccagtgaggacagtttatggactgtttcattatttccacctcgtagacggtaagacaaaggcagactctcttcaaatagcttgctagtggagagccaagagttgaatcaggagctctcactctgaccctaactcctcaagcgctatagtctgtttttctcagaacagttgcttttagtcggggttcctgaataggaaactccaggcctggcaattggaaatcaaacgatttgttgtgtcttcgttttagtgcatctctatctgttcaaagttagaactttcaatccatttatacctgtttatcagtaaattctggacaagaactaacacacctccttgtctcacccttcctccctcccttccatcttccccctctaactccttcccccgcttctgttaattcaagagcacagaatttggagctgaattctagacctccaaatgttgtaattcatgtcacaatgaggtcagcatgcattaggagaacctcacaagcttgctggaaacacattagagttctctgttaccaaccacccttttctcattcttttataaacaagtttttttttcctgtgtgtgtgtgtgtgtatgcatgtgtgtgtgcacacatatgaatgcaggtgtgcttggctatgctggtggatgcgctggagacacggaggagacaccaagtgtcctcttctattcttctctttcttcccttgagacacggtctttcactggacccgagcctgccgtcgttcagcgaggctgctggtgtgcacgtctcagtggtctgcagcattgggactacagggtacttggtccgacctggattcatggctgctagagatctgaactcaggtcctcatggttgcaatgccagaattcctaggcactgttcttagactcttgttttattttcaatcatttttttaattgaaaaatttgatcacaaaagccaagcaaaacaaaatgatataaccagtgcttagtgaatgatttttcaacatacccttgcttggtctgaaattttaaagtttgagttagtatgttatctgtaatcacaccccctttcacttatgacttcattgtgagctttgacccatgatacactagtttttagaattggtatgttgttctgagagtaaggataatgtgcatgacagccaagacgaagagctctgcagtctagaaagtcctgggagctcccaaagcgatgctcacaatcgccccacaaatgcatctttccctctgttatggctctggtatcccagcactcacacacctggatgttctgaacagcagcagacaaaacagacataccgagcaaagcatgtctgagaaacatttctgtttctcacagatgtcatcctagaacccaggggccaccacagcagagtactagtcttgatcagggcggtggcatttttctagtcccacaacttaatcctggagcattttcaaggatgatgccaacactctagtctcaggctcttcaagtgggttgttgacactcaccatgacctctgatggcctctgctggatataggggagtccctttcccttttccctcacagatttgcataggcaatgaattgattaagttatgagagtgttttttataagttcttaagaaatttcatggctgtggattgatactattcctcagtgttttcttttcttctttaacttaacgaacatttacacccaatgaaccctggagacaatgtatttggctctgaggcctcaaagatatccagtagattattctcaagtttcttcggatgggaatactgcctttaagcttccactgggtatctgctcgggtttttctcttgcccaggaaggctgggggaaaggtgtttgtgttggagcatgctgcatgctgcttcctatgtggagtcatagctgaatccttccaccaataactgataaaagaaaagactaggggataatggaaggtggcgttggcctggtccagctaggcatctggacaatcacactttctctccctgttgtatgtctctgctatggcctctcggtagtttgctcacactactagcccaccacctctgacaaaagcttgaccaaggactagcaaggctattgctataattctttgcccgttccctttcaggattattgcagagtgccttagaaagtctaactctaactgtgtgctagatgcctttcacaacttactctgctggatggacaccatcaatcttgttctcccacacacactctttaatgataactaaaaaaagcctccaaggaagatgttagcagtagggaagagaagagggtgtgagtgaggagaggaatggtcagcgatatcaaaggtgacatgagagggtttaggaagaggtaggagggtaggtttccagggagacagagtagggaaagttagacaggagggttaaggtactcccgtgttccagtctaagttgggtgagtgctggttaagagaccttagccactaggtggcagtggaaccttagtcgcttgtctgaggttgaggtggctctgcccctggtttactgcagaggaagcattaaacacagccagattcaatattgaacagtgacattgcattaccatctacacagagctctgaggaaaagctacaccagataccaacaggcatctttatccatgcaccataaagagttctaattatgcattattacaataaggaattttagcttgtgtttaaagttatctttctatccttaagatgatagccgtagctccaaagggcattcacctttaccgctagcatgccgtctgccaggacatggtgaaactggaacatatgaccggagatcaaggcgaatctaccccccagcacagattctttttttttttttgggtcaggattaggtgagcgttagtgtaagagtgggccccagatggacatattctctgagggggtttgcatggaacacaccgaggggctcacaaagcagtttctgccttgactggcttctgtggtgattccttcagagctgagagagtcaccaggatgcaggggcgtttgttcctctgggagctatcatggagccttcatttaaacaactctcattgtcccccccgccccccgtttttgataatttaaacaacccagacaattaactgagtgggttgattttgaacttaaaatctaagacttgaagataaagccattataatgtctttctaaataaaagattttagagacttggactgtcaacctttcagatacacgtagaggtttgttaggctaaagtttcataagttgctgaaacttaggtcagttctttttagatgaatcctccagaattacatttatttttaaataagaattttaatttgagaaaaaaacaaaaccagccagaattctaaaagtgaactgtgatgtattttcttcctcccccttttgacatctttagatgttttattcagtaaaatgtagcagaattttggatcttattttagtattttttggagtctaactgggacatattaccttcaaaacttggttttatagcactggtcaccactgctctttttttgttttgttttgttttcccaatataacatttctattgattccctggaaatttcacatcacgcacactgatcaaactcatttctcagtccttccacccttatgatctcccttcagggaggtaaaataaaaaaagtaaaaataaaaatgaatagaacccccttaagcccaatttgcgttatctgtgaactcactggagcatggtcaaactgtgacacctgcctctcaaataggactgagcccttcccggccgcactcacgccagccgtcagctgtggagagttatgcttcaatgtcaccatccacttgcaagagttcattttggtggcttcctgtctaggagatggctcagtcattaaagcctaggctcacaaccaaaactgggttgaagtcttttctaaagcgtcattttccagagcaccctctgcgctctttgagtgggccccactttctcttgtctctctcgtgttttactctttcccattgctgtgtgggccctgctttctctcgtgttttactcttccatcgcttcctcatctcttcgccttgcgtccatgttgctcttgtttactttcatttcttcttttctttggttttccttctgttttatccgcgcgttctcaccctcttgactcctttcctgctttaagcggctcagacaccagcacacaaggagggttaattcgctcatttattggaaaatgatctctgtttttcataagaaattattaaatccagaaaaatagaattcatatatgactttcgaaactggcaacccagatcactagtagtttgcacgttgccaggagacctgctcataccctgatggtcccaaagcatgggcacacagagtgggaggtggtgcctccctcctcagtgttgccagggctatgaaggaggggtgatgcatggaggagaggtttcaacaaccctgattcttacctgtccctctgtattggtttctcaaccaggctgacctgctgctcctgtcgagcagtgagccacacggtctctgttatgttgaaacagctgagcttgacgggtaagtactaaaccagagcggctgcttaggctgtttaacctaaacgtcctgagcgaccagaggtgcatcttctgcatttccttgtaaaacatagaagtctacgttgtaaagtcctttgttgtttacttggcagtaattctgaattttcctcctgaatttatttggaaaaccctgacttgtctcttcagcgtattttctttcagaaacgctcggctcagtatgtgaacatgaataattttacaccagtacactgcggtgatgttccttttggggattttgtttgtttaaatttaattttctaaggaaaatgagagagtgggagtaaaggctactgagaagaaagatggagactgtttcaaaaggcaacaaacacacacacacacacacacacacacacgcgcgcgcgcgcgcgcgcacacacccctcagagagatgactatgatgctgctttgacactggctttgagagtccagccaccaacctcttagctgttctgttttagaggatcccattatctggctgacaccattgactgctcacactgtataggcaccatctacctgtatgcacacagctcacactgtataggcacagtctatctgtatgtgcacagctcacgctgtatcggcacagtctatctgtatgtgcacagctcacactgtataggcaccttctatctgtatgtgcacagctcacattgtgtagataccatttatctgtttatgtgcaactcaggtgattcgttatgcagtcctgatgtaggtactgtgtgagacctacatacagaccatgaagccaaggctcagacagataggtaacttcctcaagttgataaagaataaaggcaggactcaactgggcaacatagagcacacagttttatcaagtgtttcccaagttgttgccatgtggagatactggagtagctcatcttgtaaaacccaggtttgggaaggacaggtttagacacagataaagcagtgttaagaggaaaagcagcagcactgaaaccattcatacacttgaaaagagagctagcctcaaatcaattgtccactctctcttgagaacctagaaaatagcaaaataaattaaatgcaagcaagagcaaaattctacaaacctgacacaaactcggccaagtaaaacagtagaacatggttgatcctttgaaaacatcaattaatctgcaaacctcaagcaaggcagacagagagaaggaagggaagagacagatgagcgatatcattaacaaatggggagtcaacaatataccccccaaaatgccagctggatcatgagaaattgctataatcagctgaacacacgtacatttgacaacatagatgaaatggaccattcctcaaaaaatacagaccatgcactcactatgaaacaaattactaaaatagctttatagctagtaaggaaattaaattcatatgtaagaagtgaaactaaacattttaggcaaaaaagggagaaagactttgaggtttgggctactcaaagaattgttagatctgacataagaagagttagtatagagagtggggacttagctcagtggtagagtgctcgcttaagcagcaagtacaaggttggtttctctagagataaggggcagggaggaaggagggggggggggacactggatatcatcaaattatctttttaattagtgaaaagccctaagaggaaatagtaatgagttactaacatgtagaaactatttgcaaggtatctacctgaatcaccatgactatatacagatgctttacaaagttaaaaaaaaaaaacaaaaaaccaatcctgttaggaaataggcattttgtaacacttcaataaacatttgaccaagaggacacacagtgggcaaacaagcacatgaaaagttacccaatatcattagtgacataaaaatgaataccacaatgctctgttaccacagatctgtcagatccatgagcaccagcaacagtgacatttcccaagctggcagagatttgtctgggaggagtcgctctcatgttaccggagggaacataaagtgcgatgctcattctggaaaaataatttgttggtttcttaaaaaaaaaaaaaaaaaaaaaacagacataaaagtaccacacaactcagcaatttcaaactagcaaaccggacttctttctattcagagaaatgaaaacttaacatttccataagctgtatagtgaatacttacggcacatgcttttcttacatcacaaaggaacaattcagaagtctttcaaatgaatggtcaagcaaattggcgcatagtgggatactgctcagtaacaaaaagaaacgacttattaatagacgcaatgactaggctggctgattcttcagaggattgtgccaagtaaaaccagctaatcctaaaggtcacgtggtttcatggaaaaaaattaacatttgttgaagaagggatgaggggagaattctgaggaagctggcatgatgctctctttaactcgacatagaagagacggccatatggtcaccgatggccaatggcatctgctatctaacggatgtgtggtcctgttcaaagaagagcagctctttgtgatctgcccagcttgttagttgtgccaacaacccacaagggctccttgaattgatactctaagaagaaagaaggctgcattcttttcttcattaaaatctcagttactgtaaaggtagccatggctgtcctttgcaaacaaaactccatagagagcagacgctggagtgatacagacctccatttggcaatggtgttcctagtaccagtgtgttttatagctcgtatggtatgtgtgagtaggttccaatgagactgtatttcttatgttctgtgttcgtttgaacataaactcgaagcagatccctgtgttgctacacagatgcaccatggatagaatgccagctccagatctggaggcgctgcccacttgctttgctgagatggtatcgggggtgtgagagacattcaaagccacgtgctgtgggtctcctcatttaggttttgtgtttattgcccctacatggttgctttagtaggtgattgttggattgtttcatagaagggttcatgtcatgtctctcatttcacagggaaacaaacctgaaggttcgtcaggcactacctgtcacctcagaacttggagcagacattagcagtcttgcagagtttgatggtaagtgctttgaatggacagaagaaaaatctgagatcctgtggtagtttgtgtggccttgttggaggaaatgtgcccctttggatgtgggcattgccacccttctcttcactccctggaagccagtcttctcctattagccttcttcttggctactgctgcactatgcctgctagtatactgccatgcttggatgataatggactgaatctctgaatctgtaagccagctacaattaaatgttcacctttataagagttgccttggccatggtatctgttcacgtaatgaaaccggttcaaactaagacagagaccatttatgcttccttcccttcccttcccttcccttcccttcccttcccttnnnnnnnnnnnnnnnnnnnnnnnnnnnnnnnnnnnnnnnnnnnnnnnnnnnnnnnnnnnnnnnnnnnnnnnnnnnnnnnnnnnnnnnnnnnnnnnnnnnnnnnnnnnnnnnnnnnnnnnnnnnnnnnnnnnnnnnnnnnnnnnnnnnnnnnnnnnnnnnnnnnnnnnnnnnnnnnnnnnnnnnnnnnnnnnnnnnnnnnnnnnnnnnnnnnnnnnnnnnnnnnnnnnnnnnnnnnnnnnnnnnnnnnnnnnnnnnnnnnnnnnnnnnnnnnnnnnnnnnnnnnnnnnnnnnnnnnnntttgcatagtgacataatgtcttgaaacattatcaccaagttatagtcagccattagttgccatatattttagacaatggttttatcgtcattaccaccagcaccagcaccaccagcaccagcaccacctccatcatcactgcattgaacccaggcccacctcttcagcaggttattgtgtctacatgcttctggctgtatcttgtgctaacattattttaaggttcactgtaggtctctaggtcctacctcctctagatagctgcatttctttgtggtcatgatacctttaaaagtaaaaaaaaagaggcaccagttgtagagttttgcacatcatgcaaaactgagggagactgaggcttttctgccatccctcaaaagtcttttgcattaccaagttgcaagtttggttttggatatcattattttcccatataggttggcttgactttctggagtcttatatgaacttaagactaccctgctgaggtgatttctttggagtttactgagaaataataaagagaaatggtcttggaaatgcaccttgagttaaaggtcaggaagttcatatgcatcttctccaatacacatttcagaatgtatacacatttcagaatgtatacacatttcagaatgtatagggtctgtgcttggcatttgcttgtaaattctgcctggattatgttaacgttttaatctctcttaatgactgttactgtaataaatgtttataggaaaatactcttccaaattaagatttaatctagaggagtagccaggaaactttgaatagcccaagaaatattttgattataattaaacaaattacaaattttctaatgatgtaatttttttcaatgagatgttactgttatgtaaatccaaggaaagtaaattgtattcacaaatcaaaattcttcttaaaatactgtgttgactctttatggagccctaaagaggcaatataaatataacttgccattactcaattcttccgtggcagaactgtacctttatatcttcaccagcctataatgaggcacaaatctgcctcttcaggttggaggccacatctcctctttccactgacttcctaactctgcttctcaggatctgtgtattgtacctgacaactactcaggccagagaccatgcttctcttgcctcctgcactttaagcctactatctttagacccatgcctgtcacccaggcacatcctctctgcaaactcaaataagtacctgcaatgatgaagtcagaagtcacagcatgacttcacctagctaggatcacctcagctgcctcacaagcaaatcaggcctgagtaacccccactaaacttcaaacctcacccagctgctccagaaccagccaagcttcagtcccagcaagcagagtcttagatacccactcaatacagcgccatcagagacccacacccaaggctgcagctgatgaaagatgtgcaaaccaacgtaaaaaccaagattaggctgagaagtgactcaacgggtaaagtgcttgctgcatgaacttgactgagtgttagatccccagaacccacataaaattcagatggcagtggtggcccacctcaagcccagcatataggaagcagagacaagggattctgtgagcaagctggccagctagacaagcaaagatggtgagcttaaggttcagcgagggactttgcccacaaacatatacctgcacagatgcgagcacacatacattcacacacagtacacatacatggtcccaaatgaaagctatctggacaaaactcgagaaaaataattgaaaaaaatatattccaagaatgtcatagagggcatgaacaaattcctgtagggatttaaagaaagacagtgataaggaggtgaatggattccagaagtatacacacagacagatgctaaaatcaggaagtcaatacagtatatgaggataaaattcagcgaagagatagaattgctggagaaagctcaaaatgaaattaagctgggaatgaattccacagagagtgcagtgggaggttcatgaaggcatggtaaggaggagggacatcaggccccagcctatcactggagttggagtattcaaacagcgaaagtgaatgcttagcacctggaagtcggcagaacaacacagcctatcaccatcactcttggcagactattgccatcactgttggctgactattccatcactgttggctgactatccccatcactgttggttgactatcccatcactgttggctgactatccctatcactgttggctgactatccccatcactgttggctgattatccccatcactgttggctgactatccccatcactgttggctgattatccccatcactgttggttgactatcccatcactattggttgactatcccatcactgttggttgattgtcaccattgctcttggtttcttaccagaaccagacagtaaaactctagagctgaagacaccatgtatctgtttataaaacacagaacaataaagctggaattgagcaggaagtttcctctctttggctcatgttcaaagcactagaaggtaccagaaggtgttggaaggtgctatgaagcattttggggaagacaaatcgccaatgatcttacccagctgtagattatgtatacagcaatacttacctgtgcataaacacatgcccactggtatgagagtattctgagggttatcaaccacttttggatgaatatgagatctgcttcattggaaggaattcatgcttggtagtataaacttggctaaaagctagggaggtcattggctgtacagtgactcagccactgaagctttggtaaattggacatgtagttaaaccaccttctgcagtgggcgactgtcaaaattgagatttggaacagatatttaccagtttatgtccattcattcttttgttcatttatttgtttggcaaatgtatatttcatacaatgctaaagagtctgtgggctcgtcccaaagaggcctttaattaggtgattgctaatgtactcaggcccggaacatgatgttgatataggaacaagcactcactgtatattataagttatcttttcaaatacatgcagcctttgatgcatttgtgagactggcatatgtgtatgtaggcagatatgtgtgtgtgtgtgtgtgtgtgtgtgtgtgtgtgtgtgcgcgcgtgtgtacatatgtaggtatgtgagcagatgagtgtgcttttgtgtttgtgtgtgcgttgggtgtctttctctattgctcttgtttgtttgaggagagtctcttactgagcctacccaatgaatcacatgagctggtctctgcttcccaatagtgggattacatggtcacatgcttccatgcctgttttttttttttaaacttgggtgtcagacatcctaactcagatctacattcttgtgcagcgagtgctttaacctttgaaccatctccccaacttcatcttgctagcccctgaaggaaaaattatcactaactttaatttgtacatagggaacctgagactcaggtagatagaatattgcctatgtcatgtgactattaagtagaggagtcagaatgcaaaccaaaagctgatggaaaatcctgttctaagaaagaacacaaaaccatgggctctaaactacaacctggaacagcattagacacagagggcagtgtatcacagcttagcttatgaggggacagaaatgtttaaaagtaaggtaagctgattatgagaaatcaaactatctctatgtttatttcaaaattatcaaagttctcagtgccttagaatttcgtcaggataaagaatttagaggtactgtccaaacacagagtaggagcaggttttggtagattttctgtttatttgaaaagttcccatgcaaataaatattttatccattttaaatatctgaaaaaataatatgtagtctgttgaactttataagaaaatatgtaatttgatctaataatactatagtaataaagcattttagtttgactcggcttttcatggtgtcttatgggaaccaaacaacatttataaacaaatacatggaaatatttgttaattgcatatttgtaaaccagatgtttttacaccttgggggaaatcccctaatatacatgtgcttgaatgtgttcaagaatcttttgtatattgttactgactgaactgtggtctgtgtttcgcaactagtgactgttaataccatttctaaaccagagaagggttgactctttcgttaggaatctttgtgtattttgtggtcttttctgtaaagaacagcatgtgtgtaattcaaacaaagaaaaatgacatctcttgttggttaaaatacacaaataagtaaataactgagttaataaatacatgggcttggttaacactttgtgactttacaaaacttacctgaaaactcttccagtcaagtggacagaagtccagtcctacacaacatagcttatacatgggcccatggatctcattaacagacatgaaggacaatttccttttgactggtggtactaatatggccgttgtggtgttaatgttggatggcttctcagtgttgagaaggttgtacaggggcttggcgtccaagaactcaaatagaatcatttggctttagagactgtctttttaagggaaaaggttatgactgtctttttaagggaaaaggttatttcattcatcagcctaacagtagtgggtaatcgcctaaatattgagaatttcttggctagggaaactcttgaccagcaataatggcaccctatccagtgtgcagcctgacctgtggaagagttgcagtggacaatcaagagacatcactaataatatgcagaaaaagtaaagctaattagttttggaaaatcttgggatattttgtactaaaaatttttattggtaaactccatatttcctctttgagtaaatagtttgagagacttaacaaattggtagttaagcagtaatccagcaggctgaatttggaatttaaaaatgccaaggaaagttcaaaataagaacttgtagattttgctcagtataggtttccctgtgccgttatagtggatgaactataatcgatgtcttttctttagaggggcaaatgagattaactattttgattatgattacactttatgattgaggctgcccccaacaacgttttatcatttccagctaagatgactatgtgagaaatgatcctgtttcccccgaatggctttctcatactttgcagccatttcccatatcttcctcggatggaactaaaaagaagaaagcaggaccccagggcagcctctcttgggtcttaggctttgttggtggaaaatatttttgctggtttctgataaggtcactgcctgttttcatcattctacctggcttatgttacagttgggtaatactatttggtattcaaatcccaatttcatgattcctgtcaaaatatacctaccttttaatttatcatagatttactgtcctctctcagcctctttccttttgaaagaaaattatgcatctgagtattttatttgcatgtatataatgtatataccatgcacgtatctggtgctcttatatgtagaagaaggaatcagatcccctgacactggagttaaagctgccatgaggggcaggaaaccgatatgtgttctctgtaagagcagcaaatgctcttagctactgattatctgcccagcccctacaactccttccttgaaaccgtttttgcttgtatgtttgttttttttccgagacggggtttctctttgtagtcctggctgtcctggaaccaaaccattttttttaaaaaaaactatgtctccaataatgtttccaataaatatttttagattttattacatagacagtgcggtaagttgtgggaatgtgtggagatgagtatagtgtttcccacaaaggaaactggtcaaccctttggaaagagaggaagagaaatgggaactttcatattttatgccaatagaactaagaaatggggagcagcatttccttttttcgtcgggtaaaaaaaaatagtttggctttgttcccaatgtttcattgtgatgggcccctgtgtttagaacttggagagtggggccatactcttagaaagctgtgctgggatttggcctccagaggctcgtgttaaacttggccctatagtccctgtacagaaaggcaccctcagcctaaaaccagatgagagcaagtcttcttgctggatgtagtgagccaaaatgttcaaggttgaatttacctccttgtcagcctttgctcatgaccatgaaaatgatcaaacagacctggctctttatattgttattggcaaggacatgtatcatgttgttttttttgttcaaagtacattttttttttgaacagtggccaaatttaaagtttgggaaattgagtcttgggtgaagaaactggaatagacttcaagggcttctgtcagcctgttatttgtgcaggttttgttggtgagacctcctcaattcaaggctacgtgaaactcggaaataaaagttattggtcaaggaaaagatgatcacaaaatctgagaatttagaaaaagcctctggggccacagcagagttttccaaatgactcgaatcagttcacatcagttttaatttacttttaaatgaacaaataagctataacgagagctaaccacaatttagctacttggtcataaagaaaccttgtgcaggttgtttgtctctttgaaatccaggctaacaggctttcatttagtattggaaatctgggagggcccagagaatgaccaaatagaggcactttaggccaactctttgctaattgggaaatggtagggggggggcgtagagagggtttccctttggtgtctttgaaataggaacagcctggctggtcgggagtggtcaggccacttgaattatagctgcatctccgtctatgaactccaaaaggagagcagtattctaggaaggacagacattacaggaagtctcttcagtatcagaaggtggcttggggagagggtggggccctgtctgctatgtttcagctcttaagtctcagtgcccagaaggcacagtgcccagatcagtgttactgtgtggggtgggactttaggatgtgtggcctagtgggaggtcattcgccacgtgtgtccttgaagggcacttactgtaggagaaactgctttccacacactccttccataatgtgccaccacagacttcaagtatctggatcaattgattctaaacagaagtctccagagctgtgagcccaaaccacttttgacttatttctttatttgagattgtcaggttcttagtacagcaaaaaagaaaaaaaaaaaaaaaaaaaaaaaaaaaagctgacctagattccattttggcttccctggtctcctcgaccaatgctgaaggttgactcccacccccacaccccctttcttattttccaaactaccattttggcttctggttttaaaatgcactttgtgacttgtgagacagtaaactcgcaagatgctcggtgatcttacctctgattctgacctgagctgggtgtttccaccctctctcctctttcctctttccctgtctcttttcctttttccctctgtcctttcccagcatcccattgttctgtagctttgcagtcatcacttctaaaaaagtagcccatttgtttgcaaatgtatttaatctaatacatctttaagttacatcttgtgaagggtccatgaaaatcatttgtttcccctttctgtccagacaacccaaccctgaatgtgcctgctctgcttgaaataattaatagagtgaaccagttcattgatttggaatgagcattccctttcttggggttataaaaacaagcaaacacaacaacaacaacaaacgccccaacgctatccaaaagtcccccatatcctccctcccactcccctacccacccattcccactttttggccctggcattcccctgtactggggcatataaagtttgcaagaccaatgggcctctctttccactgatggccgactaggccatcttttgatacatatgcagctagagtcaagagctccggggtactggttagttcataatgttgttccacctatagggttgcagatctctttagctccttgggtactttctctagctcctccattgggggccctgtgatccattcaatagctgactgtgagcattcaaaggaacatattttggctaggttgagcaagctatgtggtgtctttgagagtccacagaactctgaatcaagtcaacccaagaggcctagggcccttggaaggagtctccacttcgggaataaatgagtctgtttccttagcgtgtggttgctaggatcccaagtccttactgtgaacatagaaaagtgtttaacttttgtcatgaagctgaaactgtggcatcgcaaccctttcggcagttcacagaacagcgagaaaaaaagtggacatcgaccattttatacttgtgaaaggtcattttggtatatcctaagagtaaagatgagtacttttaaagatttttaagggaaaaaggtctcacacacattgtaggctctgttcttatctggtcagtatagagaatcttgcttcaaaatatttgatgtattttatgattttttttttttgcatgttgtagcttattttcctccaccacagtcttgcatgtgtaacagcatgttttctgaaagagaaggacaatcaatgccttgcatatcaacagcagggtagtaaatagcatggtgggcttctgaagtgagctcacagtgggtctgacggggctgcttattttccagggatcgtcaggtgtgaggcgcctaacaacaagttagacagattctcgggggtcctctcttggaaggacagcaagcatgccctcagcaaccagaagataatcctgagaggctgcgtcctgaggaacaccagctggtgctttggaatggttctttttgcaggtacagtgtatagactcgggctatctctgtgccatcccttcccaccaagtccctggttctctatggatgtgaatgtgcactgagtttttaatgagtgctgagccttggctcctgaggtgatgccagcgtgtggtactcccagaggagacagcagtactctgagtgtaatccatgtggtcccagtgtgtgggaaccagtgacatgtggaattcattcgtaaggaggctgaagccttcagtctctgatggtatctgcacacccactcttctgtttctttttctttcaccccatcatagaagccttgtctgccagtctatataatcaatgtgcccttaaaagtgaagatcaatatgaaagaaagcccctctttctgttgcaggccatattgcttgtcatttgagaaggtcaagtggctcatttgagaaagttttcttggaaagcaatcatttctgtttgtcaccagaacagatgagtctgaaggctgcacttaatggggctaggagggatggagggagggagaaagggagagagggaggaaggaaggtgggagggaggcaggtaggaagagaaattctcccactctttcttcccctctattttttctttttgtttattcttttctcatacaatacatctggaccacagccttccctctgtccactcctcccagttcctcccgaacctcccttcctcccaggtccattattctcagtttcccttcagaaaggagcaggcttcccagggataccaactgaacacagcataacaagatacaataagactagacacaaatcctcacatcaaggctggacagggcaacttggtaggaggaaaagggtcccagaacagacaaaagagtcagaaatatccctgctcccaccactagcagtcccacaaaacgtcaagctaagcaaccataacatatatcagaggacctagtgctggcccatggaggctctgtgattactagtccagtctctatgagccctgcttagttgattctgtaggctgtgttctcctggtgtccttggcccctctggctccaacaatccttcctccccctcttttgtgggggtttcccaagctctactaatgtttggctgtgggtctctgcatcttctttgatcagctgccagaggaagtccccatgtttattgggttaggcactgatctataagtatagggaatattactaggaatcatttcatttttttaaaattttgccagttgtgtttggttctatctagcttcctggccatccaggaagtgtctgggatagtctctctctcatggcatgggcctcaagtcagactagtcattgtctggccactcccacaagctctgaaccaccattgccccatcacatcttgccagcaggacaggttgtaaatcaaaagttttgtggctgggttggtgtcccaattctaccactggaagtcttgcctggttacagaaatgatgggttcaggctcctatcttccattactaagagtccttgctagggtcatcctgttaggtttctggaaatttccactgtactaggcttccacattatacccctaatgtccccctccccaatttcagtcatctttccccatctgatccctcctgctcccagtccatctattctatttccttgtcccaggaagagccactcatctcccttagagccctccttggtatttagcctccctggggtctgtgtagtgtagtgtagtgtagtgtagtgtagtgtagtgtagtgtagtgtagtatgattttcctttatttaacagctaatatccacttataacagagtatgtatctgttttgctgggtctgggttacctcactcaggatgagttctagttccatccacgtgtctgcaaatatcatgatgactttttttttttaacatctgaatagtactccattgtataaacgaaccatattttctattctttggttgagggatgccactgttgtttccaggttttggctattatgaataaagccactatgaacatagttgagtagtgtccttgtgttctactcacaggttcattttctagcctttgattagaaaacaaattctgcttattgtgataaaatgtgctttatgtctgctgattatatgtgtaactgaaactaaattgtttttcttaactgactttctttaacaacaacaacaataacaacatcaatagcaaaaatgctcattaaaggctaaatgtattctgaaactagaacacgtcttcctagttgctgctaaataccgtcagctgtgggtctgagcattgcttttgctctcaggcattgttgtgtgtaaagacccagcaaatctctagaaatgaagcagaatcaggctttttgtctgaggttgaacctcgtaaaccatgattcttttatcagatgctttttttctttttataatatttatttacttttacttagttcactttacatcctgcttgcttcccccctcccggtcactccttcccacaatccttcccctatcccttctttccttctcctctgagcaggtggggccctcctgggtatcgccccaccgtggcacatcaagtctctgtgagaacgggcacatcctctctcactgaggtcagacaaggcagcccatctagaagagcatatcccacttacaggcagcagcttttgggacaaccactgctccagttgtttaggaaccacatgaaaactaagctgcacatctgctacatatgtgcagggaggcctggcaaaggacactgtgtcaataggacaaaatgacagcctatgggttgggaaaaaaactttaccaactctacatctgatagaggtttaatacccaaaatttacaaagttctcaagaagctagacaccaacaacccatacaacccaattaaaaaataggacacagaactaaacagaatactcaacagggaatcttgaatggctgagaagcacttaaagaaatgtttaaagtccttagtcatcagggaaatgcaaatcaaaataactctgagattccatcttttatccataagaatgactaagatcaaaacctcaagagacagcacacgctgtcgaggatgtgaagcaaagggaacattcctcctccattgctggtgggagtgcaaacttgtacaatcactttggaaatcaatttggccatttctcagaaacagggaatagttctgctttaagacccagctatactcttgggtatatatccaaaagatgctctaccatcccacaaggactcttgctccactatgttcatagcagctttatttgtaatagccaggtgctttttgcattggtgaggtagataagtctatggttatttatgtcatagtttcttctgtcttgcagagaagtaaaaaggcgagcttactcatacatttcctctactttctgttaaagagcatggagatctcaaaatggtctccccatctgaaaggtcttttgggaaacattctcttgttcaatccctgttatcactgacgtggggacacctcatcccagggatgggctgtcattcaaaagctcattgcatttgtataatgttgatctgagtgactagcacaagactttgaatcatatatgctaggacagctgtggagagccacctctgaaggttaagatctccttcataagatcgtctctggagaaatcctcttctattaatggaaggaggtgtgttgagtagaagtttctagagtaggggtcaggcagatgtgggttcaggttgtttagatgccccaggttctaatcctaggtataagactttctatgctcttccctctgtggtagcataggataatcatgagcacactagaatatattgctcaggtacaatgatgatgggtgtggaagaggatgcttgacggtatttttcccatgcccacttctcgattcttttatccacagttcagagaacactgaccactctataggctgagctaggaaaactcgactattctctgtatttggggaggagagagtgagctctctattcttttatgatatgtcctgggtgttcacttttaggggaccttggtcaggtggacatttgtaaagcctgcattggctttagttaatagagagcttaactagaatactggcaagcagaggaattcagagttgtttttgtccatgtcaatgctgaatagatgggtttcatgagtacccaagtcttaagacattgggacaagaaacaagttctagttggttcttagatcttgtgaaaactgaatcaaaaattaattattaatccttcttattttttcttgtttttttttttttttgagacagggtctctctgtgtagccctgactgtcctggaactcactctgtagatcaggctggcctcgaactcagaaatccacctgcctttgcctcccaagagctgggattaaaggcgtgtgccaccactgcctggtccttctcttatttttaaatgctacttgtctacattgataggaggcatggagatagagttcagaggcatggttccctttacaaacctctcattcctaagttgaacccatatggacacctggccatgcttctctggtgggtctcttttgtgctcaagatgaggtcaaagcttgtttctgaggtaaggggccatactcactcaaggagtctgtagggtccgaagccatcttggtgcagataaagtctctgtgctcactgtcattcatttgccccataggtcttatctcctcactttccagccttctctttgctttgccggctggtacctgtggttgaatataaagccatgatattatggcttcccttaattttttttgtcttgatgagtcatgaaagaaattaaaaggagacaaattattaaatcctaagtatttattcaccaaatatacatctctatgtagttgtttcagattggttgggcccttccacataagatcactcttgctgtaaaggctgtaaacctattgttcctacctttaggatccaataataactctcctttccctgtatcattgctggcttaggtggagaaacagtttgatagctattgaacctgccttgctgtattagtcttctgcttccaatgtgcccctcctcatatgttgtagaatttctacataaattcttctataattgtttttgttcggtgatttctgttaggatcctgaatgaggtacagtattgaatatgcattggtttattgtctcatatagtttataagtaataattcagagtgagagctttagagttagatatattgagattaagttctatctctgggcttagagaatgtatagaatgtatagaatgagaatttgcaggaaagttaaattccttaggcctgtttcattattggtgagctgaagattattgtatctaatttattgcccaataagcactagctgactctgccttctccagggatgagccccctgcatgcatatatatataatgtttgtgtgtgtgtgtatagatgaagacacaatgaatttgagagggagtggcagaggacacacgaggagttgggaaggaggagaggtagaaatgatgtaaatacaatatacttctaagacatccttaaaataaaataaaagtacatttgcacaatgcccaaaatataacaaatgctaaatttactagatatttaattatttactgaatgccaagcacttgctaggtactcttcatttcctagtgcaatgttcattgattagggattaactgtaggaaaaagccaaatacattctctttactcatgtagctttcggtcttgtataatagacattatttgatattattgatatgttgatcccaaataatcatggtggtggttctataatctgaaacacaggcgagtgctgatcaaatgaatgtgtactcactacagagttaaaatggaggaatgtgattaaacactgactttagggaaggcgttctgagctgagatataaagaccaatataaataaagtgaggagctagaaaagtagaagaaagtagagcatacaaggaaaacagagagctagtaccccaaaggcaaaccgtgggccaatgtgtggtgtaagtgaggtcagaaaacctccagagctctgatggcgagcagaaagcacaggagatgctcccgggagtgtgatgggaggttcaggagcagccgggcagtgtagaccttgaagtttatgtgtaaaagtttagtctttatcccaagccctttagggaacccagcaagaatgtttaagaggaagaataaataattaatatttaaaatacatatatggggagcatagagtattgcctatggtatttgtaatgcttgtaaatggacagtaggtccttaaatgagtgcaccattggggtgggaggtgcagaggaatgctgactagtattcaggacagagcagatgcagggaggcgagggtaccaggcatttttgtcatttatttatttatctatttatttattaattttatactccagatttcattacttaccccgtctccacaagaatgtctctacccccccagcccccaccctaccagacctctaaactccctgtctcttgagggttaggtgcatcttctctgaacccagacctggcagtcctctactgtatgtgtgttgggggactcatatcagctggtgtatcctgcttggttggtggtcctgtgtctgagggatctctggggtccaggataattgagactgctggtcctcctacaggattgtcctcctcctcagcttcttccagcttttccctaattcaaccacagggatcagcagcttctgtccattggttgggtgcaaatatctgcctctgactctttcagctgcttattgggtcttctggagtatggtcatgataggtccctttttgtgagcactccatatcctcagtaatagtgtcaggccttggggactcctcttgagctggatcccactttgggcctgtcactagaccttgttttcctcaggttcctctccatttccatccctgcagttctttcaaacagggacaattatgggtcaaagttttgactatgggatggcaaccccctctctcacttgatgctctgtcttcctgctggaggtgggctctataaattccctctccctactgtctggcatttcatctaaggtccctccctttgagtcctgagagtctctcacctcccaggtctctgttgcattctagagggtcccccccaaccttctatctcctgaggttgcatatttccattctttctgctgtccctcagggccttcagtccttttccctcacccaataannnnnnnnnnnnnnnnnnnnnnnnnnnnnnnnnnnnnnnnnnnnntgcatgtccttttgggtatgagttacctcactcaggatgatattttcctggtccatccatttgcctgcaaagctaaagatgtcctcattcttaatagcgagtagtattccattatgaaaatgaaccacattttctgtatccattcttctggtgtgggacatctggttgtttcctgcttctggctatcacaaataaggctgctatgaacatagtggaacatgtgcccttatggcatgatggggcatcttttgggtatattcccgagagtggtattgctgggtcttcaggtagatctattttcaattatctgaggaacctccagattgatttccagagtggttgtgccactttgctatcctaccagcaaaggaagagtgttcctctttctccacatcctggccaacatgtgctgtcaccactgagtttatgatcttagctattctaattggtgtaaggtggaatctcagggttgttttgatttgcatttctctgatcactaaggattctaaacatttctttaggtggttctcagtctagattcctcttcttgtgaattctcggtttagttctatatcccattttttgattgggttgtttgatttttttttttttttggtggttagcttcttgaattctttatatatcttgaatattagccctctatcagatgtggagttagtgaagtttttttttttttttccccaatctgtaggttgccaatttgtcttattgactgtgtcctgtgccttatagaagctttccagtttcatgaggtcccatttatcaattgttgatcttagagcatgaaccactggagttctgcttaggaaatttcccgtgatcccaatgagatcaaggctctttcctgctttctcttctattagattcagtgtatccggttttatgttgaggtccttcattcaatttgacttgagcttttgaaaggtgacaaatatgggtctattttcatttttctccatacagacagccagttagaccagcaccattgactgaagatgctttattttccactgtatatattttggcatctttgtcaaagatcaagtgtccataactgtgtggtttcaatatgaagtgactttctttatgtctgctctctagtttgggtttaaattatattttgtcagacattagagcagtaacaactggttgttttttataggttcctttcgactggaaaacactttccattctttaaccctaatgtagtttctgccctttgtgatcaggtgtgtttctggaaggtagcaaatagatctttccttctttttgagtaagtatactagcctgtgccttttgattgggggaatttataactttaatagttattattgggagatacgtattgattcctgccattagattgattttgtttcagaaatgttactcttttacaggtccagacactaaactaatgcagaacagtggtaagacaaagtttaaaaggacaagcattgacagactgatgaataccctagtcctctgggtaagtttctgtcaggataatgagtactcttgtgctgtggacgaatcattaagaggttgacaagtactctatgactatgggtgagtccatgacaggttgatgcatagtctagtgctacggctaaatcattgataggttgatgagtacgttaaagatatgagtggatcactgacaggttgactagtactctagttctcttggtgagaatagtatatttgtctatctgcctgtcttatctgtctgtctgtctgtctgtatttatgtatgtattttatctgtctgtctgcctgtcacttatcatctatcatctgtcaatcacagcataaagtcactggtggtacccttggttttttgtggtagtaaataagatgatcccctaaggacttttaagtagggtatttaatgccaaacatcattaattttagtggtttaaagtaattccattcaattaatttgtagcactaactattaaaagaagaagacactatgatatagatacaaattgatagtgtatgggggacacatggttcaagttttctcttatacctagtttttctaataaaccttcagtaagtttttttcaacttcctcttcatattctcctactccgtttatgatagtgaagaagcaaatagttgtagatatcaggaagtcttgcttggagaaaaaaatgtacacattcctactctgtagagccttttctgcctctagagtggctcctgtgagctcctgatacagaagcagaacaagtcaccacaaattcgttcccaagacactgcctttaggtccctcatctgtgacgctgtgggtttggactcggtactgatgacttcattgtctctctgatgtacttccaaaatgtttgcttttctaattctggtagagatggtgctgttaaaatctggtatacattttcaccttgcctcccacttatttcaagtatttcaaaaaaacaaagtatctacatcatgagatgttttggctcctccccactcccctttcttttctctctttctgtccgtatgtaaggatttgcagacatatctatagctaagaattctgacaggcatgagatggtgaagggaagcatcagtcagtgtattagtggcttatcttgttgctgttgtcaaatgcccaacaaaaacaatttaaaggaagaaaaatttggtttgtcatacagttctggggatgtagtcagtcctggcagtgactgcgtggctgcaggagcaggaggcagctgatcacattgcacccacagtaagaaccctgagagagatggatgctgctcaggtggctttctcctttaaatactctgggaacacctgctggggtgttgctgccccctgtaggtgggtcttcccacttcagttaatccagtctagacaatcccttacagacttgcctgtaagcttgtttccatggtgattctaaagtccatcaaactgtcaactatggtgaaccattacagtacattgtagctggaccacagatgtaaactgggctttccagggcactgaggtctcacagtcttctgacttcaagcattgaaatatgtgatttgtcacagagtaagggtatgacgataactgggagacagggtcagcctaaacatggtcttttctgtgcttacccttttattttgtttttaatctgtggataatggctgcatctgcctcagagagagttagtgagagaattaagtgagaagtggatgtcagatatctagccataccttggccataaaatgctaacttttattcatatgcctggttgtaagtaagaaagggtttgtataacttgattttcaaacgacaatttcttatgggaaatggacttgtagttagtcacttgtattgacgtgactaatttgggattcatattaaccttaaccaaatttctatacttctattgttatttcagatttttgggtttctggtatgcttgggaattattcttgcagtaggaagttcaatcttggagagtgaagttggggaccagttcagaactccccccttctggagagaaggcgagaagagcttcttgttctctggattcttaacattctggtcatatgtcatcattctcaacacgcttgtgcccatttcattatatgtgaggtgagctgcggtttacactgggatgacgtcatttagttgctcaccctgtgtgtgatctgctaaatctgttagcaataaggcaacttggctcttcaatgctgtttaacgtgtacattttcatatcacaacaaatgcattttattttcttcttgattagtatggtttcttagagatgtgtttctttggaacatataaactgagctataaactcatggaatatgatcagtaaaattgagttggtttaaggtaagaaaaagaaaaacccaggatgtcttgagatgtggccttccagccattggtctgcctcagatacttggatgcaggtgctgtcctaccactcactactcctgtaacattgggaaaatcacctcaccattaacttcttaagcttcttcactttaaaaaagtgggcaaaatataagtcctatctcataggattatctgaggactcaatgaatgtctggcatactctaaagcttaatgagtagcagtctcccttatttttggcagcatcataaataaatacagaaaggacccaaagtaaggtaggtgatagtacctggctattgtaggtaactatggttcttaattcccactattctggtgtacagtttctagatctagtttcacagagtgatattaaaatggtctgtcattgtctgtatcaaccttcaactttgtgtgtgtgtgtatgtgtgtgtgttctcttttcctctctgtgagtgaatatttgttcttttgttctttctgtgtgttctctttctccaaacataagtatgttttcttctctctgtacccatttctcttttttcatacatgtatgtgtgtgacagagtgtgctccacaaggtttaggtaagtctacctgagacattctctatcccaatcctaccaagactgagtcagtccccaagatcctggagcgaggacaggcttggctgtgtgtgttttttttttttttaatgcttgccatcaatactaacaatatacaaagccaccagccctgactctcctctaattatgactaacttctcttttctctttccaaaaactaagccacagtgaaacaaagaaagttaatgaacaaaattcactcttgttttggatagtggtaaggaaactgaaatgtcaagttgtgggaaattgacttgaagtagggacatgtggccacaacaccacaaattgctccgggcagtctggagctgtgggcagcctggactctgtgtaatctgtattctactggctcatcttcagtactgagagtctcttatgcttgaatcccattataaagcctgcaataaatgccattctttgccagaaaagccatgatcaactttgttgatttctggattcctttctattaaaaaaatagcacccacctttgatccatgtgtacattaatcatttatatctgatctcagtacagtgcttcattgcttaaaactagtcttttatgcattgctttttattatttcaaaatcgctctctgccattctataatctgacatgaatatgaggacttgccacattccatagatggctatgtttcctttctttttttaatgtcttgcatgagccactaaacacactttatcttacttatgtatcccccaaatcttctgaagtagctcttgctgaaatggggagttgattcgttcatggattacatagctcattagatcagaatgaagatctaaatctgcactgcctgacatttgcaccttgtttctcccctggctctaaactgtgtgatttgggaccggtgaggataaaaaactggggttttcctctctctgaataactgatcttgatctcaacttgaggggaaagcatttcaagaaatttcaggctgtttggtcctaagtgctcaaacactctgatacaggaacacgtgtgtctatgatgaagactgaagcccccgacccaagcccccattaggcttttggataaggtacaatacataaactaatgccatatggtgaaagtcatgatttgctttgaacagttaaaagttccaggtgagcagagacatttattcttatattttcatgctgtcagtgtgtttatgcacttagaaagatccagccacaggttatgtgtgtatgtgtacttgtgtgcgtgcatgtgtgtgtatgtctgtctatgtgtgtgtgtgcatgtgtgtgtgtgtgcctgtgtatgtctctttgtgtgtgtgtgtgtgtgtgtgtgtgtgtgtgtgtgtgtgtgaaagaaagggctgcatgtagtacggccactcccctaaaccctctctttctaagcaaaaaggagatctatcttctttataggctatttttaggctcaggaacataaatgcattttgcagattcccattggcttgtagtgcatcatgggagaataaaaaagactgctacaaacctgctttgaatttacaaggagctaccaggtttgcagacaattcaaagctttgagtgatttttgcagagtggccctcctttcagggccaatatgtcttccaggatcctcaggagatgctcaggactgctggtcatactgaacattacatgtccatttctcctgttttatgcataaatatttataatgaagtttaacttacaaatcaggcacagtaatagattaacaataaagtgaacaaatgtaaaaattataatcgcatagtacagtaaaagttatataacatggctttcttgtttcaaggtattacattgttctgtgtgtacccttgtgtcttagtcagggtttctattcctgcacaaacatcatgaccaagaagcaagctggggaggaaagggtttatttagcttacacttccatactgctattcatcaccaaaggaagtcaggactggaactcaaacaggtcaggaagcaggagctgatgcagaggctatggagggatgttatttactggcttgcttcccctggcttgctcagcttgctttcttatagaacccaagactacctaccagctcatggatggcactacccacaatgggccttccccacttgatcactaattgagaaagtgccttacagctgtatctcatggaggcattttctcaactgaagctcctttctctgtgataactccagcttgtgtcaagttgacacaaaaccaaccagtataccctgctttgatatatgatgatataatgtcagaaggataggatgaagtgtggttgatgacttaagcattgtgataacattacctggacacagacacttcagtgccctactaatagatctggtagctaagatggctgctatgtggatagtgtatgctgagggatgtatcagctaagggtctatcacatctcaggtgtggtagatccaggcagagcaggataggatggggtaacagttcaccctttgggagcattacacaacttaaagcaaaaattgtttaattttggaattttccatcaaatatgttttggatacagttaattgtgggtaactgaaactataggaagtgaaccttcagtaaggggagattattgcgtaataccatagtgaaggccaggtttgcattgcctgtaacagatgctgggattctggttattgtgtgtgtgtgtgtgtgtgtgtgtgtgtgtgtgtgtgtgtgtgtgtgtgagttgnnnnnnnnnnnnnnnnnnnnagttgggttagtcacttaatcttgcaagccataatttcctaattggtgaagttagagactagagggctagaacctactcacttgacacggtctgcctgtttaggacaggttggatgatgggtctgaactgttattagtcctaacacctccccatgtaaaggaataaggaaacagtaagctactctgcaaaaacccgagccagagtggctagttagggatgcagggagaggggcagaaaagtaaaacacacattaaaatatataaacacatgcagaattaagatctgttcatctttctctcatagggttttatgttagtcattgtgtggttttagtttaggggaaactcagagatgacctggtctcatgttactctgagagggaagtattgtgcccagcctttagaactagatgcacagcattcagaattctcacacaccatctagccctcttcctgtaaagataagaaatcctactcagatcagaaataaattgtaggtcggtgctattattggtgcaattttatgttctttcaaatgctcttattaatatacaaagacatgaattgaagttcaatgagtaaagacaggactaattaaactaaaacaaaccaattcagaaaaaaatcatgcatacaagtgattataaacctaggcatccaaaatgatatacacccctgatagaattcagctaagtatctgataatgtgagacacacacacacacatcacacacacacacacacacacacacacacacacacacacacacaggactttaaagttttttttttttagatcagcaataattaaaaaacctagcctatcaataacaaacatgatgtccaggaacaaatctgtcctgctgtggtatggaactatataaaaataaagcaaaactgaatatgttacaatataatacctttaaaatgggatttctgggaaaaaaccatattcttatcattgaggctgcccttaattttatgaaatacagtttttttccaagcagttaatacaatagaagcctaagaaaatcccttaataaatttctatgaaaactgatacctcacattgcaataatcttttgggcaccccatttggcatcatagatgacagacatttggacttagtcctttggccacagacttcccctttctggagtttgaatgtataatccattactgcacaaagactgcactcttcctagtagacggacagtgacaaactgtttttagccaggattgatcacggtttgtttactgcttagtggagacttattgctgacttcttttgaaagtaaaaccagatcaatgtctcaggacacatttcttccaactagatatatgccaaatatcttccaactagatatatgccaaatatcttccaactagatatatgccaaatatcttccaactagatatatgccaaatatcttcagtaaggaaccatttactctgcgatgcagattgagtttcaagtgaatgtgccacagaaaacactctactgggcttttttaatagagagaaccgcaggcccttgcctgaggctttctgatgagccagccatatcactttatgatgctgaaaggaaataccttgggcaccaaggtttatgggcagattttcagtggaggcatttctgaagattgctaggacctaaggacaaagcacttatatatttttgtttttaaaagtcttgaggattttggcaaagctttgcgtgttcatgtattgacaggttctctctgtcctttcttcttctctttcatgttaatggaccacagtgtggaagtaatccgtctgggacacagttattttataaactgggaccggaagatgtattatgcttcgaaagcaatgcctgctgaagcccggacgaccactctaaatgaggaactgggccagatcgaatatatcttctctgacaaaacaggaactctcacccaaaacatcatgacttttaaaaaatgttccattaatggaagagtctacggtaagggaatagtttctcttaatgataccaaataaataagtaaataagtaaataaataaataaaaaaacatcattcaaaactaatatccccttgcccccccttaccaaaccatcatggctttcttgttaagcattgctatgatacttgacagataatggacacccataaactagttattgcacacatttgaaagaatctgatgaaacttagcatctgttgccatccatggtagactgttccctttgataccctgttctgtggatttgttctgtaactgctctggaggccaaattccctggttgtgccctaggcagtgtgatttatcttgttaagccaatgtcttttgcttcctcctctattccctgtgggatcaatgttaatatatgtgtttttgaggatttagtatttcctgaaatgcacatttcctagggcaccttcaccactaatttcccctttggattcttctgtatggataaagaatttgtatttggggatccaagcatcctttttgctcctggtccatctcaagctggcattgcctagctagcagacaatttcttctgtagaaaacagggaggcctggtgggacctttgggatagtcctctggatctcttaccttaattcacggaggttattcattttgccaaggagttccaagagaaggtaacttttctttgtctcctaatgaaaaggaaactttatcccttgtcaaataatttaaagcaggatttgactttgaaggaaaataagggattgaaaaagtcactatgccatgctgacctccctctcattgaatcctatcaccatcacccacccatgcagcaatgatgccctcagctctcctgtatcactaactatcctgccttctttggtagtggacatggtgacttccggcctgagctttcttgtatgtcttacatccatgtcatgcctactagaaccattacttaaaatttatggacattatttttttagtctaacaatacttccttgacctaaatagtggtgtaagtaaaaatattttgaacattggggggatattttgaaatttagagatccatttgattcattttaacccagtgatatgatttctaagaagcagtctgaagttattagacatgtggacaaataaccatttgtttggatgtttgttgtgggctacttttggagaaaacttcttgatatcttcaggtagagatttcaagatctttgtaaatttgcatattttaaaaaccatatgaaggctagtaattttcctcatagactataggaaaggaacagaaagggttaagtatcctcttttggtcctaatttatatatgcattataatttctatcatatttatacccataaaacatacttcttgcacacaacaatacttttcagaagtgctcttttgggtacagcttaacttgatttgagtcatagatctggactttgggaaatgttgacttttcactctgacctattgacttagtttaccatggttgtgatgaaacaccatcaccgaagcaactgagggaagaaagcatttattggcttacatttcaagattactgcttatcatcaaagggagtcagaacctggaagtttctgcttactggcttgctcttcatggtttctcagcatgcattttatagaactcaggaccaccagctcagggatggcaccacccacaacttggtgggccttcccacattaattactaatttaaaaaaatgcctcacagccttgcttagagaccaatcttatggaggcattttctcagttgatgttccctcatctcagatgcctccagtgtgtgtcaaattgacataaaactatccaacacacctatctacatcttgtttctgtaatcagaattattacatccttagacttttaatgtttcttctgtttcatctctagccctgcaatgggctctcttttgggggaggagggggcttgttaatacaaagacaaagttctttctcttctttccatcatttaattagaatgaatgcatttgtggtcatgataggaccatgaccatgtaactctgagatttatattttaggaggttggctaggatcattacaatctcaaggactcctcctgcacagcacatgaaaagcattcataacttagacctgcactccagaaaaaacacaaacaaatgttaaatactgtaacatgtgaaagaaaagacatgggtatagattcccatcatgctgacttcttataatatagtcctccacttctaactctgctcttcagctcatccataaaacttgaatgaaagtcttactggtacaagcttgtaagtaatcccgtctggttcatgttgatgcaaatactttgctactgtaaaaagggaatcctagtcaatagtatcaacccttcaaatacaaagggaagtttagaaaaatacccagatttccaaatccttcccagactgtgccagctgggaaacagctgttcaaacatgggagcctgtgagtgacatgccacactcaaaccacagcattcagcctttgcttcctacactatggtcatttcatgatccacagtgtgtttcatggaacttcaaaacttcctataattttcagcactcgtagtgtgcttcaggagtccaaagtctctttaaagactcaaggtaatcttgtaactgtgacaccctgcaaaacaaagtatgattatatacttccaacatacagcaacagagagcaaacatgtgccctctttggcagcatgcatagcatcttcatatattatattagctagttctcaaggaggaggtttccagatcagttccagtgtctgacatatcttcagcaagtagggttttgctttcatgttctaggaggtaaccaagggcaatgacaatctattgtctcactaatctcttggactcaccctgaccaccagatcaaaaggaggtttttcccatgggaagttctttctttctttctttctttctttctttctttctttctttctttctttctttctttctttctttctttcttccttccttccttccttccttccttccttccttccttcctctctctctctctctccctctctctctctctctccctccctccctccctctctctctctctctctttaaaagaattatttatttattttatgtatatgagtacactgtagctgtcttcagacataccagaagagggcatcagatcccattacagatggttgtgagccaccatgtgtctgggaattgaactcaggacctctagaagagctgtcagtgctctcaactgctgagccatctctccatctcaagcactgggggttttgttagtctatggctcttataggaagcactatcatctagtggtgcctgtcttgattttgtttgctcatttgttattggttctttaggaattttgtgcactgcattttgataatgtacatcctctcccctgactcctcctagattcatgtcagcttccctgcccacctgtttggtgtcttccctccatctttgcctgtcaagtgtagcttatgctgcccatatgcttttggatgtgtgatctttactagaggatagtatacttacaagaggctgcacccataaagaaaatggactctccctccctctgccaatagcttcttagcggggactgtgactttgtgtccatctctccccgtcccccacacactggcattttgcacggcctgagactgtacaggtcttatgcatggtgtctcaactgctgtgatatgtgcctttctgtatccagagaacagtttctttgtagtcatccacttcttatgactcttagagtctttctatccccttatctgacatgatccctgaaccttggagggatgggatgtgatatatatgctccatttagcattccacaacctcttattctctgttccttaatcagttgtgggtctgtgttaaccacctctactgcagaacaatgtttcactgatgggggttgattgatgcgctaagctggggccacatgtctcaccatttttattttttaatgtctacttatttacctttatcttaagcataagcacccctctaattaatagcaatttatagggctatacatattgtgccagtatttgaatttatattctatctagtaataatgcttcaggaaagagtacactaattggcactgaatatatatagattagatagatatagatatagatatagatatagatatagatatagatatagatatagatatagatatagatatagatatagatatagatatatgacctgcacagtctcaggccatacaaaatgccagtgtgtgggggggacagggagagatgaacacaaagtcacagtcccagctaagaagctattggcagagggagggagagtccattttctttatgggtgcagcctcttgtaagtatactatcctctagtaaagatcacacatccaaaagcatatataatataatgtatatgatatatatacacatgtatatttattaatatatatgtatatttattaatggaaaagaggccattaatttgaagtagggaaagatggaacattcgggaaggattggaggcaggaaagggaagggggaaatgatgtaattatattaatctctccatagtataaaaaaaccaaaaaccccaaactcaaacaaaacagaacactaagtttatcctctaaaattacatgtttaaaactagtttcagttttacttactgtttattttcaatgtttattttagcaggtgaagtgctagatgacccaatccagaagaaagaaataactaaggtatagaagagatacatttcatttttttgtttcagttttaaatggtatatgattttaaagtatacactttcttaaaggctatccactatgaggcatgtaaaaaaaaagaaataaatttacatggttcaaaatttcttctaatcaaggtttaacacagtttccaaatctttagacttgtgcatggactcatcttcctgttcaagtggctggaagaatgcaggtctcatgtcagagtctctacactgacaggaaatatgactgaagacaacattgtgaatgctgtgatctttgctacctgctgattcccaactcttgtgacacttatgctttgctcagtgtgctcctgaactgcagccatgtggacataggacctaccctgattcacatggaaggcgacactaaaggcttgggcccagagagccaaggatttgcaattggaaatacaccccacccccaagcaagccaaggcacataaaacataccccacccccaagcaagccaaggcatgtgattgccacgtcaggtcagaaatccgtcacctcctcaagaagcagtacaggccacattgtcatctatgtgcctaccagaggctgactctttgagctggttgagctgaaagtctaccctattggtcatgagccctgggttaggggagggttgacggtggggtagacagataaagcctgataggtcaacatgaagagtgtggtccttgctactgcatgtgctgcccaactacaggattaaatatgatgttaggctctgtgtattacggaaggggaaggacaaacagccctggagaccctgcagctgatttgagtaacagccagagctgattcagagtgacaagagtcacaagacacaagtccttgaagagagcaaaccacaccgaggcaaggccccttggtgctggaggcaggcagcttgagggcacccatgataaggaggtatctgattcatgctcacaagctcaagctcacagttctcccaggaacccagtgttgcctctgggaagcagcttcagtggatttgcctcatcattggttggcttaacacgcagcagaagcccaactgacagaaacactcttggctctacaaggctgagcaccagtgaaggctgctggctctctacagcctgctcttattgcaagtccctaaccagggctcctccctgtcccacttctcttttcccctgttactgaatagttcacccagagcccaggtcctgggatttggaattagctccatgtcctacattaggctctggggcctggaagggcaagttagccccacaatgtaggatacagccttgctgcctgggtagcaggattttacctattggagatgtctacttggtgggcaccaacccatcttgccattgtacctacatggctggcttcctgattctgccttctctcctagcagctgtcatcctggtgaggctaggtctctgtaccacaccagggtcccagcttggaaactcagaaggcactgggctctggtgctctagccatggtcaactgccttcacctcttgtgaagaaaccctgcctattctttgttcctcttgggatagagataaactcagggatctggctgctatgctggaatggcaacagggtgtctcagtaagaacaggatgacaggctgccagggtctcacagacatagtggagagaaatgtttggagtgtcccactggcatgcagaccatcccagttcacccaagcttattgaatgctgttgctacaagattccaaagagctctggacctttttgccatcagtgttgggtcaagacactagttaagtctcctgtgtgccaagggggtggtgaatgaagtcaatattgcttcaagctccagccccaagcatatattctttttaaacttctgttagatggctttgtaggtgatttaagctatatagtgatgatgtggcatctgcctcctggcagagcctagcttaagccctgtagctcctgtaaatactagatcagtgaataaataaaagcgttctaaggcagaaaggaatgtgctgcccaaaacatcatttcttcatcctgaaaaaggacagattgaaacttttgatgaaaacaagagtacatgataataagcattccccccccccccccacataaagtaaggatggaatgcaaggggattctggacatggcagggatgtgtccaggtagttgtactttagtgtctctatgtgatgcccatggattcagaccttggagccaaagaaaaggaagcccagccacagtgtgaagctagatggttaactgaacaaatactgctcgtatgatttcatctttggaggggatacttaattttagttacaaagtcaaaggtccatgttatcagccctggatataggaatagagtggaaaagcagagagccaaagcaattgcatggttgtcgggtccttataaactgagaagttgagagatagtctgccgtgaagagacaaggacatttcattacttattagactgtcataaagtttctaaacttgaggtttaaatgtctgaaagatagggcatgaccacatgaaatcaacaaaaagccaaaaagtggagatcaggttggagttattaaatggaaagaagtacacagcgaatgtgctgtgtggcactattcctaaggatatgagaacagaggcctccttaggtcagaatggggaaccaacgacagaccaaatgataccaccaaattctatcttggttagccaatgagtttaattggggttccttaaagcaaaatggatgagggatttacaaggagcagagtagctcagagagctgcaacaccagagtccatcttaatgtggcaaccacccacgatagctggaaatgtgcacatcctacacgaagatcagtaggttggggagtgtcctttctaggtagctctgttggtctgagccttcccagggagcttggttgatctctacttcttccaggaggtgtttctggtctgagagtctcctttaggggttacaaatgtccttactgcttgtatacctgtggaggaaggagtctgttgaatctggttggcttcagggacttcctgaagctattctaagttgtttactcactgaattttaggatcttccttgcaggataaaatgtttcaccccacctccacctttaacatctttaataaacttcccttaaagatggaaggctgtactctgctactcaagagcatgtcaatgtctactagaaaaatttttagttttaaaacaattcagatgaattactgattgcagatttttttttaaaaaaattaagacagataatggcaacccatgaaacatgcaaaggttaaaaaaatggaaaagacaactgattatttttggaaaaagtttgttttggtggtgttgttctcttgtaggaaaaggaggctacggacttctcaagcaagtcgaaatcagaaaaaacactgcatttctttgaccagagtctaatggaatccattgagctgggggaccccaaagtccatgaattccttcgcttactcgcactctgccatactgtaatgtcagaagagaacagtgcaggtaggtgcttgaatagtgagcctttgaaaaaatgtagcaaagataagtattagtatgcaaattgagagatttctgaattaaaggtagattagactattccaagcaaggttttattttctccagatttctgtttgttttttattctgaatgcttttcagaaacaagaaaatttatttttatttgttttatttatgtgtatgagtatcttagctgcatgtatgtctgtataccatttgtagtgcccatgggtgagggcctctgatcacctggaactggagtcatagacatttgtgtgttgctctgtggatgctgggaattgaacctgggtcctctgaaagaacaaccagcattcttaattgccaagccatcactggagaccccataaaaatagtaaagaaagagagacagtaccagtggaaagctaaagatccaaatatgtccttcagctgggatgaaatgcctcttaggattgagcaccacacttgactgtgaaattctagcatccagaactcatagggaggtgcagttcacatagcacatgtccatggatggagctgaccatacagtggggataaatctacataaaacaccgtagtcatcatgccgatcggagccttttacatgctacatggttatttggagctcagggtttataaaatacagcaaacccagctggcttactttacctttgatcctgggaggccactgatgataccagagagtcagcttcttccttcaaagtctaacggttttacctgtgttgtttcattttgctaccaaatattaagttaaaattactacccaaggaagtaatgagtgctgaattaacccattctttagattttaattgctttcaagattcacataattatatttatggctttaattgatctttataatattaacaccacaaggaatccttgtattcccttctgggaattgccttaaggaagtttctttcatttctgccttttgagtttatttcatttcccaaaccctatttcattttaatagcactccctgttttccattaatgttaggatattctttagatctctttgaggatattaattatacttaatttgaaatttgcttttgtttcatccagtaagctgcattttattgagtgttctctctttttcgctctcctctgtgtctctgcctctgtgtatctgttgtctctgtctgtctgtctttctctctccctctctgtctgtaggtctttccccttccagctttccctccctctctcccttccccatttccccttctccttttgcatctaactttcatgttgttcttaaatgtttggtgatttatggttgtctgttcctctttgcgtgagaggctttctgcttggtgaacgtcatttattaccatcgtctgttgctcaagttcatctggataaggccgatcatgtaactggtcttccggttgtggggtcctctgttctggtcaccaaggttaccatctgccagggcttttctgagaggcagaattgcatacaaattccttgtcttttccccccacacccctgactctgtggaagtctgacactactgcacccattcacctgtggtctctggtccctttcctgatgtggcctgaacacagatagtattgcttccgcctgtcattcggagtaggctggctggagacggagcacagtggcacaggagtgccaagtgaaatttttcagtgaggttactagtgaggtctcccaagatgctgttctcatgagttcactgagtttggagactctatggtgctttgccttgcctctgctttcatgttcttctgcagatgtttctctctctctttgtttctttattgatcagactctcattttatctttcagagagttctcagatttgtagattcatttttcaattctaacatgttcaaaatttacattgtgctgtgattcagtgcatcaaagtatgtgcatgcacaacatatacacacttatacacatggtagcttggtaagattcgacacttacaaatatccctagagacactgcttggatcaaggcataaagctcttccatcagtgcagaggttactcctgccctttttattcagttcctgtaaactctagcccacccaaccactgctaaggctgccatcactaaagatgagtttgtcttcttgtcctccgtttaagcagaattgtccagtatacactccgggttatgttctggtatcatgccagtatctctgttgttagtttctttttctttttttattaagcaccattaccctgtatgaacacaccacacccatttccagttctctgttaatgacattaaattgttctagcttttggttgtcacaagggactttttatgtcttttcaaaattctttgtttaaaaacattgggagcaggatgactaaacacttaagagtggaaattgccagctcatcatggaaggaaggatatgtttaaacttctaagaaactgttcaactgctctcaaaaacattcaggtatcattttatatccctgctgtgtgtgcatgagagttcagtcacctgccttcccacccaacattgcctgtggctgctcttacattttagccattcttaatgctggctaatgcttcttgccaccaaaaaggatttctggagagaaaggagttagatatttgaatgatttcaaccttttctatctctgtctcaagacactaaattccactgtcaggtttcttcttaaggaagtgagagcttgctttcctttcaaagcttttgttgtgggatattttgcccaagctcacgtgaatttgtacatgctaaagaacaccaaataaataaataaataaataaataaataaataaataaataaataaataaacccttctgtagaaatgtcatgtatggagaagatgagaatacaaatccaacactaaaagtttaatagttaaaattcagcttatggtggaggatattgctgcaagcttgtggcatttggctcatggggaagtggcttggagacactgtggttttcatctgtgccagagtaaagtttcagaacaagagagagggaaatccaagactttaggaagattttttttcttttctttactttcttagtaaatgacaataaaatatgttttaaattttaaaactctttttttttgccttattgtaccaatttggaaatttgttgaagcttgataatagcttggtatatgattcattttaataaacatttaataaatactagaaatgagtgcatattctataatttggggatactgtattctaaccatatacatttaacaattacattcaacaatttttaaattatattactcaaacttctattcgtttgttttttttgtttgttgtttatttagtgagagactgcttttctatagcccaggcaacctttgggcttcagccttctcagtgttttcttaaatgtattatttagataacttgatttctcagctaattaaaatatggcaagagcctctaatagaacagcacacttgtatgttgatatttgtagttctaccaaagcttgctttataaggctatatttgataatacttcagactgtcttcattagatcacagcctgtatcagcatcccttgtcatttttgttttagaattcactgtgattgtttgctctacttcctaggtgtttataccttagcttttgttagttttcatttatctcttcacttacatttggacacatctctggtaatcatatgctttaacataaaaaaccaaaaccaaaccaaacaaacaaacaaaaaacccccaaaaaacagcgtagacaaagctaaggccaaagagaacaatcgatctgttctcctttgtcatcactacacttaaatacttaaagctcagctgttaataacatctggagtccttttcaactatcttattttgtcttctctttgtcctacctttcctttcttagactcttctttcttttatttgtcctttcataggttgagcccctttgattcctgctactttgaaaacaatgaacctttattattttagcagttaacgttgggactttaacctaaactcatgaaagtctaaggcttcttttgagtaaaacaaagatcctttaatagcatcactgctgccctggcacatgcaccattttcaccatgcttttcattcttttaaaacctcacaggcgctaggtttataactgtgtttgatgtttgtgtgattcgctcatttgtatctgctttatgttccttaacatttgtttcttcttttatctgtaaatgatgtctgtctgtctgtctatctatctatctatctatctatctatctatctatctatctatctatctatctatccatccatccaaccaaccatctattgatctgtaaatgtctatctcctagtggtaaattcatagcttccccattgctggtagaaccatgagagactctgaagtaactatgttattactgctccttttctttttttcatttttgagacagagtcttgctatattcccctgattgctggtgttcactaagtaacacaagctgacctcaaattcacagaaatcttcctgcctttgccttttacctgattcagtcttccacttataaatgtatactcaagaatgtatgcagggaagtaaggttttctttttcacaaggaacccatagcacacccacagtttacccactaatagaaaaaacaattatataacaatttatctttgaacactataaatggaaagtattgattgatctattaatgcctacctcttctgatttatttttcaaacattatataattttatgtaagtgtggttacatttatttttaaggcatttttaagtctttcttcatatttcattctttccctctcctcttagctccactccagcacacacactattaagcaacaagtctttaacatcttgtttgatcctttacattttggtagaattttatatattcagtctcataaaagatcattagtgacttagcaaaggaaaggtcagactgtgtgcttccccactccttgttgtttgatctctttctaatgatcatttcccctctttcagccatgggtcccaccagtataaaaatgagaataagaacttaagtaatcatcacttctaaaggtttaccttgagcttcctgtgagaatcatgtgaggatcatattacaatgttttagttagaacctctagtcactgaaagtgaagacctacggtctaccagctaagaaacttttatcacagtggagagacagactcacagttggacagtgagtccaatagcaaagtgtttagagttgatgctggagttatttattaaagaatgcattcggattagcactggaaatacgaacatgaattattaccctcagcacagaatgtgtttgtctctttcccttttaggacaactggtttaccaagttcaatcgcctgatgaaggagctctagttactgctgctagaaattttgggttcatttttaagtctcgaactccagagacaattacaatagaagaattgggaacaccggtgacttatcagttacttgcctttttggatttcaacaacatccggaaaaggatgtctgtcataggtatgttggctagctgcaatgatgatgattattattattattgatcttctgatgcttctgtagttatgctgatgctttttactgatttgattcttagctatgtgctacatttttggtatctttatgaacccctgtgatcctcaacttagtctcaaaagtatagtgatctgtgaataaaactcaataagagcttcttacatgcccaacattattctgaattctctatccgaagtaacagtagcacatgctattatttttatgcacattttatagataataaaaccaagatactgaaaagtgcagtgacgtacctgagtccaaaagctggtgacaccgtggggagtaaaacctagaagtgtgaccggagagcttaattctggctcagaagagtttctgaactgtgtagttttgctggttgttgtgggcattgttggtggttctcatgtcattcattatttctgtttatccccattgctggagatgatagcttattaagtaccacactacatccatgcttttataactcagtgttaacctttagtactgtttcagtgttgtcagatgagtcacatgccccctttccaatcctcttacatctctaagcaggcttttttctttttatctttaaaaattatctttttcttagttctttgagaattttatataatgtgttttgattatatttacttcctccccaatctccacttagatcaacctcctccttccctactcacccaactctgcatcctgtttctttctttaacctatcaagtccaatttatgctgatcatatattcttggatatgtggccttccactggagtgtggtcaactttccaggggctacttaaagaaaaacagactcttccacttctagaagctgtcaatttcaaatagttccttggctagggaacttcatgtccaccctcttcccactctgtgctgggatttggtctgccttgagcttgcacaggttttctgtatgctgtctcaactgctgtgagttcatatgtgcagctgccctgctgtgttcagaagatacagtttccatgtagtcacccactgtctttggctcttagactctttctgcttcctcttccatagtcatccctgagctttgggatgagggatatgctataggtgtctcatttagggttgaacatcctacaatctctcattctctgcatctcgaccagtgtgggtctccatgctaatcaccatctactgaaaaatagaagcatctctggtgagggttctggcaccagtgtatcaccctcacttatgacacaagaaactaaactaaaagattttatgtcatttgttggagagtatggcaaagcacacgagttttacacagctactcagctgcaatgaaaataactaaatctggggttgcctttcttaaggttggctatgaccttagacataactcaatggtaaagtactttcctgggatgtgcaaggctctgggttcaacctccagcagtgaaaagtcaaaacaactactcctaagataaaggtggcctcttaatttcttggtagttcacttgtttttgactcttccatatttttgatgtactaggaaaatggttcccagcttttagcccccattagaataagctgaaaaacgatttacagatcacttggctttgggaactggtttgtgaattagttcattggaggtaggatctccagctttgcatttctgataagttttaagtgatgcttatggtactccataggggaccacagatggagaaatattgctctaggataacacttcctcattgttagtcattttccattggaatatttgagatgtttctcaagcctgtatcagtttttgttattctccaaattcagagtttctctagaattctgtcaatgtttttctaaattttcctttccaaatgcatcctagaattatctgcaaatctagtgtttactaaaccacatttttttctgtatacaattctactgtcctttcctcttagttaccattaccattgtctcagttggggatcttgtcactacttacttgaattattgcaatgtcttctaaattgcttccattaaagtaatactccatgctggcaatatgctactctttctaaggcatagactgatcatgtcactacttaaaaaaatgtttgcttcccagaattcccagggcaatgcttctttgtataggcaatgtatatgattctcaaggtcacacgcaaagtgacaccaacctatttttctctactttctaaactttgtgctcaagcatcatcacagctcacaagtcttgggatgcattgtattccgttatccccgggtatttgttgtttttaaatgtatacctacaacaattcttttccctaattcccttttgctgaaaattccttctcatcaggtaatgtacaatttaaatgttgtttgtttttcttctttaccaagtaacaacatcttatagtattctccagaatgctttgttcaccatagcagtgggattctgactcctgggactcatggttatctcagctcataggctgggtgctacttcaggtcagggagccttatctttagactctctagggccaagtacccaacaggcacatgatatttacagatattcataaaatgaaattctacctaatattctgtaacttatgaacatcttggctattgcattaagtgaactcctactatggaatatctatatctatatctatatctatatctatatctatatctatatctatatctatatctatatctatatctatatctatatctatatctatatctatactatctatctatctatctatatctatatatatatatatatatatccataatggtagtgttcggagtctttactgaaatgtagtatggagagattgttctgaggctactcattttaatttttttttaatgataacagctgcaggcagctcccatcagctaagaagcatgcaggcagctccaggtgttggctcattgttgcgtcagcaggagctatcctctctttacaaccccaggagaggtgtgaatggtcctcatctggctcagagtggattttattttgctctaagggtgttgacaaaaacctaagattgttctgtggggagaagtttggctcttgctcagcatcggtcaccattacgggctgtggggaattttcagcttaaccgcagacatcagatgtctgccgtaatgggtcccatatgaagaagggtaatgtttagcacagagtggggctcccaggctttattttggctgcttgggttttaatcatttaatcttggaactcaagagggactctgctagtttgagtctaggcaggaaacattcccagcctctggattgtcacgtggctttttctatggggacaatacctctatgagggtctgtcactgctgatgtctcttcctcagtctctatctttgtcaggatttcttttttctttttttcttttctttttttcaagacagggtttctctgtatagccctggctgtcctggaactcactttgtagaccaggctggccttgaactcagaaatccacctgcctctgcctcccaagtgctaggattaaaggcatgtgccaccactgcctggcaacaggtttactctataagtgtcaggatttctattcctgcacaaaaacatcatgaccaagaagcaagttggggaggaaagggtttgttcagcttacccatccacattggtgttcatcaccaaaggaagtcaggactggaattcacacagggcaggaacctggaggcaggagctgatgcagaggccatggagggatgttgcttactggattgcttaccctggcttgatcagcttgctttcttatagaacccaggaccaccagcccagaaatggcatcactcacaatgggccagcccccttcggtcagtaattgagaaaatgacttacagctgggtctcatagaggcatttccacaatggaggctcctttctctgtgctaactccagcctgtatcaagttgacacacaaaaccaatcagtacagtctcccattgttgtttcttccttcttcctcctcctccttttcttctcctcccccccctcctccttctcctcttcctccttctcctcctccaccacctcctcctccaccacctcctcctcttttttctttttcattttctaccttattggttgtttttgatgtgtcattcatcaagttattaatgtatgatttcaatactagcatgtttagattttatttgtggaccagagcccctatttaaatcagtattgtttaaataaaagttaatttttatagtagtttgttaaaagttatagactctactaattaacaaacatatgaatttcattatatcattatggaaaagtccattgcactaatttgcatataaaggtcagtaattcagtacataaacaatgannnnnnnnnnnnnnnnnnnnccatttccagttctctgttaatgacattaagttgttctagcttttggttgtcacaaggactttttatgtcttttcaaaattctttgtttaaaaacattgggagcaggatgactaaacacttaagagtggaaattgccagctcatcatggaaggaaggatatgtttaaacttctaagaaactgttcaactgctctcaaaaacattcaggtatcattttatatccctgctgtgcgtgcatgagagttcagtcacctgccttcccacccaacattgcctgtggctgctcttacattttagccattcttactgctggctaatgcttcttgccaccaaaaaggatttctggagagaaaggagttagatatttgaatgatttcaaccttttctaactcttgtctcaagacactaaattccactgtcaggtttcttcttaaggaaatgagagcttgctttcctttcaaaacttttgttgtgggatattttgcccaagctcacgtgaatttgtacatgctaaagaacaccaaaaaaaaaaaaaactttctgtagaaatgtcacgtatggagaagatgagaattcaaatccaacactaaaagtttaatagttaaaattcagcttatggaggaggatattgctgcaagcttgtggcatttggctcatggggaagtggcttggagacactgtggtttccgtctgtgccagagtaaagtttcagaacaagagagagggaaatccaagactttaggaagatttttttcttttatttactttcttagtaaatgacaataaaatatgttttaaattttaaaactcttttttttgccttattgtaccaatttggaaattttttgaagcttgatgatagcttggtatatgcttcattttaataaacatttaataaatactagaaatgagtgtatattctataatttggggatactgtattctaaacatatacatttaacaattacattcaacaatttttaaattatattactcaaacttctattcgtttgtttctttgtttgttgtttatttagtgagagactgctattctatannnnnnnnnnnnnnnnnnnnttttgatgtgtcattcatcaagttattaatgtatgatttcaatactagcatgtttagattttatttgtggaccagagcccctatttaaatcagtattgtttaaataaaagttaatttttatagtagtttgttaaaagttatagactctactaattaacaaacatatgaatttcattatatcattatggaaaagtccattgcactaatttgcatataaaggtcagtaattcagtacataaacaatgacaacaaagtattgaatagaggcagatgacagataaccactaaagcataaattgtagcagccttcaaaatctgatgtaagataaagaatgtttaattgtaaatttctaggtgtggtgcttatcacaattccagcacatgggaggtctaagggtagcctgggctgtacagtgagaccctatcatctccctacctatctagccaaagaccctgaatgttttggccttggcaaaccttatgtccatttccagatgggctagttttcacagttttcaatgatttaatatactttcccaaactctgctactttttagttcgaaacccagaaggacgtataaaactttattccaaaggggcagatactattttgtttgaaaagctccatccttccaatgaagacctgcagtccttaacatcagaccatctcagcgtaagtgcctctcgtcagttcagcacgagaacccttctacatcccaatggttagaacttgctaacaaataacagcaaaggggttgacttctgaagtggaaatccactggggaagccattccacagagggcagtccgtgatggctgatggtctgggaacaggccagcaatcagagttttagtacaggcaggttatcacatcggagaagctacatggtggtggtggtggtggggctcaggacccttcaaggtgcttatttcatggctgagtttcgatggtgaaggaaggaaaaatggtctctggacccaactttccctttaagacttatgtgagtccctcatgtgctctagatgctcaacccacacattctaagacttgtctaatttttctcagtaactttctggagggaattcctttgttctctcaagggcaagggactgtgaaataataggttcatgttgggtttgaacctggtatcttagtgtcatattaataatttatttgaggttctggttgcagggaatggttcaaaattctttgtttgatgttgttttcattataaaatgtcccctcaagtcctctaaaaacataaaatgtaaatgctctgctgactttaagtttaaaagtgatgctttagtaataattgttacaaactgctatttttcattttaatagagcattcttgatttttctcttaatgttttccagagactaaaatggccttttaggttttttattattaaaacaatattggagtaataactatatgatttttgtcattgctcaaatgccaaggcactagagctcccttttatattaaagtttaatttggtagtttcttttgggggaggggtgggagaagaattgtttttaggacagatcaatgggacctgctcttttctacatcatattcctttggcttctacattctacacgtttagatttgtatttaattattgattttggatagttttatgatagggaaaggcctgttcaaatgaccattctggattgtgtgtttcacgactaattagatgacttaagtcatctgtccccttttccagtatcctcttagagttgattctccattgtgcagaacagagagggcatcagtggcagtgcccagtggggtttcatcttaaaggcaaagacatgtttgtgtgacttgagaagaaaaaatgggttaaaggcagtaactagatttccagaccagaaggagatgctgtggtcttagaagagggggcttgtaaatgtgaatgcagtggcagaactactgccaactgtctggagatgaactcagttaatgttccctgcggtcttcgtgggttaaaacacatctttgtacgatgcactgccttttctttttactaactggggtgcttcatgatttcgcacatgtctaatcacaaacctgtatctgcaccatacatcagaacaatagagaaaccattcttaatgaccagcagtgctgaaaggagcagagattgctattaaaatgctttacttgtagtgtggtggcagaagtgacatgtgaggttttcaacattacccccaaactcaatctacttgtttcgagctaatgtcactgtgtgagacacataacagccactaataccctaatcatcacccctcttagaaggataccataagtatcatatgagattgtccacttaccaagtgttctagtttccttagcatatatttctgggtcacagtccatcactggagataacagggcaggaattcaaggcaagaacctcaaccactgcttgttggacccctccctggctcgctcaatcacaggctcatactttcttacatagcccagaactacctgtctaggaatggtcctgcccacggtgggcaggaccctcctgcatcagttaataatcaagacaacctcctatagatacatctaaaggccagttttattcaagtaattctccagctgagtatttcctctcagctaagtctaggctgtgcaagttgacaatttatgctaagttaggaaaagtgtggcctcctaatatttgattacttatttaaaaactagctccataaagtataatttctaataaataatgaatgcttgagctggtttgatttgatgatggtgtcttcaagatttcaaacaacatttcactatttaaagatgaaactttaatatgattaagaaagaaaaacatttcacagaagagtcttagagttaaaaccaaagtcagccctgaaagctcacacctgtagtacctaatactcccatcttttccctttcctttaaaggtgattatcataaccacaaggagcaggccaaacttacccaactatttagcatctacttattcatcagttattacttttagcttctattgtagaagttttcaagtgtatgcaaaagttggattcattgacttttcagcaaggatgcatacctattggggtggttgtgaaaaggcttggagagaaagcctgctctagtctacaaaagaatttcctctttttgcctggtgagctgtgactcctccaaggacctgtcttcatcattgagacaggaacacctcctacaagcagaaaacacttgcttccaactgtacagatacagttgctttcaataccacttctctcttcccaattaggacacttcagcaggcatttttggctgcttttagggggaaagctggtgttctgcaggtcaaacctcatcgacttaacataaatcacaactattctttcccatgtctgaggaggtacagagttagagccatgacagctatgtaatactcttgggaagaaatgtgtgaacaaaacggtcactgtgttatggggactttcattgtgcttattgttgtctacctgtccctaagattatatcttctctcacaggaatttgcaggggaaggcctccgaaccttggcaattgcttatcgagagcttgatgacaagtactttaaaatgtggcagaagatgcttgaagatgcaaattctgccaccttggaaagggatgaacggatatctgggctgtatgaagaaatcgagagggatttgatggtataagtttggaagtgtgatgctctatgcttacttaagttgtttgctaaatcatcttacacatagcacatggttctctttcaatggtgggccatgctttgtgtgctgggtttcagcctactatgtgtggccccagtggccagtggaacggactggctttgctagcagtaacttaagcgatggaagtcttcccaaagtaaaggattgtagactctttatttaccaacccccagtttatctttgatacaacatactcatctcctctctctgctttctgatgcacatttttagagcagaagcagttgacaaagagagcagaactatggctgtgaatgattccggatcaggagactctgatgatgactcagagtggggtctgttttagaaaccattcttgtcagtgaccaatgactttggtagctgagagtagcaggaagcaggtcttgtcattagggtgaaaactgaacttctatttctattctccactttgtattagagcaccttatgtttgtttgctgagacagggtttctttgtgcaacggctttggttgtcctggaacgcactctgtagaccaggctggtcttgaactcatagagatttgcctgcctttgcttaccaagtgctggaattaaaggcatgcaccaccactgactggctacctgctggccttttacttcatagaatggcaccaccttttgcccctcagttttttgactacaagttgagagctttcctttggacctctcctttgctgctgaaagtgaagaagcagccagggacttcttaaattattagaggagtagcgtcagcccatttatgcaaacatgtcatctgactataccatctcctgtatgtgaagaatacctccctgggcctctgttattaagtaggcttgacttaggaatttccttccaggtgcctacaagattgattaatttatgtatacaatagggtatttactacatcagcattttatgtgtcatcatcatctcctgttccttgacctttaaactctgactgaaactacagatgttacacgtgttccttgcatgtattaatgtaagttattctttactctccaatgaagctattaggtgccaccgctgtcgaagataaattacaagaaggtgttattgaaacaattacaagtctctcactagccaatattaagatctggattctaacaggagacaaacaaggtaatttggaaataggtaatggtgatgtttgaagagggggagttaattctttggaaaaaaaagttaatcaaaaacttaaagcagttcatcatttttctagtcctctatttaagaaaagtaaaatctttaaaaaaaagctttaaaaacatatgaacttattatttaaaaactaatcagaatttaaagtaaaaagtaatgaaaataataaataaaatatgtaaataaaaatgcaaaaaacccttcaaactaacaaaaataccttgcatagtatattctctggtcagcagagtttctgtacggtagccacccctagagagaaaaacactctgtgtggttttcgtgttagcattgtcctattgagctgtagcaagggtctggaggtctcgtgttcgccttcagtagggagctgcaggagatcgagatctcagagtgtcgagtgagctccccaggctaagtgcaccagctgctttgctgtgccttgtggacacattactatgtttgaacgactatcatagccggaccagtgcacctggctaaactccaggattgcctgtgagaactgaaccacttttaggaatgaccagacactaagaaagaaaaaaatagtttaataagtctttaatctgttgctcataatgaaagtttaaaatttgatgctgagtcattaggaaacagaaaatattcagctaaccagcatgcactttaaagactatattcactttgttaggtgccctatacagcatttagacgtttgcaaatgtgataaatcaattttctatgtaactatatatatatatatatatatatatatatatatatatacatatatgtacagataatgggaatatacgtatgtgtgtatatatacatatatatgtgcatacacacacacacacacacacacatgagtatattcccattatctgtctgtctgtctgcctgtctctttgtagttctattgatttaacctagggtctcacacatgccaagcaagcagtcttccactcagctgcatatcccatcctgccttaccttttgttttgagacaggcttcactaaattgcccaggctggcctcaaatcctccacagaggcaggccttgaactttggaccctgcctggtccaccaggcctacctaccacttctgtttattctacctaaattattaattacaaaattaaacagcagaaagttgaggcttgtggtacttaatggatacttattacatgagactaactgcagctgacatgtgttgtgggttcagctattcaattattgcaagtacctatgaatttactattatttatctgatttctttgctttgaaatctatactgagatttcattatttgtctgttttgatttaggacaagatgaacaatcctgtagaactaactagtgtttcatgattctatactgttagaatcaaatgactataaaattagagcagcccttgctgagtatggtatactcctccaggtctctgacagaacagtagctctgggtgggtcttcaactgatgattaaattccaatttttttctttttctgtttcttttaaagattttatgtatttattctatgtctatgagaactgtagctgtcttcagacacactagatgagggcattgggtcccattacagatggttgtgagccaccatctggttgctgggaattgaactcaggacctctggaagatcagtcagtgctcttaaccactgagctaactctacagccccctccaatttcattaagtgggaaaactatgaaaggtttcatgcatttgccttcaattattagtctatcatattaggtttgaatattagccaagtttagtattttggcgctctaatgaaattaattgaggtttctggtaaacggttggttttatattttctcttcattataccctaggaccttaggatatctaaatgagtattggtttgggaatctaaaggtagttttggaaaccaaatgagaccccatggattcatagatgtgcctattctccaagggttcagtgaatggcaaatttggttatgggtctcaggtcttgggcttctctcctggccaactgtatcatatgatgctttgtgtgttcactaacatccatggagctgataggctctgaggaaacacagccacagttccaaaactttatggaaaaggtaacactactagtaacagaggtaatctttctttgtgccagaaactgccatcaatatcggttatgcctgcaatgtgctgacagacgccatggatgctctatttgtgataacggggaacacggctggggaagtgcgagaagaactcaggtgcgtgttgaaggaaagggagtctgggaaggggcagggccgtgagacagttctcccattcctgtttcggagcacctccttaggcctcaatcacgttcctcaccaagggttgatattggcaacgaggcattgccttcgggcctccaacatttcccaggtgttctcagggaagaatctcaagtcatgtatgttgtgctttaaaatgttccttgacaaaaacctggaagatattaagtgacgatgagtggtgtcgtcacagaatgtacgctttaaaaacccgtttcctggctcccttccatctccgagtcaggtctctggggtatggagtactgggattaatgtttaataggcacatgcagtttgtgataagataactttcaaacactcagcttgtaggggatagcgtaggcggtcagaattgtgagcgcttatgagaggtggcatgcttggctgtttgtacagctgccatctactgccaaaaaaaacacaagagtgcttgttgccactggacattacatttggagaactaatagtcttactatctattcacttattatatttattttctgtaacttaatttgaaaaaaaaattaaaaatctaaataattattttcctctaaaattgaaaaaggttggcttgtaacagttttgcttgctgcttctacggcttctctgaccaaagcttggtgggcagggaaggaagtcttagttggcattgaacctattgatatctgtagatcgatgctgccactgtttcgaccttaccctgagcagaaaagaaaagggttctcacgtgctggtgagatgctctgacaggagaacatgtatgtcttcgtcaaataaaaaaatgggaaactgttttcagtattactgatatgtattttaattatttgtatagttttaagaaagatattatttttttattaacagaacactgaccatgtttttattggagttaatgatttccaggtaaattttgggtcagttttatgctagaattcatgggacctttggggaaatactaatactttgatacttaattaaaatattatttttaaagagaaattgtcatttatgttcatacatatacatgtgtgtatctataattcgggaatttctatacagtttataaaaccaataaatcaaaaggtttttttttctctctatttcctggtatagttaatttgtattttaattattaaaatttaaacaactttccccatcaacttatacaaataaacctgaaatttcaaaagtaatattctcaggcgtcatggctaggcactcaggctttacatgtctctgtttattttagggaaaatggatcatgagatcttttaaaaaaaccaacaatacaacttatggcacatgcattgaatttgtccagaggctaagagaaaacaaacaaacaaaactccacaaactcagagcagtggttaatggttgtttaccttctactcttggaagtataaaattgcaaacaggcaacaaaaacctcccaaagaagacattagcatcggtgtgaatatccagggatggaggcagcatcagtgtgaatgcccagggatgcaggcagtatcagtgtgaatgcccagggatgcaggcagtatcagtgtgaatgcccagggatggagacacataagtgtgaatgcccaggaatgcaggtagcatcagtgtgaatgcccagggatggaggcagcatcatcatgaatgcccagggatgcaggcagcatcagggtgaatgcccagggatggagacacatcagtgtggatatccagggatgagggcagtgggcagtgtcagctgtggctaagcacaggaccctgtttattttgtgttaggccatgtttaaagaatcaaatatttccttcaaagacatcatatttcactgaaggtggatctctccaaaaacaacttgaggaggaaagggtttacttcataatacacttccagaaaaaagtccatcagagggggaagtcagggcaggaactcaagggagaaatctgaaagcagggacctgtgaaggaaccagggaggaatgctgtttcctgccttgctccctggctccccctcagtgagatttcatacataggccagacccacagggaacgggccttcccacgttatcatcagcagagacactctctcacagacagggccaagggaaccgtttagacactcagttttagaggaactcctctccccccccccccacgcctctgctccttaagacaactttatctcatcttttgaggcttgaagaaactttatttttttttcctcttaaaatactcagtaaaattcccagttgatagggtgtagagtgatatgctgtacttttcaagagtctaacttggagttccaaaccaagaatttaactttttcattctgtgtctggctcccttcacaggcaaggcatgttctgggtaaagagatggccctatgagttcataggaagagctggagaaggagcagttgagcttatactccaagatttcatccagctacaactggctggctacatagatgtcatagctgtcattttatagaagaaatgtaggaaaatgtgtgttatttatggattattgttgggaccttccaatggccgaattctccaaaaggggaaactagcaatgtatttcaaatgtataaacgtgcatgctcttacccagacacctgatctaagaatttcttctaaggaaataaatgaacaaatgcatgaatatgtagctgaggaaatatttatcccttcattcggtataataattagaaatagctcatattagttaggaagaattttgttaaatactatgatattggcaagcaatgaaatacaaaatagtcaataaaagtgattttgccaatcatccatcctgaccaagtaggtttcattccagggacgcagggatggtttaatatacggaaatcaatcaacataatccagtatataagcaaactcaaagacaaaaaccacatgatcatctcgttagatgaggagaaagcatttgacaaaatccaacacccattcatgataaaaatcttggaaagatcaggaattcaaggcccatacctaaacatgataaaagcaatctacagcaaaccagtagccaacatcaaagtaaatggtgagaagctggaagcaatctcactaaaatcagggactagacaaggctgtccactttctccctacctattcaacattgtacttgaagtcctagccagagcaattagacaacaaaaggagataaaggggatacaaattggaaaggaagaagtcaaaatatcattttttgcagatgatatgatagtatatataaatgaccctaaaaattccaccagagaactcctaaacccgataaacagcttcagtgaagtagctggatataaaattaactcaaacaagtcaatggcctttctctacacataggataaacaggctgagagagaaattagggaaacaacacccttctcaatagtcacaaataatataaaataccttggcgtgactctaactaaggaagtgaaagatctgtatgattaagaactttaagtctctgaagaaagaaattaaagaagatctcagaagatggaaagatctcccatgctcatggatgggcaggatcaatataataaaaatggctatcttgccaaaagcaatctacagattcaatgcaatccccatcaaaattccaactcaattcttcaacgaattggaaagggcaatctgcaaattcatctggaataacaaaagacctaggatagcaaaaactctccttaaggataaaagaatctctgatggaatcaccatgcctgacctaaagctatactacagagcaatagtgataaaaactgcatggtactggtatagcgacagacaagtagaccaatggaatagaattgaagacccagaaatgaacccacacacctatggtcagctaaaaccatccagtggaaaaaagacagcattttcaacaaatagtgctggcacaactggcagttatcatgtagaagaatgcgaattgatccattcctatctccttgtactaaggtcaaatctaagtggatcaaggaactccacataaaaccagagactgtgaaacttatagaggagaaagtggggaaaagccttgaagatatgggcacaggggaaaaattcctgaatagaacatcaatggcttgtgctataagatcgagaactgacaaatgggacctcataaaattgcaaagcttctgtaaggcaaaagacaccatcaataagacaaaaaggccaccagcagtttgggaaaggatctttacctatcctaaatcagataggggactaatatccagtatatatataaagaactcaagaaggtggacttcagaaaatcaaataaccccattaaaaatggggctcagagctaaacagaattctcacccgaggaatactgaatggctgagaagcacctgaaaaaatgttcagcatccttaatcatcagggaaatgcaaatcaaaacaaccctgagattctacctcacaccagccagaatggctaagatcaaaaattcaggtgacagcagatgctggcaagggtgtggagaaagaggaacactcatccattgttgatggaattgcaagcttgtacaaccactctggaaatcagtctggcggttcctcagaaaattggacatagtactaccggaggatcccgcaatacctctcctgggcatatatccagaagatattccaaccggtaagaaggacacatgctccactatgttcatagcagccttatttataatagccagaagctggaaagaacccagatgcccctcaacagagaaatggattaaaaaaaaatgtggtatatttacacaatggagtactattcagcaattaaaaacaatgaatttatgaaattgttatgcaaatggatggacctggagggcatcatcctgagtgaggtaacccaatcacaaaagaactcacatgatttgtactcactgataagtgggcccagaaacttagaatacccaagatacaagatacaatttgcaaaacacatgaaactcaagaagaacgaaaacgaaagtgtggacactttgttccttcttagaattgggacaaaacacccatggaaaaagttacagagacaaagattgaagctgagatgaaaggatggaccatattaagactgccatatccggggatccatcccataatcagcctccaaacgctgacacctttgtacacactagcaagattttgctgaaaggatcctgatataacagtctcttgtgagactatgccagggtctagcaaacacagaagtggatgctcacagtcagctattggatggaacacaaggtccccaatggaggagctagagaaagtacccaaggatctaaagggatctgcaaccctataggtggaacaactttatgaactaaccagtacccccagaagcttgtgtctctagctgcataagtatcacaagatgacctagttggccatcagtggaaagagaggcccattagtcttgcaaactttatatgccccagtacaggggaaggccagggccaagtactgggagtgggggggtgggaggtggggggtaaggtttgggggagcatttcgggtagcattggaaatggaaatgaagaaaatacctaattaaaaaaaacaataaaaaagtgattttgctttattaactttagaagatgggtgacatatttagttaaaagtgagattataaaacatgcatagaatgatatgttttgccaatacactcacacacacacacacacacacacacacacacacacacacacacggcactatacatgcatcctcctaactacctttcaagccctgggaagtatatgccatggttctaagtaatggaaaggcaaccagcttcttcttttttttctctttccttacataattactgagtagtagtattcatgcaaatttttacaattgataaaaaaacaacaaaccctagctgggcagtggtggcgcacgcctttaatcccagcacttgggaggcagggcaggaggatttctgagttcgaggccagcctggtctacagagtgagttccaggtctacagatctacagagtgagtatacagagaaaccctgtctcgaaaaaaacaaaaacaaaaacaaaaaaccaaaaaaaccctcaaaacaccctaaaaacacgttttactttaatgagaagaaaactattcaaaggaaaataattacatctaggtgtagcatctcacacgccccggggttaccttgcttagctgactggctggccatgcttattctaactcagacttggaggttccatcatgttttgcatgtaccatggaaacaatgtatgatagaaaattctgcaggcagagtgaatacctttccagaatgaatatgcttcctatgaaactcgaggggaaagagctcctaaggggaaccattgtttggaggtccccgctacattcccagtcttggcgatttatatctaagcccacagccttggggattaaaatcataaatgtgtgccctttcatgttcttgtgctatgtttttgagttcatgcaaaaaaaatgtgttgaaagagaaggatctgagggaggagccattggatggacaatatgtacatgcttgtagttaatcctgtccaatgtgtttagatgtcgtcaacatcgatgagtaatgttcatgccacgcagcacgcacataacatagttgttagccatttttggacatgtggaaccctgattgagttggttcccattgatgctttagtgttggcagcatgcccacaggtttaagttaagccctatgttggccacaggcccacaggtctacagtcatccctgtgttagtctcatgcccacaggtctacaattaagtcctgccagtttctgaggttatttcatggattctgtcattttaacagagcatgtatcttctgctgcaaggaaaatagacaatgaggttttgatcagtcagacaagataacgcatccagtgtttcatttctgagccaccatgttttgttctcagaaaaattcattaaatgacccagctgcctccaagtacccacgcagagacactaggactctatagcccctctctaagcagtaaaatctttaatcactggtacctcttgtaaatggctcttggggcaggtactgaaaattagctgtgtgatgtaggctgtttataagatattggccagttaggagtcctttcgtggagcagaacataacactgactgtgatatcatagagtcattaatgacagtagcgaccaaataggtttgaatgctcaagttctgttatcccgagtaaactgttttagtaggtcaggtttcttctcataaattgtaacactctaaagcattacattttgacttctgatgtgcattttggtgcacacagttccctgttttcagggggttgatcgctctctgagccggtccccgatttctgatcgacgataaaggatcgacgtctttaacagtctgtggggcaatgaactggaagcttgaactaaaaagttcactcacttcctttcttcctcactctctgaagggcggtgctgtctccttcattactctctggtggcatatcttactccaacctagagatagcctgtggctggctgtatatgtaaagccatttgttttgataaccaagaactaggaatttggagtcctggatctgccccggactaatcaagtggcctaaagtcagatagctaatctgtcagaggcagacccaagtttccaaggaacaagcaagctcaaagctctggccttttaccaaagtccaaattattttcctttaaacataatgtcataatttaaatctatttcctaacagatctcttttacttcctgcatctagagtgccaggaaaggactgaggaaaatggctcatccctcgcaccccctctctcctttgcaggctgaatgcatggctgagcacagcgctccctccctccgctgtagtgtgttcagatggtatgggctgtgagtgctctagtcaactcaaccctgcctatggttctgcattacagcattgtactaaactgccctcattacaaagcctagaaggcagagcccttcttttcacatctgtttgtattctgaggtccagtagaatgtcggatgcccacacactgtccatcttcaccgaaaggtactatgtgtagctttcttccttcctgatgaattgcatttgcaagaaccagcttgtgtttggagagctgagttccaggaagtaagagaaaggacagctatgaacacccacccaggtcttacagtgcactcattccagtctggcagggagtgaaggccttggagggtggggggagcattagcaattttagcagagcataaaattgtcctttttctgcctggaaagggacttgtgtcacatgttagggagacattgttggggaaagctcctaaataagtagaatttcagccagtgtgttcatgaacttcaccctcccttggaatgttttcgttttgcaagggggaaatagaggttgagtcatttacacagcaaatgggagcctcaccaaacaggaaaccctgggagatgttttttttttgcttcagtgccttctcaaagcccagtttatgagatctgcagtgccgtcagagacacacattcatgtctggtatcatttctcccattcatcagatggcgctgccagttttcatgaccatgatgagcgttcattgggttgcttatctaccgaggacattggagccttctgcttgcaacagtaatcctctgtgcctgctctgtctccttccccacagtgcatttcaaacagccttctaaccttacacatccttttgtttgtttctgcaaactgcctgctaactgtctgatatcatccttggaaccaaggctgagtgacaagtctaagtgcaggcacgattttggtcccggacagcagagggcagtgttgagccaggaaacaaggtgacctgcctttgcttctgggtctgcttttgtagttcatacataaactcttggtgatgcatttttatatgcatcactgtatgttaaataactcaaaagctgaaggcataatgcttgttttaatatgaccattctctcccatcagaggatcttcagcataaactcattgtaataaatgctttccacactgggcaggacatcaagaagacagttcattttgccataagtcgaaacatctgctaacctattcttcactttctgttttcttctggaattcatctatacatgtagtggtatattcacatgcaggggctggcttgggcatccttctgcaggggacatctgccggtattcctatgatggaagctactgtggtcatgccaacagacctgttatttataacctggtcacccacaggtcttctgggtgggaatttaccttcctattaaagacattatcacattttttaggagaacagtagaatgccagttctaatgggcttatgtcatcatataagctactgattaggtctttagcattgcgaggaatttctatttgtaaaaaccccatgtttggagtttggagtttctcacaaggtcattgttatcatttaaacttatgaggattttatttttacttaaaatatttttcttttattttataataataaatggcatcatgaatctctttcaaagttaaacaaaatgtgtttataagtggactattgttttcagccaggttatataatgatgagcgcatgcgcgcgcgcgcacacacacacacacacacacacacacacacacacacacacacgtatgtacgtacgtcaggaagaaagggagagggaaaaatggagaaaaggaaagagagagggaaggaggggagtgctctgtaatgagaaggtttcattcatcgcctttagtttttgtttagcatattgaaaaacaccgtttttccagagagtggttctttatacaccaaagctatcaagattccttggttaaagccagtttttaggtagtgtaaaatgtttgaggtagttctgttttctctgtgtttagctgcctagttccttgtgctcccccagcccctgcaggattgacatgcactgctgtctggccttccctctgcttggtggcctaatacctgggccttacgctgaagagtggtagcatgagttcatttccaggccggcctcttggttcagttatagacaagctctgtgtgctttgttatgcctttttttaattctcttattctttaaggaaagcaaaggaaaatttgcttggacaaagcacgagtttttccaatggacatgcagtttatgacaacaagcagcggttggggttggacgcgggtgcaggagaggctgtgacaggagaatatgccttagtcataaatggccacagtttggtgagtttgcccgaggctgttcttctctttttctttactccagcaatcatctcttttgtgctgccttaatgagagtctcctttgtgtttttcaaacaaatgtcactacaagagatagggcgtgcacaggatttcctgtttgcagaaggaaagacttccagtgtgcctttcagacatcattgtttgaaggatcgcactggatgtgaggctctggagaaacagttcgcagggagtctatgagttctgcctaaacggttacttccgttgcttcgcagaacggtttaaacgcttttggaagacggtgggggatggcgcagatcagtttttcagttaccgttcttgcgaaggtttgtgatttgcgagtcataacctgaccttcacagaattaccacgccaaatcattgccattaagatacctctggtggtttttctaaatagcaacgttctgcagcaaagccaaacgatttgatttcattaggaaatctggctcttgtcataatagaataaacttgcattgtacttctaacgcagttcaggttccaagccccaaacaaaactcaaccgctcctcctgagtctctaattagaatacaaaagccccgactgcagtctcgtgaaattatcatttctatgtacaaagaacttaatctcacatctttctttggctttggtgctcatttttcactttggagtttggaaaaaatgaacgtttgttcttgaaggcagtttcttagtggacaaaagaagttggagctgagtctattagattcccccttgtgaccgtccgcctgttagctcctagctctctaagcactatccagctggatcccagacgcagcagagtgctgcttccacaccgtggaaagttacagagctcagctgcaggccaagctcagtcaaaaactggtccagatgacatgaacttttcccttgcacagatgaacaccaactgaaagttatgtctgtctgctgagatctggagttgagtggcctgggcagctcggtaggacaggatccctcctgtattatgcttttgacaggcccctgggcttgaggaagcagtgtttgtagggcatgggctttctggtgatagtcacctagcctgtcttttcctctgttgaaagaaggctctaagctggaagctcttcaggagccctgtttgcttcaaagccctgtgctcatgaaaccatgagatgtccttcttcagttagggagaattgtctgtatttttgctagtacagtcaggttttgtttgctttctttttaaatcatagctccagttctctcaaattctgaagcttttctgaatgtatccaggtctgtcttcatcaaaacccaagtctacgtttaacttgttgataataaagaaaaatgagcagaggcaaaaggggccattctgagcaaaagagccagttatatgccttgtctttcagaacatgtggtatatttgagaatgatggtccacagttttctgaggcatatagactttgatatagaatttttctgcaccagagtcacagctttggcctcatttacccacccattgcctcataccattttcattgtttacacagactggccaggtcacagtgctagagagtggccgagaactcagacatgattggagcatagtccttgtttgggagatcacagtatagttctgatagaagtatgacagatactgcaaaagaggcattaatgcaatgcctttagagcacagaaataggcacgtttaattatttgtttaaaaaataaacagaggagactttctggcagagcggatgttattgagtaaaaatgctagcaaatacaaagatataaaggcagtcttttaagtagcaatgcagcctgatgggaattataagaggacctaaaggtgctaccgaacagagcccctgaagatatgcgggccaaactggagtgggctgcgagtgtctcactaagggttcactctaaatagctgttactcaacagcagactcatgttttctctgaatgtgtctaacatagagtacaacgtgagatgtttctagaaatgtaattgtccaaaaaagttaattggagagaatcatgttctcttttcagtaattgctgagggtatagaaaggctcttggtatgtggaacaagggtaggaattggttggggaatcctgactgaggcccaagttgcctgtctccctcctattcaggctcctgatttcagccacagtgttttgctagggacagcctctgctcaggtccttttcatcttgcctatgcgttggcagtcacaaacactaagtctacaaaacagtgcaaaggacactagcagtgtgccatgtagaaatcaccatggttggcagttcatatcagcaggttctagctgttgcttctattgattttcagtagttcctagtagaactttatagtaatatatatatttttttagacagggtttctctgtatagccctggctatcctggaactcattttgtagaccaggctggccttgaactcagaaatctgcctgcctctgcctcccaagtgctcggattaaaggcgtgcgccaccactgcccagtacatagcaagatcttgccaagatggcatggtaacatatcaaggaggcacactgaggacatagctcttatttttatgttaaattcccttgaaacttgccaacagctcagtattcatgtcttgttactgattctgtaaccctgaattgatcaagtaatgaaatggttctgaaatgaagtcagtcaagaaccatgctatttgctttgtaatttacaatcgtcatgtgttctgtttgctttgatgacacaggcccatgcccttgaaagtgatgtcgagaacgatcttttggagctcgcctgtgtgtgtaagactgtggtttgctgcagagtcaccccactccagaaagcccaagtagtagagttggtaaaaaagcacagaaatgctgtgactttggccattggtgatggggccaacgatgtcagcatgattaaaagtaagagggtattttctcaatgagacatactgcacgcatggagtcctgcttcagcctgtgatgcaatgtaatagcaatgttcattcgtttaattttaccatggttcttataaaaattatactttctgggcagcacttacataactactagtacctctaaggcatttctcttcagttaaaacacctgcatatttcttagtttagaaaagggcattgcttgccttctacagtttgagagggagagaccactcagggcaggtaaaagcagccagcgcttcgttcctagcagctggggttggttccatctttgatatttacaagtgtaaagtgcaaatttccaacctttacccagcccagttttctcttagataaaactaggatcaatacttaaccatgtgactagttcaggatatatgtgaaaaaccataataattattatagttatacagttacaaaaaatggctaacataaaagaggaataagtttcttaaagatgctgcaactctttctcatcttcttttccctctaggtgcccacattggcattggcatcagtggtcaggaaggactgcaagcagtcttagccagtgactatgcattggctcagtttagatatctccaacgactgcttcttgttcatggaaggtggtcctactacaggatgtgcaagttcttatgctatttcttctacaagaactttgcgttcacccttgtgcacttctggtttgccttcttctgtggcttctcggcacaggtaagtaaagtgcacccttataattcctcccatgaatggctcccactctccagactgtcttactgataaagaaaagatacttctatgcctgatccaagacagtataaccattcggtgatttgagtgctgatgagctttgaatccaacccacataaaaatagctggaatttttcttatgtatagagtaactaattacagtatcttgcatatcttttagctttttatgaaatgtgttggtttgataacagataagccttatgaagaatttttaatatatatttgtattctttaaaaatctcacacagtcatagtacacccacctcatttgcaattccttccagatctgtttcctctccacctcccaaatttatgtcttaaaaccttatcacttgccaaatccaatttgtgctgcccataaacttgtggatgtagggccattcattggtacatggtcaacctaccggggctcacagacttaaagaaaactgagtttctctccacttgtcagtcatcaacctctaaaagctccttagccaagccgatgggtgggtcatgagcacctctcctgtataggctagagtggtgcctggcctgatctttgcaggcctcatgcaggcaaccacagtccctgtgtgttcattagtgcagggccttgtgtcctgaggagaccggtttctcactggcatcttcctcctttgttctgatctctggctcctatggtctttctgtcccttcttcctctgtagttcctcagggagatgaggcgtgcaatagatgccctatttatggccatgcactctgcagacactctacatttcgatcagttgtgagtttctgtattaagtgtcatccactgcacagagaaacttttttgatgtgttttaaaagctacactacctgatgggtacagagataggaatttagagggtagtatgatattttacaccaaggagaagtggttggtggtcagacattggagccattttgatatcactctggccagttgacattcacctgtggagaatgctgatatcattgaagcaccgtttggcatcctttgatcttgccatgctggctgttgtcaaggcttattgactccacccctgggtaggactatggcatgttctcccttaacagctcacgtaaaaccttcagatattatgggagctaataggcttcaaggccagtttcagcttggttctttcaagtcctttttcagaagtgtgtgttgactctagctatagggtcttcaagtttggaagaccaccaagggtaatggaagctgcctatattattttgacttacctgatctacaactttggtggaaatttcctatgtactagggttttttgtttgtttttttgctagattccatttcatataaactcatgaagaaatattttctaaaattggcagaacacagaaatggattccctgccaccccaatgaggctggatagagcaagaaacattctagggcttgcacttaaccactctaaagatggaaactgaagtccttgtgtgtggtctctgtttcaggggttctgagagctggctgtgagggccactgggaggtggggctggaattggccaggtttgctgtctctcctcactgtttttcccttgattagcaccaagtgtaacgtgctttggcttcccctccaagtcctgttcttctaaggacaatatgttataatgaggcaaatacaaggaaaacaacatgtttggaagagataccaagcagtctatacaggttgataatttatgtcggggggacgttcttgcctccactgaaaccatctagatggctttgctctccattgccatgtgctggaagtggagatttcctcagtgcctaaaacccacctcttttgaagagagctgacagagatgcttttatttccatccggtcttctcccgagtggcctatccgtcaaggtgccttctctgttcagtcctggcagaggagagacttacacacattctcctgcatctttgaatgtttgcttgcttagcagcaattagcttccttccagtttagggcaggtgctctgttggccttctgggccactgcatgaaatggagggagtaattcccactgacagagaactcacagtctgggaatgattttatttggagaaatgtgaaacggatgttaaatcactccaccgtcacatttctcttatttgctcaaccagcttttttttattattaatttttttcataaattatattttgctattttctcctcccccaactcctctcagatctcaattccatacccacccaacttctgttcttcttttcttaaaaacaaacaaacaaacaaaaacaaaaaacccagacaactcctcccagaaaagatccaaaacaaaaaaataaattaaccccccccaaatatagtaagacaaaatgcccaccccttaaaacccagaatgaaataaaaactccacagcaaacagacttggagggttggccaactattcctgggcatggagcctgccctggagtgtggttgatatgcccagtgattctccattgaagaaaactgagttcctctcccagtaggtatcaattgcaaggagcttcttgcttaggggtgggacattatgtccacttcctttttttctgtgttagtattgttgcctggcttgaatatgtgcaaaacttgcgcacactggcacagtctccggaagttcatatgtgtatcattcctgttctgtctggaggacaccaatcactcaccagttttgactctcacaatctttctccctcctcttccacattgagccctgagacttgatgagaaaagttagatgagagtccccgatttaggactgcgtgctgcagtctctcactctctgtgctttgtctgacgtgtgtctgtgttaacccccatctgttttaaaaagcagcttctctgatgagggctgagtgacgcactgacctttgggtacagaaacaggacactaggagacattgtcattatatgtcattatataggttttcttgtaggtctatggcctatccagtctgaagttcttggccacttttgctgtgtcaggtatgggttccatctcacggagtgggcctcaaatctaattttaaacttagatggttttccctctactatccagcaccctcacaccagtatatcttacacagaggttgtttttgtgggtctcaggttttgcagttgggtcatagtgatgaattcccttcctcctcctgaggcatacagagaacattctggctctgtgcatgccagtaggatgaggcttctggttgggccccagcttgactttctgtttgattatatgtaagtggcgtttcagcaataggaccttaccatcatgttgtggagagcaagagtagctgtggcaatgggggtgggggagggtgtctgtggtatccttttggccaatgattcaacaggatgtaaccccttcttggcactagaggttttacatggtggcgtaagatgttttttccagtatatggtaatgacatttaaattctttcatatatgtatgcttttggaaacctgtcttagcattctattgctgtgaagagacaccacgaccaaggcaactcttataaaggaaatcatttcactggggctggcttacagtttcagaggttcagtctatcatcagcatggtgggaagcatggcagcatgcaggcagacatggtgctggagaaagagctgagagttctatatccagatccttccctcggacagcaggaagagagagccacttggtctggttagagaccttgaaaccttaattctcatccccagcatacacttcctccaacaagaccatacctgctaatccctctcaagtagtgccactccctaatgaccaagcattcaaatatatgagccaaggggccagtcctattcaaaccactgcaaagcttctactggaataggtttccatatagttttttcataaggtttagtgagagttattcctctccatattccctccttgacccttctctcctctccccctacttaagcctatttattctggttttccctttatctctccataacactaaattttatttcctcttccttggaaggacccccactcactaccccctgtcctttactaggtacctaaactctctgtttattcagatggtagcaaacttatcaaaagtttaaatactgtcttccatatataagagaaagcactcaatacagttaaagaacttatcttgtgtgtgtctgggaggaggagcccaaggacattggcgcacatgtgcaggtaagagaacaactttcaagaatctgctctctctcgcccaccatgttggtcctggagtnnnnnnnnnnnnnnnnnnnntgttggtcctggagtcaaactcaggtcatcaggcttcggggactagcatctttacccactgagctctcttgatggctctcagactgcatgttgaggtagctcctttgctctgtcagagagtttagaggtagggagtgtaaacttttattttataaataaaataatgtgtccttgggctcctcctcccagacacacacaagataagttctttaactgtattgagtgctttctcttatatatggaagacagtatttaaacttttgataagtttgctaccatctgaataaacagagagttcaggtacctagtaaaggacagggggtagtgagtgggggttcttccaaggaagaggaaataaaatttagtgttatggagagataaaggggaaaccagaataaataggcttaagaagacagtgagttcctcaacgcctggaagtcagtggtggcatggtcaggtgtgccactcttgcccttttagctctgtccactcagcttgaacacgcttccccaggggtcctaccttctagagtcatctggaagcttgattttatcttctgtcaacaagtgctccaactcagctgccaccaagggacaaataaacgtaaggtggctcggtgagatttccagctggattgctggtttaacagagtttagataaaggttggatcatggctcagtctgcagggcatgccttatcctgactcgtgattgcagcctacattattttccttgagtttagtgtgtgtgtgtgtgtgtgtgtgtgtgtgtgtgcgtcccatgttattgttaatagctgtaacttattttaaaagcactcagtccttcgggggttttaataaagatgagttgtccctcccatttgaagctgtgtaagtgttggccctgagtacttgagatgatattttctgatgacaatttatcattgccaggaagatacagagatatgtctctttaaaaaaatccgtgtaatatggaagcaattatcttgtcaaggctggaagaggtttgtcaaataatgtaagaaaatatacagtgagactttggaaagcgatgggagagactgaggctaatcttggggcccgattgtgtcacaggtttggatacccgaggcctgtttccacaaggcaggagattttgtctgcctttgccttccagatgtgtcctgtagaaacccagggacaggctgatgttcagccttggcccttctaccctaacctactaatgaatctctgctaattatacagaccaacaactgaagagctagagctatatacctcctatttatctcccaatgcgttttcttcagcagaaaaaaatgtttttgagagatggaagaagttatacagcttttctctctgcaactcacagcacacatgaggatatacatttctaaaaaggcatcttatgtgttgtttgtcatctatctatctatctatctatctatctatctatctatctatctatcagcagttctggtgcctggttcatgttaggcaaaccaaacccctttatgacattatttgtaacttatcacatgctagactctgaattagtttcttgggctcctggatgaaaaatgactccaggagctgacaggttgataggatggggctgggaaccaggatgtaagtaattacaggtcaatgttatgaagcactgagatgtagtgagtcatggtactaacaaggggcctggaatccagccctggaatgagcctgtgggagaaagactgttgtggtgtttcagtccgtggatgctcttggctttcaaaatgcttcaagctggtgtctatcacctgggaaagtaggtcctaaggtgaatggtggaattcactacaagggatggaagtgggcagatagacaggcatcctaaaagacctgccacctaccccaagctgattcctcaggatcaatcaaagctgagcaggctgaagtcagaggacaggcaccctagctggggactgcaggaaaggggagcggtgcttactggctgggtggggccacagccattgaacaggactttgaacttcgtgaatttaaaggatgatttagtgattgaaggctgtcacagaaagggaggaatctccaagttcctcttctcaaatgactccagcttgcatcaggttgacataaaactaattagcacagatacactgaaaaaatttttcttccttcttgtgtgagagctttcctggggagatacgtgttcactcacaaaagaaatggaacccacaatggaccaaagtaacaattgcagtaatgtccatcctggcgaaccaaccagttttccttggggtcactaacaggagtgtgagtaagggattacttacagggtcagagatgacatacaggtggctgtgtgtgtcagcacaaagccacatggtggcactcatgaaagctgtgaccctagagcactctgcacagcttgcaggcagcatgaatggtctgagtgtctcttttctgctcagttggtcaggctcctcctgctgctgggcctttttactcattttataaagctgggggtggtgggcttctagaaccttccaagtttaagctttttcgaacgtgtaatgctatgtttagctcttgaatttcatgtgtccctccctgcctcactactggggtgcctagagtgctgccggtatactgctcaggagaggcagagcagagtctgtaacaggtggtcctcagtccatgatttcctggagtggaaaacaatggagtctgggactattgctgtggtttctgccattgctggtgtgccactggaagtccagaacaggggaccttggtcaagcttcccctgaagggggaccacaagccaggcagaaaggggaaggcaaagcctgggacagcagtagaacctggtttaattcctgaatgcatgctgagagtatagggggactctttacaatgaagcaacccctaccctttatgatccttgatgaagaggtggttcttgcttgttcaaactgctttatgtgacagctaatgtgaaggcaaatactttactcaaggtaaaacaggagtgcccaggaagggaagctcattggctgacctctcagggcatatctagatacctcattagcaaggagaactccagggttttatgctaagtgacagattgtcatggtcctcttagtggagatttggtagttttttgttccagagcaggtagaggtaggcagataatggctccactcctaccattctgtctgtcctcagcttagtactacaacagtgcttccaataatagacaaggctgcctcaggctcttctgcctgctcttggatcccctttccctacctggactgcctggttgggcttcagtgggacagaatgtcttgctgggactagatgccccaaggtggggtagcttcctctttacttaggtgaagaagaaagggtaatggggagaaagatttgtatttcctgataaatttccatatgagtgatcatgttgaataattactataaataacctagtatttgatgcaaaactatttctgaatacacaatgaaatataaatgaatgaatgctatcaggatggtcattgggtaggagacagaggtccagattttaatgtttgtatatccctataataagagactctgaaagattctctctccacatttctatgacatcaacaaaatggacattttatttctgttctgctagtgggactcatgcaaagattttgtttggtttttgaaaacagagtcttttgtaaaccaggctgacctcaaactcatgatgtagttgagggtaaccaggacccctgtttcctgggtgtggtgattgcaggcctgtagctctacctctgggttatatagtactacaggttaaatccaaggttctacacatactgtgcaagtgttcaaccactgagttgcattgccaacccctatgtaagactatgcatgggagaggatgctttcattgtcttgcttactacatccagtgcagtgagcactgacatctgtgctccctttgctaaaagtccctcatgggaaaagatctggcctgccggtggagagcttgcctccagggagtgcgctgaccccaggactcaggggagatctccattttctctccggtgactgtctaaggtgggagcactcaggagtacacaggctgcagaagtggcagagcagctgggacagggtccttccagcctacatctgcacccaggaggtggggcctttctgcagccctctgtgcactggtcttgccaggagagagctggtttcccaggagtgctgacacaggcttacagactcataggagaaacaagctccagagacagcaagaacatctaacaccagagattaccagatggtgaaaagcaaacacaagaatcttaccaacagaaaccaagactacttggaatcattagaatccagtactcctaccatagcaagttctggataccccaacataccagaaaagcaagatttgggtttaaaatcatatttcatgatgcctgtagaggattttaagaaacataaatagctctctaaaagaaacacaggagaacacagctacacaggtagaagcccttaaagaggaaacacaataatcccttaagtagttacaggaaaacacaaccaaacaggtgaagggattgaacaaaaccatccaggatctaaaaatgtaagtagaaacaataaagaaatcacaaagggagacaactctgaagatagaaaacctagaaagaaatcaggagccataaatgcaagcatcaccaacagaatacaagagatagaagagagaatatcaggtgcagaagattccatagaaaacattgacacaacaaccaaaggaaaggtaaaatgcaaaaagtttctaacccaaaacatccaggaaatccaggacacaatgagatgaccaaacccaaggataataggtatagatgaaaaggaagatttccagcttaaagggccagtaaatatcttcaacaaaattatagaagaaaacttccctaacctaaagaaagagatgcccatgaacatatgagaggcctacagaattccaaatagtttgtaccagaaaagaaattccttccttcacataataatcaaaaccccaaatgcacaaaacgatgaaagaatattaaaagcagtaagggagaaaggccaagtaacatataaaggcagacctattagaattacaccagatttctcaccagagactatgaaagccagaagatcctggacagatgtcatgcagaccctaagagaatacaaatgccagcctaggctactatacccagcaaaactctcaattaccatagatggagaaaccaaagcatttcatgacaaaaccaaattcacacaatatctttccatgaatccaacccttcaaaagataataaagggaaactctaatacaaggaaggaaactacaccctagaaaaagcaagaaagtaatctttcaacaaacctaaaagagatagccacatgaacagaatcccaactctaacaacaaaaataagaagaagcaacaataacttttccttaatatcttttaatatcgatggactcaatttcccaataaaaagacatagaataacagactggttatgtaaacaggacccaacattttgctgcatacagaaaatccacctcagtgacaaagacagacactacctcagagtaaaaggctggaaaacaattttccaagcaaatagtcccccccaaaaaacaagttgaagtagccattctaataccaaataaaattgacttccaacgcaaagttatcaaaaaagacaaggagggggggcatgtcatactcatcaaaggtaaaatcttccaagaggaactctcaattctaaatatctatgctccaaatgcaagggcagccacattcattaaagaaactttagtaaagtttcacattgcacctcacacaataatagtgggagacttcaacaccccactctcatcagtggacagagcatggaaacagaaactaaacagagacatagtgactaacgtaagttatgaaacaaatgaatttaacatacatgtatagaagattttatcctaaaacaaaaggatataccttcttctcagcacctcattgtaccttctccaaaattgaccatataattggtcacaaaacaggcctcaatagatacaagaagataaaaataatcccatgcatcacctcgggctaaggctgattttcagtaactcttcagtaacaacataagtaatagaagttgaacaacactctactcaatgataacttggtcaaagaagaaataaagcgagagattaaagacattttagagtcttatgaaaatgaagccacaacatacccaaacttatgggacacaatgaaagcagtactaagagacaaactcatagctctgagaacctccaaaaagaaactggagagagcatacactagtagcttgacagcacacctgaaagctctagaacaaaaagaagcaaatacacccaagagaattagatgtcagaaaataatcaaacttaggactgaaatcaaacaagtagaaacaaaaagaactatacaaagaatcaaccaaaccaggagctggttctttgagaaaatcaacaagatagataaacccttagccagactcagtaaaggacacaggggcagtatcctaattaacaaaatcagaaattaaaagggaggcataacaacagaaattgaggaaatccaaaaaaatcaacaaatcttactacaaaagcctatactcaacaaaactggaaaacctggatgaaatggacaacttcctagacagatatcaggtaccaaagttaaatcaggatcagattaatgatctaaacagtcccatatcccctaaagaaatagaaacagtgattaataatctcccaaacgaaaaaagcccacgaccagataggtttagtgcagagttctatcagaccttcaaagaagacctaataccaataatcttcaaactattccacaaaatagaaacagaaggtactctaccaaatttgttctatgaagccacaattactctgatacctaaaccacacaaagacccaacaaagaaagagaacttgagaccaatttttcttatgaatattgatgcaaaaatactcaataaaattcttgcaaactgaatccaagaacacatcaaaacaatcatccatcatgatcacataggcttcatcccagggatgcagggataattcaatatatagaaatccatcaacataatccactatataagcaaactaaaagaaaaaaaccacatgatcacctcattagatgctgaaaaagcatttgacaaatccaacaccccttcatgatgagtcttggaaagatcagtaattcaaggcccatacctagacatagtaaaagcaatatacagcaaaccagtagccaatgtcaaactaaatggagagaaacttcaagcaatcccactaaaatcaaggaccagacaaggctgccaactctctctgtacctattaaatatagtacttgaagtcctagccagagcaattagacaaccaaaggagatcaaagggacacaaattggaaaggaagatgtcaaaatatcactatttgccaatgatatgatagtatcatagatagaagtgaccccaaaaattccaccagagaactcctaaacctgataaacaacttcaaaagagtagctggatataaaattaacttaaacaagttagtggccttcctctacataaaggataaacaggctgagaaagaaattggggaaataacacccttcataatagtcacaaaaatataaaatatcttatatcacttatatcactaaataagcaagtgaaaggtctgtatgataagaacatcaagtctctgaagaaggaatttgaagaagatctcagaagatggaaagatcttccacccttatggattggcaggtttaatatagtaaaaatggctatcttggcgaaatcaagatctaccgattcaatgcaatccccatcaaaattccaactgaattcttcacagagttagaaagggcaatttgcaaattcatctggaataacaaaaaacctaagatagcaaaaagtattctcaaccataaaagaatttctgatggaatcaccatccctgacctcaagctgtactacagagcaactgtgataaaaaacaaaaaatgaaaaacaaaaaacaaaaaagaaaaaacccaaaaaaactgcacggtactggtacaatgacagacagttagatcaatagaatagaattgatgacccagaaatgaacccacacacctatggtcacttgatctttgacaaaggagctaaaaccatccaatggaaaaaagacagcattttcaacaaatgatgctggctcaactggcggatatcatgtagaagaatgcgaattgatccattcttatctccttgtacaaagctcaagtctaagtggatcaaggatctccacataaaagcagagacactgaaacctatagaggagaaagtggggaagagtctcgaaaatatgggcacaggggaaaatttcctgaacagaacagcaatggcttgtactgtaagatcaagaatcaaatgggacctcataaaattgcaaagctcctgtaaggcaaaggacactgtcaataagacaaaaaagcaaccaacagattgggaaaagatctttaccaatcctaaatccaatagagggctaatattcaatatatacaaagaactcaagaagctagactccagagaaacaaacaactctattaaaaatggggtatagagctaaacaaagaattctcaactgaggaatactgaatggctgagaagcacctaaaaaaatgttcaacatccttagtcatcagggaaatgcaaatcaaaagaaccctgagattctacctcactccagtcagaatagctaatatcaaaaactcagatgacagtagatgttagagaggatgtggagaaagaggaacactcctccattactggtgggattgctagctggtacaacttctctggaaatcagtttggcagttcctcagaaaattggacatagtactacctgaggacccagcaataccaatcctgggcatatatccagaagatgctccaacatgtaataaggacacatgctccactatgttcatagcagccttatttataagccagaaactggaaagaacccagatgtccctcaacagaggaatggatacagaaaatgtggtatatttacacaatggagtactatgtagctattaaaaacaacgaatttatgaaattcttaggcaaatgaatgaatctggaggatatcattctgagtgaggtaacccaatcacaaaacaacatacatgatatgcactcactgataagtggatattaacccagaagcttcgagtacccaagatacaattcgtaaaacacatgaaactcaagaaggaagaacaaagtgtggatatttggatccttcttagaagggggaacaaaatacccattgaagtagttacagagacaaagtgtgtagcagagactgaagaccatccagagactgccccacctgggaatccatcccatatacaaccaccaaattcagatactattgtggatgccaagaagagcttgctgacaggagcctgatatacttgtctcctgagaggctctgttggtacctgacaaatacagaagtggatgcacacagacatccgttgtattgagcacagggtccccaatgaagaagctagagaaaatatccaaggagctgaaggggtttgcagccaataggaagaacaacaatatgacctaaccagtacccccagagctcctagggactaaaccaccaaccaaagaaaacacatggtgggacccatggctccagccacttatgtagcagaggatggccttgtcattcatcaatgggaggagaggcccttggtcctgtgaaggttctatgccccagtataggggaatgccagggccaggaagtaagaatgggttggtcagcagtgggagggaggaggaaatagggtttttttttttttttttttttttttttgggagaagaaaccaggaaaggggataacatttggaatgtaaataaagaaaagatctaattaaaaaaaaaagaaagaaacaatctgaatataatataggagtaacatgctcatttttttttctgggaatactttagtggattcatcatgtgtttgaacttgtaataagccattaaaaacttggagaatgccatggtaagccactacaagagtctggtgtctcccatgtgtctggtattgtgtgttgctctagtatgctgcctgtattatctcatctcaccctgactgacacacagtgcggaggatatgatacccctgcagagatgagatagagctgaccatgctaatgaatgcctttaaccccagctcatgagagccagattcaggagaatagcttcaagtctgagtccagcctgggccccctgtcttaaaaacagcaagaaacaaatcaagcaaaaaacaaaaatacctggagataaggaggcaggagttagagaggccacaggcctggatcagggccaggctcatatctctgcccttgacctctaagttacttagccctgacagctgacaatgaatgttttcactctgtggacggtgtttctcatggacatctctttatcccttcttttcagactgtctacgaccagtggttcatcactctttttaacattgtttacacctcactacccgttttagccatgggaatgtttgaccaggtatgtggtttttgctgtatttgttgctttctttctctgttgacttcttcagctgtggccagctagcttttaagtagaaggctgatcatgggaagattcccaggaatgcagtttttaaaagaagtgttacatgggtcacaaggccttctgggtcccttaccttgcccgctgcttctgcagaaaggttctccatccaagtttgcctcttctgttctgaggaacttacatcttgctgtgctgatttaaggtcctgggaagtcatgcatgaacttttcccctttcatttgagtccagcatttctcaaatttctgtgatttgaatcttttaaaaaatgtcgtagtttaaattaattttttaagaatttcataaacacatacaatgtattatgttcacatttactgcccccaactcctacgtcttcccagatctatcccaacacccccactaaccctcttaactctagatccccccctctttttaatgacccacagaatccaaattgtcccacctatgtatatgtggatgtgtggccacccagtggagcagggttgacataccagggacagcattatcaaacagtggctctccctaccttagtagtcatcagctgccatcatgaacccctatcctatccaatctgaaaaggtggctggcttgatcttgtacagaaaaccacagtcactgtgagttcactagggcagagaccataccatgtgcagaagaagctgttttctccacccttccccttgccctgatctctggctcttacaggattcaaccccctcttttgggacagtccctgagccttagaacaagacatgtgatactgagattcccatttatggcggcctgaagcctactgtagacattatcctttgtgctttgaccagttgtgagtttctgtattaaacatcatccacttcacaaagaagcctctctcatgaggactgggacgtgtatgaatccatggatatagaagtgcatgtttagagaccagtttgatactgtctgtgtccatttatcaaaataaaattagtaggttcaccccccgcccccccaggactgatgagcgtaccagctgtgggctattagacagatgtactgttccaacatgaggtgccgcccctggaccagaccttatccaatcaggaagtatttagttacttttatggcatatgtgttcctgttgtacccatgggtgtatcttgccaggctgttgttgcagcttgagggtttcacaacccggtaagactgttgacgactttcctcctttggtggcctgcggagaatcttctggaaatatgagtgttagcctgcagggaggaatcgtcctggtcggaaccagcttgatttttccatgttcaatgaccaaaatgtgtggtgtcttcagcaataggatctcacccacaaggttgtggagggggtggagtcaaccaagaacaatggcaatattttattctgggcttctctaggatactcctgaccaacaattccatgggaggtatcccaggcctattacttggatctttatttgccaacttagggtttttgggagaagtattattccctaagaagggtaattctaagtgtgtgtgtttctctccctcggccccctctctctgtataaagcttgtaaaacaataggtttctatatggcttaaaactgtcctagcgttagacacccctcttcccaccctctcctctgcccaccctcccatcccttctcctcttagacttccctctccatcactcctcttctcccttcacattacttgtatttcactatcctacctccttaagatcgctcttcctccaccaagggctcctctccagtttcctggcttcaacagttactacaggctaaacacacaaatcgaaagagtcaatgttgggacccacaggtctttcgcttccttatgtaactctacctttcctgttcccccctttcctcccattaaatgttagatcatagcttccgtagctttccccagctctgatcaggtcacactgaccctgcagtctgtcaagagttgacgggtgacttgtgtgattcttaaagcacacacacttggtgggggcgaggagggggtgttgggggtagctttcttcttctgctgcccaggacaaagacaactttgaaatatgtctgctttccaaatagtgcaatatggaaattcctgccatatccttgagagtctatagcagttaaacacaacacaacaacaaacaaacaaacaaacctaccaaccaaccctatgttcaggagactttaaggcctctcttttagctttgcatcatgctagccatggtggctgaatgaaaatgagggcatgactgctccaaggtgtggtcgaggagaagggttttattgtcaatatgagggagagaacagccagagaggcatctgggagactccagactgaactgggtcatggaggtgcgttgagggaaagcaagagggtgggggagcacatggctgaaatgccaggtttgtttcggtacgagaagctgtgggaaaggaagcaaagccccggggctggagaagttgaaggtaggacagtatgagaagttctgggaggagccacaggtactgagggagccttgttctgggttcctttgaggcctgacagtggctaatgctctcccggttggttcaagttttgtcctttccccttccagcatagttaacaaggctctttcttcgaatgaggcttattctgaaggccactctctgtctggtcctttcacgaagctgttgctctagcttcaaccatcaaaatgcctctgaattcacgcacttcgtggggaggtgccatgttagcctctggcaggtggagagaaccatgcagggttaaggaaaaatgggcagcacataaactgtcagcacggacagtggagcctcgttggccagcgcagagcagaaaagaatcccagagcgctgagcggcccatcttagggaggcaagcacacacaagccctcggtcatggagaggaagaacatggccttttgtctagtgtttatgtgtgtgagacagaagggggagagatcagttacaagagtggcgcttcatggtccactctggtttggaacgcactttctggcaaagggggaagtctggctgcctctggggaagtggagacctagccagcagagttttccatggcacaactaaagtgtagtgctttttgaaagttttttttttttcttttaaagtatttttgagaccagcttttctccgatctgttattagagctgtttactaggctccgtcttctggcccaaagctatctgttgcacaatacccatcctcgcactgcgaggtcactccctcctccattctctctactttgtagttggttccgagtctcctgtccatatgtaaaagaggggcatctgcacaaagcaccaaacttcaaaagaccttagacgtaaaggattaagcacatgctattccaagtgctggtgtttacaagtgtttcttttcctggtgctttgtagctgcccacaatgtggaatcaaatagtaaaaataaagcagttctgggaaaaaaaaaagccaaaacagttattgtgcaatttgaaaaaaagcaaagcaaaacaaagcacaaggagcctccttattgccatcgagttgaatggctgctctgctcttttcttggtttgtctgccttggcctttaagctgatggcagagtcacgggtgctgggctagacagccccagggactatctgtggtgtcactcattttgtctgagggtgagcaagccctgggaggttctatctagacccagataggccagccagtctgccagtctgtggcagaactaagaccaccacacactcacttgagtttggattgctacattttatgaccattattattgttttattcgtgttatgttagcatagattattggctgtttaatatgaggaaagaacatggcagaaacatctcttgaccatctatcacagctctgtgtctctgtgatggaggcattaccatttgcatttcggcagatgaagaaaccaagactcaggttaaaaaacaacactacactgccaaatcaatctgttgccagactgtgtgcttttaaagcctgtgcagataaagacaccagccaccaggacagggagaaggcacactcatatccaacagtttctccaggaaggacttctttctttaagaacgtatcgggtttcacagaatcccgttctatacagtctaagcgacaaagatgagggagaaatggactttctccagaagtccccatctatggctgccacttgtccacctgtggtcttctgttgtttgtttgttttgtattgtttcattttggtattttaaaatagtttctttgtgtagtctaggctgtcccagaactagctctgtagactaggctggcttcgaactcaaaagatccaccgaccctgcctccgagtgtagggattaaaggcatgcaccaccactgcctggctgctcttctgttttggtccagtctccgtcctttgggtattggcccttggttttggtgctcacaatgtggacattgacatcactttgcagctagccagaaatgcagactctgcttcattgactcatatgttcattaaactttagaaaactcagttaagtcttttttctagaacttgtgtggctgctaaatgtggagcctcttattctgtctggttctgtcccctgagctgttggcatttactactgaattctcactgggtaaatccctcagacactaagcgagcgttcaggctcagccctcttccccactttgaacatcacgtgctcttcctcccgtctctcattgttcctgctcgcctcatccccaaattgccaattctagctcctcagctctctgcatccatctccaggtcactaccacacaccccattagcaatttccttctggtccatgactatacataaatgtgctggaatcctggagcttgaatctttccaagatggcatcagtcacagccatcttttctctacatctgggatgtagatgtagagaaaagattttatttgagttgaaataggtgcattgaagttcagtcaagtcctagctctgctatagactggtgtgacctctcctctgtctctcttggggatgaaagcctctgcatagcaaactggggattgtttataatagggtgggttcttctgggaataaaaaccagataatgtcttgtttcttcccagggactagtaggtaacagagcatgcttacaacgaccttgtctatttctagggataggggatacagggcttctctgactcttccccaacactccttctctgaaattacactctgtttccaggacataaatgaacagaacagcatggactatcctcagctctacgaacctggacaactgaatctcctttttaacaagcgcagatttttcatctgtgtggcacatggaatctacacctcattagcccttttcttcattccctacggggccttttacaatgtggctgcagaggacgggcaacacattgctgacctccagtcctttgcagttaccgtggccacatcattggtcattgtggtcagcatacaggtaaccctgttccttaaagcacttctgctttggtttacataagtcgaagttcactgtcagctgatttggcttcttaagggagaaatgcgtgtgtgtgtgtgtgtgtgtgtgtgtgtgtgtgtgtgtgtgtttgtatttatgtgcagatgcactcacctttgtccatgcaggaggaggccagaagctgtgctctgccatcatttctctaccttattttttggggatagggcatctcaccaaacctggagcccccatttcaactagattgtctatgtgctgagcccctgtgatctgccatctctgcccacccagcactggggatacacgtctgggtttttacacaagtgctagggatctactcccagattcagatcctcttgcacacacagcaagtactttatccactaggccattgctccagccccaggattttcttgaaatgaagtcaataatctttaataaataacaagatgtgatgaattagtattaggagtttataacgtctgtgtttatagaaccacagcaatctcttatttaagttgggtattgtgtataaagaaaagtgattagggactgactggaggtgtggctcagtggtagagtgattgtccactgtgctcaaggccatgggttcaaggctaagtactgaaaaactagtagcccaacagagtgacacatgcctgttttcccagcactaagagactggagcaggaggattgctcaaagctgggctactgtctaagaccctgtctcacactgtatataaaagaaaaataataacaataaaaaagccatacttctattcccttcttgtgtttgaagaggaagcatttccaagaataacaaatgtttcctagaatttcagacttaataagtcccaggttttaaagtgacagctagaacttatttggcaatacacttttgatcattcaagaggctcaaatggcccatcaagaagacacttctgagtggggagtcctccatgttctgggctgggctttgaattgttttctagtgcagttctggttagattctggtgaattaggattcctgagaacatctggtccattaacacctgcagcacctgactgatgtggtgggtgatctgacctctgtggtttgtttttcattattgagcaaattgttacgaacaagaggacatcgttgtcaaaagttacagtcgtaagtggccatttcttgagtattgggtaaatgagggagatgataaaagggaattttctttctactgatccaatcataaaaaagagtttgtcagggtgtgtccaaccattagaaaaagaataactaaaactgacttgtttttttcagattatatctgcagtcttcagacacatccatgactagttttcaaatagtctgagaagcagtttcctgggctgaacctaggacaacaactgatttagctgtgggctgtggtctctcatgaggttctgaagtcttcaatagcaaagccctgtaggggagactcacacagaactccagctataagtgttcgtataggaaatttggaaagagcagaaaagtacagagaaaaatgaatattcacccacagtttccatagtgatgttaacgtagcaaaaataagagaaatcaaatttgtgtaattttatagctttgtttctctctgaactttgtctcatgtgtatgtatcttgttttaggattattctccaaaatgtcccttttcacagttgcaatgctttagcgtacaacatgccacaattcatcaaccaggacacaccgttagactgcttctcttcttttcactttaaacagtagtaaactttcgtaaagtctaattctagatgcttctttattgccttcaagtgcgttctttattggtgtttcatttggttgtatatttgagacagggcctcactgtctaccttgaaactcactatatagaccagactggccctaactcacagagatccacctgcctctgactctcctgtgtgctgtggcatcatgcctgggcaggctgtattcttcaaaggaaaattctgagtccaaggagatatggacgtttgatgttctttttatctcattgcaaacatcttcccaaatggattattttcagctgctgaatataaaataccctccttagccaggccttcatggataacaaattgttactctgaattagttcacaataaatccacagctttcggttgcctgggaaacaattgatgtgcatacacacacacacacacacacacacacacacacacacacacacacacacacacacacaaatcaagttcacaatttaagcaggttaattttaaaaggatgttatcctttgaaacaattgtagagtttcagaagtgttgacattgcagaggcagtgcctgtgtctgctcagcctgacttgttatgtgtgggactacacatgaccacgaggtacctgtgatggttacaagaaatgatcatggatacagaattatcccttaagctgtaggtgtggctcagacttctgtaacttatctgttagtaacttcctctattccagtgttcaacacagggattccacagggtagtgctgtcatgtcgctgtagtctctgacccctgatggctttgtggccatccttcatctgtgataactttgaggaatagtggtcagatcatttgtaaatgctctgcagtttgcattgtctgatgtttccttgacaggaaataggctgtggacttacagggagaatcatnnnnnnnnnnnnnnnnnnnncttctgtgtttgctgggccccggcatagtctcacaagtatacagctacatctgcgtcctttcaataaaatcttgctagtgtatgcaatggtgtcagcgtttggatgctgattatggggtggatccctggatatggcagtctctacatggtccatcctttcatctcagctccaaactccgtctctgtaactccttccatgggtgttttgttcccaaatctaaggaggggcatagtgtccacattcaagtgcgttctttattggtgtttcatttggttgtatgtttgagacagggtctcactgtcttccttgaaactcactatatagaccagactgaccctaactcacagagatccacctgcctctgactctgactctcatgtgtgctgtggcatcatgcctgggcaggctgtattcttcaaaggaaaattctgagtccaaggagatatggacgtttgatgttctttttaactcattgcaaacatcttcccaaatggattattttcagctgctgaatataaaataccctccttagccaggccttcatggataacaaattgttactctgaattagttcacaataaatccacagctttcggttgcctgggaaacaattgatgtgcatacacacacacacacacacacacacacacacacacacacacacaaatcaagttcacaatttaagcaggttaattttaaaaggatgttatcctttgaaacaattgtagagtttcagaagtgttgacattgcagaggcagtgcctgtgtctgctcagcctgacttgttatgtgtgggactacacatgaccacgaggtacctgtgatggttacaagaaatgatcatggatacagaattatcccttaagctgtaggtgtggctcagacttctgtaacttatctgttagtaacttcctctattccagtgttcaacacaggattccacagggtagtgctgtcatgtcgctgtagtctctgacccctgatggctttgtggccatccttcatctgtgataactttgaggaatagtggtcagatcatttgtaaatgctctgcagtttgcattgtctgatgtttccttgacaggaaataggctgtggacttacagggagaatcataacgaggtgtccttcatgtttcttcctccctctaagagcacagtcactctgtatctgggagtgccatgtgtacacatcacattctccttggatatctgtcagttgatgaacgtctgggctgattccattttcagcctgggaagttgtactgtagcatgcagggtccaagcactaggcaagactgttgtttcactcagaagtctacagagtgtcactatataagctaactagcagggaggaaggtccccagttagttagaaattgacttctgtatgtactgccatcaaagtgcgtggtgttttcaacaatagggttttatcatctaataatggtggtcagccaagagcagcggtgatagtctggttgtttggggggaacctctgaagacaccttagccaatacctcacagggtgtgtttcatgtatgacactgagatttttgtttagtaatccatgtcttttgggaacaacactgtccacccacacagggcatccctatccaatctcctctttaacctgttcccccatctcctgtcacgccacatgcattcccttccccctttcgtgaacattttctaggtttttgatgcttatagacaccctaaataaaacatacaaatctaaaactgcaaagctaggattcacatttgaaagagcaagcagccattgtctttctgggcctggattcttaccgagtctaatattttccagttatgtctattttcgtacagattttatggtttcatctttctttacaacttagcataactccattgtttatatgtaccacgttttcattatttcttcactggttgatggacatctaggctgtttccatgtcctgctgttgtgactagggcagcaacattcacagctgtccaggtacccctgcggtaggatgtggactctttgggtatatgcgcagaagtagtacatacagatcaaatagcttcacttctagttttcttgcacaactaccacactgatttccatagtaatgacaccagtttacactcctactaacactgaataaggtgtcccccttcctgtgatcctcagtagcctttgttgacatctgctttgttgatcttagctattctcaatggggtgagctggaaactgggagtattttaatgataaccaaacattttacagtcttgttctagatctttcttcatccacctcgaatgaaacaagattggaactttttttcttctagttttttaacttatttttttctttgtattgaaatagattttttccctcacacaatatatctggattacagtttcctgtcctgcaactcctcccagttcctccccatctctcctcccgtctggatccacctccttgtctctcattagaaaacagacttttgagagaatatcatatcatatcatatcatatcatatcatatcatgtcatgtcatgtcatgtcatgtcatatcatatcatatcatgtcatatgataaaacaaaaacagatcagagctgtattcatgtgtatgtcaatcatgttgatttagaaggccttgtttccttggtgtcctccagccactctgggctgtacactctttcttccttcttttccaaagggctccctgaaccctgaggggaagaatttgatgacgtcattccatttggtcaagtgttcccaggtctttcacactcatgtctgctgtgggtctctgtgtttattctcatctgctgcagggggggagcttctctgatgctggctgagcaagccctgctatatgaggatggcagaatgtcattaggagtcgtgttattgctactttttagctcttctataatagtggtatttggttttaccctacgtctcagtgctatctagtctcaagcagtgtcaggtgtgggttccatcttgtggagtgggtcttaagtcaaagcagatattggttggttgttcccacaagctgtgtgtcatcatttcactagcatatcttgtagcaggacactattgtagggtctgtggctgggcccgtggtttgaggctgttgtgatttttcttttttccctctgtctttactctcatcctcaattctggcttataaatgacggcatgttttgtttcagaatgctactgactgatactcctttaacataggttctgaagttggttcagaaagagtagttggatgttaaaatttgagcttaaacatcctttatctttgtatttaaacactatattaagtgagaataagactcatcagctagagctcctcctgccccatcaccgccccttgtcaactttattgctacatttctatagcccagtttcactgtggtagatagatgttggctgattctttttatattcggatagtgccttcttgatctaaaagcttatgttctttataagaacaccaccagaatgtgatttgtttttttttaactgatttgtcagggatttgaacggtcctctcagtctgaaaatctaggctactgttggctgaggacaattttcttttagcatacctttgatcggcacatctttatctaccctttattttgttcaaaaatccaagtaactgtaattgggcttatgactcagatagctacagattcacaaaggtttctcggcctgtgctccctgttgttggcacttgtttgttccaggatacacaggcagctctcaccagtggggatttccctttggtttttctgtttcatgctttaacatcacaagtgggttttatcctcagggttgtttgtgtccccttaggaagtcccctgctgcttagcggtccccctagagcttctcagtcacactgattggttctgtttcaaggggagaaacccactcttttagcagggccctcattttaaaatgtggattatgatttcttttccttcttataacatggaccaggctattttcttttgcaggtgatgaaatgacaggtggtggaagaaagaatttcaggtttgggtttactgtcctggttgcccaatacattagataattagcaggtcttgaccaggatggactgcagggctgtcttcaggtgtaacggtcctggagttcattatcttctgcttctagtgtctttagtgctcacttcaacactttggagggtagcaaactacagtgggaatagaacatatttctgtgtctacagagggatgtatttatgctgcagatagagtaggggtctacagtcctttacctgcatgtctcctgaggcttctgaggtgtaaattgcattacagctgccacacaagatacaggaagggaaaaagggatgggggacacattcccacaccacacagattgtatgataaaaagtcagagattcttcttttctgtgacttgagaaatacaagaaaggggtcataggaatgagttgggatggttatatcaaaatatcacataaaattattaaataataaaactcttgacagttccccttctgaggctgttttaaccttggcagatatagttgcccatatacctaagtgctggacacttgtctagcactggccatttgggtgtgtacagaagtggaggtgtgtggttggtccagtaatcttcgtgttccagagcaatcctggaggcaagcttctgtgtacaccatctttttttttttatgtctaaaaggcctctcttttggcatttgactttatttgcagatagccttggacacgagttactggactgtggttaatcacgtcttcatctggggcagtgttgccacctatttctccattttactggccatgcacagtgatggtgtctttggaatcttcccacgccatttcccctttgttggtaagtgatccttcctgttgtgaggccttgtgacacactcaaagtcctttgcctctatgacttgtttttgtgtcatgtggggctagaaatggtcagcactctttttttctaggagttgattggttcacccgaagacttccagacatgaaagaggttctaagagactgcttttttttccttgccggatagatcttatagcctcccttggttaagatgcagtaggctgttctctagaagacaagggtcattgcatgtgtatttacagcatgagaaaagttgttttttattctaaaacagggaaggggaaaagccagctctccttataccaggttaccaccagcatatctgccagagttctacagacatcatctgcatttagatgaaagagaagtgattcataagttagcgctttctacagatttctgagcatccttctagaagtggccagaagactggatagatataagggtttaaaggccagctccaccacttaacaaattgtgtggtgttgaacaaattttctttcctttccatgatttaatatttatctattaactgggttattaatcgttcctattttcaatagaaaaaagtgaagataaatgagttattacatatagagcattgggatggatcctggttaaataaacactgactctgatgagagttgagtgtttgtcttggttagggttcccattgctgtgacaaaacaccatgtcaaaaggcaaatggaggaggaaagggtttatttcatcttacatatcctgaccatagtccattatgaagggaggtcaggggcagaggctcaagtcaggaacctagaagcaggaactgatgcagaggccatgaaggagcataacttactgacttgctcaccatagcttgctcagtctacttacttatagcaccccagatgactataagatataagtggcaccatccacaatgggctgggtcctccaatatcaatcattaattaagcctgataaacagcttcaatgaagtagctggatataaaattaactcaaacaagtcaatggcctttctgtacacaaaggataaataggctgagaaagaaataagggaaacaacactcttctcaatagtcacaaataatataaaataccttggtgtgactctaactaaggaagtgaaagatctgtataataaaaaacttcaagtctctgaagaaagaaattaaagaagatctcagaagatggaaagatctcccatgctcatggattggcaggatcaacattataaaaatggctatcttgccaaaagcaatctacagattcagtgcaatccccatcaaaattccaactcaattcttcaacaaattagaaagagcaatctgcaaattcatctggaataacaaaaaacctaggatagcaaaaactcttctcaaggataaaagaacttctggtggaataaccatgcctgacctaaagctgtagtacagagcaattgtgataaaaactgcatggtactggtataatgacagacaagtagaccaatggaacagaattgaagacccagagatgaacccacacacctatggtcacttgatctttgacaagggagctaaaaccatccagtggaaaaaagacagcattttcaacaaatggtgctggcacaactggcggttatcatgtagaagaatgtgaattgatccattcctatctccttgtactaaggtcaaatctaagtggatcaaggaactccacataaaaccagagacactgaaacttatagaggagaaagtggggaaaagccttgaagatatgggtacaggggaaaagttcctgaatagaacagcaatggcttgtgcagtaagatcgagaatcgataaatgggacctcataaaattgcaaagcttctgcaaggcaaaagacaccgttaataagacaaaagggccaccaacagattgggaaaggatctttacctatcctaaatcagataggggactaatatccaatatataaaaagaactcaagaaggtggactccagaaaatcaaataaccccattaaaaaatggggctcagagctgaacaaagaattctcagctgaggaataccgaatggcagagaagcacctgaaaaaatgttcaacatttttaatcatcagggaaatataaatcaaaacaaccctgagattccacctcacaccagccagaatggctaagataaaaaattcaggtgacagcagatgctggcaaggatgtggagaaagaggaacattcctccattgttgatggaattgcaagcttgtacaaccactctggaaatcagtctggctgttcctcagaaaattggacatagtactaccagaggatcctgcaatacctctcctgggcatatatccagaagaggtcccaactggtaagaaggacacatgctccactatgttcatagaagccttatttataatagccagaagctggaaagaacccagatgcccctcaacagaggaatggatacagaaaatgtggtacatttacacaatggagtacgactcagctattaaaaagaatgaatttatgaaattcctaggcaaatggatggacctggagggcataatcctgagtgaggtaacccaatcacaaaggaactcatacaatatgtactcactgataagtggatattagcccagaaacttaggatacccaagatataagatacaatttgctaaacacatgaaactcaagaaaaacgaagaccaaagtgtggacactttgccccttcttagaattgggagcaaaaaattggaaggagttacagagacaaagtttggagctgtgacgaaaggatggaccatctagagactgccgtatctggggatccatcccataatcagcttccaaaagctgacaccattgcacacactagcaagattttgctgaaaggacccagatagagctctctcttgtgagactatgctggggcctagcaaacacagaagtggatgttcaaagtcagctattggatggatcacagtgcccccaatggaggagctagagacaatacccaaggagctaaagggatctgcaaccctataggtggaaaaacattatgaactaaccagtgccccggagctcttgactctagctgcatatgtatcaaaagacggcctagttggccatcactggaaagagaggcccattggacttgcaaactttatattccccagtacagtggaatgccagggccaaaaagggggagtgggtgggtaggggagtgggggggaggatatgcgggacttttgggatagcattggaaatgtaaatgaggaaaatacctaataaaaatatttaaaaaaagaaaaaagaaaatggactgtacacttgtccacaggccaagcttatagagagtcctccctcccaaataactctagcttctgtcaggtttacataaaacaagtcaaccacagtattattatgcaagaaattgtgacttgactatgggggcatcatgggagaattcggatgtctgatggggtatcaaggaacccctaaaatttcttaaagtcttgaagttacatttaataaaggggatacatccagtgttcctgtgttaaggtccatgcttcaaaatgagtctgccaccatcactgactcgtacacaagaaccattaatacactttccaagaagtttggaggatcnnnnnnnnnnnnnnnnnnnnnnnnnnnnnnnnnnnnnnnnnnnnnnnnnnnnnnnnnnnnnnnnnnnnnnnnnnnnnnnnnnnnnnnnnnnnnnnnnnnnnnnnnnnnnnnntttgaagtggtggtcttcacaggggcctggcttctgtttccatccagctgtgtgcgtaagtgtggggacactgtttttcaactttgtccattccttcacatacagtaactgcttcaaatcctaacaatcttgcttagtacaccacattaatactttgtttaccaaaagattccaaccatgtagaggcatgttggttagtcatcagaacatgccagttaggaaaggaaggctcaagaactgtttttaaatttcagtttatttatttacttttgtgttaccaaatgttcgagatttggtgcatttctagtctatgttagaccattctaacatgtgaaatgggactgcttcccctggagattgtagtttgtgtgtggactaatcctttcaatttaagcatatgccatcccatgaattaattaattactaagatccaatgaaagtttacaaaagttagattaacattggagttttcttaaagaaagagagagagagagagagagagagagagagaaagggagaaagggagaaagggagaaagggagaaagagaaagagagaaagaaacaaaaagaaaaaaagaaatgtttttttccttagtaaccaggagcagggagtggcgtggctttaaaatgaagcctgtttttctcaaagttgtctgtgggtaatgagcttcaaggagcttaaaaagacatttaattgattgaatcaagtttgtttctgcccttggcttacaacaactggagttggctgctctttggtagacagatttactttccaaagctagaaaaagcagacataccaatcagttgccaaactcttatacccaaagcccatttgaatgctgttaacacgggtacactgggatgcaggcctggctggttgaaggtatcacgatgaatccctagaaaatgaacaggggcagggatggtgtagtcccacgaaatctgcctgcctccctttgcttccatgattagacaaacaataaatatgtgagaaatgagggtaaagtctggaagctggctccaggcttggcagtgagtttctctggcctgccctctctcatgttgggtagctgactcagtgttcacaggggaactcttctcatcaaactaggagcctccaggatctcctcagatctttagttcagaaccaagggagcatcaaaaaaatagcaacttccttttgaggcagcttttctgggctggtgcctagaatttcaaaggttacccttgtgctagatgtggcgtttccttatgacacaggcagtcagtgaggtcgttgtttgcgaataggcctgcatcaaatcattgatcaggaacaactctaaattggtcatggatcgtaaggttgaaagaaaggaacccagcaaagctggaaggagtctaggtgagggaacgccccatcaggttagcacttccccgggctttcctaatcgtgtcaaagatttgtctttaaatgcagatagttatcagtttgattcataaccactaactatagctgtaaattaatttttgtaattattgagattttatggtgatttggagttttatagccaggatgtctatgtctctaatggcaggaaatgcacggcactccctgagccagaagtttgtctggcttgtggttctcttgacagcagtgacgtcagtcatgccagtggtggtggtcagatttctgaagatgtatttatacccaagcctgagtgatcaggtatgtttgagatactgtgagtacttgaaggatggctggtggctttcatgaatgacgtccttctctttccaaacagaggcacaggaatgactaagggaattttcctaggtccatggtatcataatagagtagatgattctctcccccaacacgcatcttgaccatactagtcctgaatgtcagtgaaaagagttggattgggctatcagtgggtatggagtgatggattagaagtacttttacccctgactcactggaatcattttggagtattactgtaagagaagggcaagctaccgggaaagctaagggtaccgtatagggaatctggacaaatgatgtgaaagggtctcatcatttggatggaaatagagtattggcttgggaaataagtgagacctgttacctgaggagcagagactaaaagggaacagcagatcgctgagtgcactgggaatgcagagatagaagaacaacagaaagagcggggtatatagagaagcctggaccagagattagaatagatctcaatggctcctaggagacaggacaaacacagcagtgctgggctaggctgagactcatggcagagagaagagaaggagagggagacacattttatcatcccacaaagaatgataacatttgtttgtagggtgagggaggccagaccagtgaggcccagggctctgagcttttcttaccatcatgtttctcacattctggggcatgtgagtcacagaatccccgtgtcggtccttttgagttggttctgagctgaatccatcccataaactgatgggcaatctgaggatgcccatttttcttgtgctaaggataaatgtcatattttgcttagtgagcatcctcagacctgaaaattagaatggatcacttacttaggcaaagcctctggtttccactcactttcctagggagagggaaggcacattgggacctacccaagtgatgtttaggtcttatttatttatttatttatttatttatttatttatttatttgagagctgttgttgaacgttgatgggtacatataccctgtcaggtttcgggacattacctagaagcaggaatctgttcctctgggtccttctgcaccccccccccccacaatgttttcctgagcctctgattttggggctgtgctggagatgttgtttaaaaagcaacaccttcatatttgtaaattacatacacacagagacatatgcagagatacacatacagacataaacacacacacacacacagacacacacacagagacatacacagagatacacatacagacataaacacacagactcacagacacagacagacagacatacacagagatacacatacagacataaacacacagactcacagatacacacagacacacagacatacacagtgatacacatacagacataaacacacagacacacagacatacacagacacacacacacagacacacagacatacacagaggtacacatacagacataaacacacagacacacacagacagacagacagacagacagaaaaacagacagacagacatagacacacacacacacacacacacaccccaaaccagaataaatgaaaagctcagaagtctcatgataagatgaccttccttaagagggagagcattctgagtctaatttctgaaaatttctcctaattcagttactagtgactgcaagatctagagagcctctaaaagggaaagagaggtgaaagacggggtattgggactatagacataacattctatacaaaagtatgctcaagatcccgggctctgttcccaacactgttactaaaacaaaacaaccccctgaccccccaactcaccatatggcccatgaaattgagtcagtaatgaattttatcagaatgtttcttgtttacacgagaaacttttggtagggaaaaaattgattagtgtctagtgtcctctttgaggtggagaatgttatggctttaggcttaacgtttccttttggagtaaagacaaagattctcttgttgtagccgttcaattaagtaacaaaaatggcttccgttttactcggtgtctgggtgtctggagtctaatgcttgggttcacggttgcactgtggcgctctttctctccagatccgccggtggcagaaggctcagcgaaagaaaagacccctgcgaagcagaaggcctcagacccgcaggtcgagctctagaagatctggatacgcgtttgctcaccaggagggctacggagagctcatcacatctggaaaaaatatgcgagcgaaaagtccagccccagcatcggggctggaaaagaagctttataataacacgagctggattgaaaatttatgtaagaaaaccacagacgcggtgagcggctttagtcatgataagacagtgaaattgtgagtcaagatagacttgaccacaaagccgtcttttcacctcatctggggctgagcttaggcagctcaggggccaggagcagggcagatcacattgcttaacttaaatccatggcctccagctgccaacgcctgtcagatagcgatgttttctgcaggattccaggccagatgggcactgtccaatctgtgattctgtagaccaaggcctcatgggacaagtacagattttattaacttaaacaccaatccatccgaattttgaatcttatttatggaaaaaaaaaaaaggccgtaaattagcatctatgttggatgggtcttaggtatgtaaaaggtatgttccaatgatgtgtttcaaccaaaaacgcatgtcaacagatacaccacgtacgtgaagagtgcctttcccagatgcaattgcagaatttaaagtatgtggtgtggtgctctcagatcgagagtgagtctttctctagacttgagctccccttgccaggataacaaagccttacatgctcagagaatgcattaaaaagtccgtggggttatctgtttacaaacagggacaaaagcaactgaatgtttctgccgagggggctgctaacatggttaggtttatagagagagtgttcagactgttccatgtggggacaaaatacagtggctcctctaatgtccctaatgtgtcaaggacttgtgtgacaatgtcagtagtaatccgttgcatgttacatggatgcagacagaaccatcagcgtggtagaacactgccctttattgacagtgttccatgcaggccatgggcaaatgctgctgacagatcccatttaaaaacttgaaacttgaaagtctctacaggcagtctctactgttaccattcactcaggcttaggccattgagactcagttccttttagtgtctagctgtcctgtttatggctcaaacatctaaatgtatagatatatagatgaagctgatttttaaaatagacattgcagcccaatttggggatctgtagacaactcactaggttctgtattcaaattgctgctgacacccacttacctccgtgatggggaggtaaggtgcctttcctgagactcctctacaaagtcaggacgcactacctacctcccgtggttgatgactatcaagcacacattctcaaaccatcagaaacacaactcacatacgaatgtactcatcaggctttagctaactcatcatcagagaagcagaggggagagacttcaggacctgggatgccagtcgccagtgggactgtcaaagaaatgaggttgctaagtatgatagaaagcaaataaaactgtagactggggaatagatttatctacaaggaaataaacaaaaccaaacaaaaccaaccaaccaaccaaccaaccaaccaaacaaacaaacaaaaagtcatgttttccaaaaatcagcaattagctctctagccttccttctctgggttcccaggcaattgctgatcaaccaaaactactttgcacaaagagcttgttaatcttatgtggtcttgatggatgatgggctgggatggtgttaataggtcagtgtcccctgcccaatgggtcttgatttctaagcctaatgttttctaaatgatactcagtgagataatcggtatgcagtagcctactacctagagcctttacccatagcaaatgcttgtcatgattcctttctctatacatatctacctagaaaaaaaggtaagattttcatgtctaatgatcagctaaagtgtgcttgtttatgttttataacaattttgaagactttggatatttccagtaaatgttttaccatcgttggtgtttggtgttttctttctttcttattgggagctcactggggaaactttttgctatgtcgtgctagctttctcaattgagttctctctctctctctctctctctctctctctctctctctctctctctctctctctcatcttttcctctacttaccccccgtccctcctttatatgtctggaaaaaatatatgtcctttgtagcactggagtcaagaattagatgaaccaaacggattcatgtgcaatactagaaatggtcaatttggcaagttcagctcaaattttaaaaggtcatttataaacagatagttcaagagaattgtgggagaaacattttattagttttattttggtcttatgcaaatttggagctgaaacgaaaggatggaccatccagagactgccccacccggggatccatcccataatcagccaccaaacccagacactattgcatatgccagcaagattttgctgaaaggaccctgatatagttgtctttggtgagactatgccagtgcttggcaaatacagaagtggatgctcatagtcatctattggatggaacatagggcccccaatgtaggagctagagaaagtacccaaggagctgaaggggtcttcaaccctataggtggaacaacaatatgaactatccagtgcccccagagctcgtgtctctagctgcatatgtagcagaagatggcctagtcagccatcactgggaagagaggccccttggtcttgcaaactttatataccccagttaggggaacaccggggccaagaagtgggagtgggtgggtaggggagcagggcggggggagggtataggggacttttgggatagtacttgaaatgtaaatgaagaaaatatccaataaaaaaaattggaaaaaaaacccaaataaacacacacagcctactttagatactgaaccataggggatcattttaaacccgaatgtggtgggtgagatgtaattaaaataaattcagttttaattttacataaatgtatcagattatttgtagagtctccctttaaaaaatatattcagaacttaaggtggtaaccttgactttggaaacctcaggaggctgagtttgaactgttacaggcaagagcaaattgtatttccctcgggtgggtgtgcaatctttgctgctctcagggatttataccaaggaaggaaaggagagaaagaaggtaaggaaagtgaaagggggggaaagatggagggggcaggcatggttttatgtctcttgagatggcatgatttttttattagatattttctttatttacatttcaaatattattccttttcctggtttcccctcccctctccacctgctcaccaacccactcactccctcttcctggccctgacattgccctacactggggcatagaaccttcacaagtccaagggagatggcatgattctaagaagcaaatatgatcaatgtcttggaggaaaagaagccacaggcatagagacttatagaacagaacatcttcacgtcctgtgtgtgctcaggaaaaatcttctgcagcagagccaggaattctggcttctcatacctgcatcttgctgctgacacctaaggagctttgtaacctcattcatcgtctgggaagttggacagttttgtctccaaggtcctttctcctttgcccattctgcaacccatcctggtcctctgcactgctatgtgccattggctttgatattcaggagtgtgaagaggggaggagaaagggggcaagcaagtgaaatcaaactggatgctctcttgaggatggggcctgatctgtttgtgttcatctagaacagtccctttcttagctcttgacagaggtgctgtttctatgatggtgcctctcccaggttttgctgaacacatacctcccttccctttctttgctaccattttaatatcaaacatactcagaccagaaggtcagatcctcccagaaagtgagagaaagaccatttaaaagtatctctgccttgtctggagtcaggttaaaaacagcgtccaaaggccactcttcaggatcacagagcacagggtagtgtgcgcatgtcttcagacagtgttttctggtctgtgtagccagtagtgttcagcacacccatgctcagactgattttttagcaaactgaggcatggccagtcgaagagctgaactccctttgatatttcacagaaaggcctgttctgcagtcagtcacaagagtacacacacaagagaagcaaacacatctcaaaggaaaaaaagaaattttagaaagaaagaaattttagaaaagataaatcaaaaagccttacctactattttaccacaataaattgtatcactttgtatgtatttaaccaaagtccctaagattgattaaactagtaataattgttgattatgtcttgaaatgattttgtcttgaagactagaggattaaaagagaatccagaagctgcgacttgtggagtttggtgggttttacgggttgtgggttagataaccatgaggagctgtgatttccagttttgtaccaacatctggcgaaaggtctgcagttcactctgctgcgtcacatacaattcctcaccaggaaatcacagacttttgcaattctcaaagccaggccttctgcagaactgtctggaagccagagatacatggcccttgtatttcaatgggctcatttcgacagacttggaggctcgctgtgtgaaagtctaggtttacagttaagacttaaccaagaaggtgacttatctgccctgagatttccaaactccctgggagatctattttgaaattgatgcagaatgtaaagcagctttgagatgcaggcataaatacccagagtaccaaaaccgatgaggtggcctgaagtctgtggatatctcaatttgacctccataaagcttaaagacaagtttacatttttaatgaattaccgctcaggaaatatacataaaaatcttattggatcagcatgcaggtggttaccttaatttggaaataaaacaacgatccatctggttgtctcattttgtcacatatatgtccatacgccagtgtttgaggcaagcactaatgatgacatttggtggctgatggttttattctgactcctgttgtggtcatctctgtgtagaaggcagcattgtataggtatttagtcataagtcagaacacaaaatacggatagaaataatattgactacatatggagcagccccggaaagaattgtttttaatcaaatttttattagaaaatttaaatgtacataatgcaaactgatgaaagatgaaagatcaagatcaaaatgaaaattaaaaccagttggaacatttgaatgtacagacgtgcaaaaaaaccagacttccatagcattttcataaggattactaattagaagaggaaatactgtcacagggaggccaccaaagatgactactcagacagtttgagccagtggaaagtctttattccagccagctggggctacattcaacttttcgagtcctaagtgtggccccgagtgtccagagcatggggttttgaaggcaaacaacaacaacaacaacaacaacaacaacaacaaaacaaacaaacaaacaaacaaacaacccaaaacacatgctggcatctttcttggtagttacagggagcctcacagaagcaagtagtctaacagaaacttagataaacagtcagccggaggggtttttgtgcaagaagtcaatttaacaaaggctaagataagctgttggctagaagggcttggttcctcgcagtttaacagaagctaagataaattagctgggacatcttgaccttttggctcctaaaatagtttggtaattttccatgggattttccatcaaggagataggattctagttaatggcctcagccagaatacaagatggaggaacctctgtcacggtacaaatggaagtaaatttgaacagcaattcttaacagaacagaattgggaatttaaaatagctcttatagtcagatgctagcctcaccaagcacagccttttaggttataaatacaggatagaaaacatcaaatgagatttaattacagagtaattctctattggaagttatcttttccctcacacaggtccctgtctatttcctgaaatctacccttcctcactcccacgcagatacacacacataaaagattagaagctcagatcctcacatgctgtttgtctttctgagcctgggttacatcacttaatataatattttccaattccatgcatttttttttggaaaattacataattttatttcctatggctgaattaaattccactgtgtccaagtgtgccacattgccatcctccacaataccaagatgaatgtccaggatgactcagcgtccctgctgctgtgaccagagcagcaatggatgtggatgagcaaggttctgcttttgctttcatgagccaaggtcttttgtgctcccaagtgaattttaaagtcacttattctacgtccctcaatatgaagtttatattttgatggaaactgctttgactctgtaggttgtttttggtaagatggccatttccacagtattaattcttccagtacaagaggataggcactcttcccagcttctagcaaaaatttttaaatttctttctttagtattttaaaggtttcattgtagaagccattcacttccttggttaggtttattccaatgtattttctgaagaaactttgagtgagattatttctctaatttcatcctcagaagaaaccaatgtttgccattgttacataggagggctactgacttattttgtacattcatattccaccattctcctgaaagttctttatcagttctagatgctttatactggtgtctttaagacctcatgtaggaagccgtaccatctgcaaatgctctctgacttctcccttttctacatgcatccttttttatttgtttttcttttgtattgctctagctacaacttccaggtttcattaaataagattggagaaagcacttttatcttgttactgaatttagtgcaatgcttttagctttcccccatttaatatacatattgatcaagggggaaaataacactaagttgtaaatggagaggaaacagcagtatgatctaaggggggagttcattaagatcagagatgtttatgaggaagtggagcaacaagatgatgtaagggaggggaaacattccatccctcagggaagctgattaatctcaggaaataaacaaagagccccaggaagtccctgaaactgaccaggtttactaggatccctcctccccaggcatatataaactgtgggaactgctgggaggcactctcagacaagcagaattcccaagaaaagtgacagattacccaagctgtccaaaagtagtggatatcagcccatatcagccctactccctgggagaagcagagagcagctgagctgcttggaaaggacactctacaagctattgcactgcctctagtctgctcagtgtgctctcagtttctagcttttgtgagccatcacttatgctggagaggactttgatgctgcaactctctttgagtcatttctgcccctttcagtaactccccacccatattcctgtaagaaacaccaataaaattcatcggcttaccaagttggactttggtggtatctgttctttggtttgtcattgggtttatctgagctgaatatatgggcttcccccaacaagtctccccagaaatagtgtcacagaatagagcacagcttttgagaatcagttctctccttctactttatgaagtcagtagtatcctcatatattaagcagttaaagacagcaacaaaattatagatacacttcccagataatcataaatgtaaagtttgtccataacacaaaccaaacacaagaacaaatcaaaaagacctttctttgaaatcaagttggcttcgttccagagctgtaggaaatgttttaacacacataaaacagtaaataaaattcatcacgtattcaatgacaaaaatcacatgatcatctcaattgatgcagaaaaagctttaacaaaatctctatctttttatgatacaagtcctggagaagatagggatgcagagaatatctcaataaaacctataccatagggatgtagagaacagatctcaataaaaccattgccaatatcatgataaatggaaagaaccttgaagcattttcattaacatcaggaacaagacaaagctgtctaatctccaccactcctattcaatatagtacttgaggtcatagtgagagcaataagagggggaaaataacaaataaatattcatttattacaaataataataataaactcaccactagactgaaagacttctacagtgaaaatttaaaggtcttaagaaaaaattaaagacaccagaaggtagaaagacatcccacggtaaatatagaactaacattttgattcaatgtagtacaaattccaattccactcttcacaggtatagggaaaaaatcttaacattcatatggaagcacttcagaccctagatagccaaaggagttctgagcaaaaagaacattgctgaaggcatcattacacctgactttaagttatactacaaatccattgtaataaaaactgtattactgactcaaaaataggcatttatcccaatagaataaaatacaggacactgatacaagtctacacaactacaatctgatatttaccaacaacataaagagtacagattggatagcccagcaaaatagctcagtgggtataagttttcctccctcctctatcttattagataacgtgagaaatagtggtagttcttcagagttttggttgaattcggtggtagactctgagcctcagtggattttggttggaatgggtttcattgccacttctactgtgttatttgttagagacctatttaaattgttatatcatttggtttaatgtttgtagttcatatttatctagaaattgatttatatcctcttatattttccaattgattaggacagagcttttaaggcatgtcctgatagttttctgagttcctttcttttctatgatgattggaacacatttccatttcctactctaatcttattattttggatttaattttattaatcattctcctttgattaaattgttggagggtttatcaatttggcttatattttcaaagaaacatcttaagttttattgattttgcttatttatttaacttctgttttattattttctgctctgattgttatgaattttgtgaatctactactttggggcttgttgcttgccttttcctgtcttaggatttctatggctgtgatgaaacactgtgaccaaaagaactggagctataacttctaccttaggactgccttcatcttatcccattggttttggaatgttgtatatttgttttgtttaactctaagacattttcttttcctctttgatttcttcaatgacacattaatcattcaataatgtatggttggtgtctgtgactttgcatcgatcccagagtttctcttgtgtggttttctagcttcatcccattatagtcagataaaatagaagaagttatttaaatttttgtatatttattgagatgtgctctgcatttcccatagatgatgtgtcttagggaaagttccactggctcctgagaaatatgtatatttttcagtgcttgggttgagtattctgtaaatatctgttatgtctgttttatatattatgttataaatctgagagtttttttttttttttggtctggatgatctatctaatggtgagaggaggatattgaagtcatccaccagcactgtattgaagttaatctgtgactttatgtttactgatattttaattttatttatgtttatgtgtgtgtgcacatgcatgcctatgtacatgtatgcccattggatctcctgaaacttgagttaaaggtggtaatgatctgccatgtgtgctttgataccctaatctgggtcttcaacaagagctataggtcctcttaaccactgagtcatctctgcaaccatgggtctgcctctgtt

SEQ ID NO: 730 - DNA, 2287 bp, Mus musculus
aagtggagcgggtggtgaaagccaatgaccgtgactacaatgagaagttccagtatgcggacaatcgtatccatacgtccaagtacaacgttctcacatttttgccaattaatttatttgagcagttacaaagagtggcaaatgcctactttcttttccttctgatactacaggaaaaggaggctacggacttctcaagcaagtcgaaatcagaaaaaacactgcatttctttgaccagagtctaatggaatccattgagctgggggaccccaaagtccatgaattccttcgcttactcgcactctgccatactgtaatgtcagaagagaacagtgcaggacaactggtttaccaagttcaatcgcctgatgaaggagctctagttactgctgctagaaattttgggttcatttttaagtctcgaactccagagacaattacaatagaagaattgggaacaccggtgacttatcagttacttgcctttttggatttcaacaacatccggaaaaggatgtctgtcatagttcgaaacccagaaggacgtataaaactttattccaaaggggcagatactattttgtttgaaaagctccatccttccaatgaagacctgcagtccttaacatcagaccatctcagcgaatttgcaggggaaggcctccgaaccttggcaattgcttatcgagagcttgatgacaagtactttaaaatgtggcagaagatgcttgaagatgcaaattctgccaccttggaaagggatgaacggatatctgggctgaaagcaaaggaaaatttgcttggacaaagcacgagtttttccaatggacatgcagtttatgacaacaagcagcggttggggttggacgcgggtgcaggagaggctgtgacaggagaatatgccttagtcataaatggccacagtttgaacggtttaaacgcttttggaagacggtgggggatggcgcagatcagtttttcagttaccgttcttgcgaaggcccatgcccttgaaagtgatgtcgagaacgatcttttggagctcgcctgtgtgtgtaagactgtggtttgctgcagagtcaccccactccagaaagcccaagtagtagagttggtaaaaaagcacagaaatgctgtgactttggccattggtgatggggccaacgatgtcagcatgattaaaagtgcccacattggcattggcatcagtggtcaggaaggactgcaagcagtcttagccagtgactatgcattggctcagtttagatatctccaacgactgcttcttgttcatggaaggtggtcctactacaggatgtgcaagttcttatgctatttcttctacaagaactttgcgttcacccttgtgcacttctggtttgccttcttctgtggcttctcggcacagactgtctacgaccagtggttcatcactctttttaacattgtttacacctcactacccgttttagccatgggaatgtttgaccaggacataaatgaacagaacagcatggactatcctcagctctacgaacctggacaactgaatctcctttttaacaagcgcagatttttcatctgtgtggcacatggaatctacacctcattagcccttttcttcattccctacggggccttttacaatgtggctgcagaggacgggcaacacattgctgacctccagtcctttgcagttaccgtggccacatcattggtcattgtggtcagcatacagatagccttggacacgagttactggactgtggttaatcacgtcttcatctggggcagtgttgccacctatttctccattttactggccatgcacagtgatggtgtctttggaatcttcccacgccatttcccctttgttggaaatgcacggcactccctgagccagaagtttgtctggcttgtggttctcttgacagcagtgacgtcagtcatgccagtggtggtggtcagatttctgaagatgtatttatacccaagcctgagtgatcagatccgccggtggcagaaggctcagcgaaagaaaagacccctgcgaagcagaaggcctcagacccgcaggtcgagctctagaagatctggatacgcgtttgctcaccaggagggctacggagagctcatcacatctggaaaaaatatgcgagcgaaaagtccagccccagcatcggggctggaaaagaagctttataataacacgagctggattgaaaatttatgtaagaaaaccacagacgcggtgagcggctttagtcatgataagacagtgaaatt

SEQ ID NO: 731 - protein, 756 aa, Mus musculus
  VARIANT (1)...(756): Xaa = Any Amino Acid
VERVVKANDRDYNEKFQYADNRIHTSKYNVLTFLPINLFEQLQRVANAYFLFLLILQEKEATDFSSKSKSEKTLHFFDQSLMESIELGDPKVHEFLRLLALCHTVMSEENSAGQLVYQVQSPDEGALVTAARNFGFIFKSRTPETITIEELGTPVTYQLLAFLDFNNIRKRMSVIVRNPEGRIKKKGADTILFEKLHPSNEDLQSLTSDHLSEFAGEGLRTLAIAYRELDDKYFKMWQKMLEDANSATLERDERISGLKAKENLLGQSTSFSNGHAVYDNKQRLGLDAGAGEAVTGEYALVINGHSLNQAFGRRWGMAQISFSVTVLAKAHALESDVENDLLELACVCKTVVCCRVTPLQKAQVVELVKKHRNAVTLAIGDGANDVSMIKSAHIGIGISGQEGLQAVLASDYAQFRYLQRLLLVHGRWSYYRMCKFLCYFFYKNFAFTLVHFWFAFFCGFSAQTVYDQWFITLFNIVYTSLPVLAMGMFDQDINEQNSMDYPQLYEPGQLNLLFNKRRFFICVAHGIYTSLALFFIPYGAFYNVAAEDGQHIADLQSFAVTVATSLVIVVSIQIALDTSYWTVVNHVFIWGSVATYFSILLAMHSDGVFGIFPRHFPFVGNARHSLSQKFVWLVVLLTAVTSVMPVVVVRFLKMYLYPSLSDQIRRWQKAQRKKRPLRSRRPQTRRSSSRRSGYAFAHQEGYGELITSGKNMRAKSPAPASGLEKKLYNNTSWIENLCKKTTDAVSGFSHDKTVKX

SEQ ID NO: 732 - DNA, 37256 bp, Homo sapiens
ctcattttctgttatatagtagttcttttgtctttttgtctcttgctgtcttcctttgtgttttgtcagtctttcgtattaagatgctttgattcctttctgtttttcttttatgtaagttctataggtactttttctgtttgccttggagattacataagatgtcttatagttatgatagtttaagttgataacaagttaaatcacatacaaaaatgctatacttttaaatgtcacaatttgcatctgttcattttatgtacctttaagctattgtggttacagttattttaaatagtttggtctgtcagcttttatatttgaatgaaaagtgatttaactaccaccattacagtaatacagtattctgtattcatccatatatttacctttaccaatgactttcatattttttcacgctatcatgttgctgttttgcatcctttcatttcaatctgaaagactccctttggcatttcttgtaaggcaggtctagtggtgattcactccctaagagtttctctctgagaaagtctttatctctctttcgtttttgaaggagagtttagctgggtctgttattctttgttggcagatgtttttttcagtcctttgaaaatattgtcccactccctcctggactgcaaggtttctgctggaaaatctactgatgatcttgtggaggttcccttgtacatgatgagttgcttttctcttcctgtttttaaaattctctttgacttttgacaatttgattatattttagtgtggttttttttttgtttgtttgtttcatttaatttggtgatctttgggcttcttgaaaatggatctccatttccttctctagagttgggaagttatcaggcattatttatttaaataagctttctggtcctttccatctctcttgtcctcaaactctcataatgcataagctgttctgtttaatggtggcctatgagtccataaagattttttcacctttttcattctttttctcttttttccccttaactggataattacaaatgacttgtctttgtttggtgaattttttttcctgtttgatcaagtctgctgttgaacccttgtagtgaatttttcaattcatttattgtattcttcagctccaaaatttgtttttaaaaatttttttaaagtctttttgttgatatttgtaaagataaaaaaaaatttttgttaattttgcttatgcgtcattttcttgagcttgtagagcatctttacaacagctattttgaattatttgccaggtaattcatatacctctgtttctttagactaatttctggaattttattttgttcatttctttttattttattttttatttttttgagatggagtcttgctctgtcacccaggctggagtgcagtggcgcgatctcggctcactgcaagctctgcctcccaggttcatgccattctcctgcctcagcctcccgagtagctgggactacaggcacctgccacctcgtccagctaattttttgtattttttagtagagaccgggtttcaccatgtttttttaatgactttttttttaaatgacttttcttacttctattcctctttaaatcactaggatgtggggagatatgggactactgtgttttctgtagtttcttttttaccccagtgctctctccaatttcactttagtttctgcagtagccctatttttttcttcttttttgaagactgccatgttattttattttctgctgattttctaaatacctcctccccaagtttctgtcttgtgttattgctttatagattgttggcttcatccaattttccttttttaaattaaggaggaaatgtttggtcacagttttcttctgctttattactagtgaatgtacttcatcttttattatttttttctgtacattacttttttttgtagtatcattgtatgattcctatagaggtttctttttattttatttttaatatagttttatttcaatagcatttggggtacaagtggtttttggttacatggatgaattgcagtcgtgaagtctgagattacagtgcactcatcacctgagtagtgtgcattgtatctcatatgtagatttttatcgcttaccctcttcccaccctcctcacttctgaatctgcaatgtctgttacaccactctatatacctttgcatacccatagcttagcttccacttataagtgaggacatatggtatttggttttccatttcttagttatttcacttggaagagtgggctccaacctcatccaagttgctgcaaaaaaacattttattctttttttatggctgagtagtattccacggtgtatatataccacattttctttatttactcatcagttgatgcccgttttaaattggttttgtatctttgcaattgtgcattgtgctttgataaaaatatgtgtgcaggtgtctttttatatgatgacttattttcctttgggtagatacctagtagtgggtttgctggattcaatggtagatctactttcatttcttggagaaatatccatattgttttccatagagggtgtactaatttatattcctaccagcagtgtacaagccttcccttttcaataaaggttttttttaaattattcattattgtaggaactgaatttttctttgatcagttaattgcagaaggttcattttggaataagggtaagggtgatttctttgttctggttcaggattttgtattaaatgtgattaggtgttaccttgcaccagcctatggcaataggtcaaactttttctctctgctaacccagagtcagcatgtttcctggaaatttttattgtctctggaattccttgtttagttttgccttctttgtctctgggatcaaaccaagtccaggaacctcctcttgacagttgactcacaccctttactattatagtaaataaaggttatgttccttccctctaagcattgtgtgttagtgggctttttttcctgtgagattttaaccactgtgagtgctctctttgtattatcttgactcttctccctttattacccctcccctataaatgtctactccctatcccccaccataattctttcttttcccagtttggttgcaatcacacctaattcaaaaaggtgtggcttgggttctattaatttccctaaaaatatagtttgctttctctttctcattctctgtcttgctctctctgtctttctctctatgtctctcgagggtgaattctagcaagacaaggagggactctgtttttatgctgtgatgaacaagtcaaaaatctaaatgttattgaccaattggtgctctgcctgaaaattcctccttttttgatttcagatacttttagagtgcaataggcaaatcatccagaagtgaggaaagaagccttagtaattgtctagaagagtttggccttttgtagactaagtcattgaggacctagccccttattctctttccagattcattttcggccacatgaaccagatacttcagccatatggtactccttagagtctttccaaataaaccaccctcatttttctttgtctattttgtttgttgattaaaattttttttataatttcaacttcaatttagattcaagggatacttgtgcaggtttgttacatgggtatattgcatgatgcggagatttgaggtatgattgattccatcacccagggagtgaacatagtactgaataggtagttcttcaacccttaccccactccctacctccctgctgtagcagtccctggtgtctattgttgcacctttatgactatgtgtacccaatgtttagctcccacttataaatgagaacatatagtgtttgattttgtgctcttacattagtttgcttaaggtaatggcctccagctgcatccatgtggctacaaagggcatgatttcattcttttttatggctgtatagtattccatggtgtgtatgtaccacattttctttatccagtccattgttgatggcacctgggttgattccatgtctttgctattgtgaataataccatgatgaacatacaagtgcatgtgtattttcggcagaacaatttattttcttttgggtagatacccagtaatgggctgttggcttaaatggtagttctgttttagattatttgagaaatctccagactgctttccacagtggctgaactaatttacactcccaccaacagtgtataagcattccctttactccacatcctcaccagcatctgttgtttttggctttctaatgccattctgactggtgtgagatggtatctcattgtggttttgatttgaatttctctgatattggcctgtagttttcttttatcattgtgtctttggcatattttctatcagggaatgctggctttgtagaatgagttagagaagagtccatcctgctcaattttttgtagtagtttcaatagaattggtaccagcttttctgtatacatctggtagaatttggctgtgaatccatctggtctgaacgtatttttggtttgtgggtttttaaattactaattcaatttcagaactcaatattggtctgttcaaggtttcaatttcttcttgtttcaatcttgggatattgtgtgtttccaggaatttatccacttcctctaggttttccagtttgtgtgcatagaggtattcataatagcctctgaggatcttttgtgtttctgtgagattgattataatgtcacatttgtgttttttattatgttttttggatcttttctcttttttttctttgttaatcttgctagtggtctatcaatcttgtttattctttcaaaaaaaccaacttttggttttattgattgtatagacttttgggtctcaattgcattcagttctgctgtgacatttgttagctttggtgttagtttgttctgctagctttggggttaattttttcttgttcttttttttgtaggtatgcgttaagtcattaattgagatctttctaactttttaaggaaattgtttagcattataaactttccccttattactgcttttgcctcatcccagagattttgatatgttgtgtctctgttttcatttatttcaaataatttttgacttctgccttaatttcatactttacccaaaagtcattcaggagtgtttaatttacatgtaattgtgtggttttctgagatcttcttggtattgatttctatttttgtcctactttggtctgagaatatgattcatataattttgatttttttgactttgttgagatttgctttatggctgagtatgtggttgatcttggagtatgtgtcacgtgcagaagagaagtatgtatattctgtggttgatgggtagagtattatgtagatgtctattaggtccaattggtcaagtattgaattcaagtccagaatttctttgctagttttctgccttgatgatctgtctaaagctgtcagtggggtgttggagtctccctctattattgtgtggctctctaagtctttttgtaggtctagaagtacttgttttatgaatatgggtgttccaatattgactgcatatataatttggataggtaagtcttctggttgagttatatcccttatcattaggtaatgcccttctttgtttttttactgttattggtttacagtgtgtttcatctgttagaagaatagtgatccttggtcttttctgttttccatttgtgtgacagaactttctccaactttttgctttgagcctgtgggtgttgctacatgtgagatgggtctcttgttttatccagtttgcctctgtgtgccttttaagtggggcatgtagaccatttgcattcaaagttaatattgatatgggcagttttgaccctaccatgaaactgtcagctggttgctttatagtttctattgtgtggtagttctacacggcctgtaaactatgtacttaattgccacactcactttctcacataggcctttgcaaattatacccttggcttgaaacaatatttgcctacctttctatctgggtaactcctgctcatctcttcagctttggcttagatgttacttgtttgggaatatttcctgacacctctcttccttcccccgggtccaacgtgcttgccttatcatggcacttaccatatatggcctgtttttcagtgtcccaaaatagactggatttcattgagggcaggaatagcatttggtttaccattctatccccagcactcaaaacattgcctggcccacagtaggtgcatgataaatatttgatgaataaatgttcactgcctatttcaaagcatactgtattgtgtattaatcaatgaatggctgatatatcctgaaattctggacaatatgtgtgttcagtactggaattactattaaaatattctttttaatatttttgtcttttcataagagttaaagtactcatattttgtgtttcaaatatcttaatagttggctgaaaaatgtcaaaccatagatagtctaagatccatgaggctagagatttttgttttgttcatttctgaatccctatcacctagaaaagtgcttggtacgtactgggcactcaatacatgttttctgaatgcacaaatgaaaacacggagtttgcctccttaaatattgtgaactatacctgtctcttgtcttacctagtcctggccctgtgaggcttaattgaatatgtgaaggtctattgaattcctccctgcaaaaagaggtcttcagtataaacatagcacatattttctgggtagaattggggcagctaatgagggtttttgtgccctagtgaaaagtctgctacatccttgatcttaggggcttgaaatcacaaggaccaccttctctctcattcaccctaaagtgaaacgtgatagccaataagtcctgcctttgtagagttcgctcagtcttggtgttaaagatgcctgagcagtaacaagtcactgtacattaggaacatttctgtgataaatgtgagagataaaaaccaaaatgcagtaaaaaatatgacctaagataattaagaaaatagaacagaacccaccaacagttataaactataaattggaaaactcgaacatcagcacagagatttgggaagttataacatccatgaaacaagaacaagatgctctggagagaacacaggaaaaaaagaaaagagttcctggaaattaaaaaaaaaaatcttgacaaaccaaaacattcaatagaagggctggaagattaagtcaagagactctcccagaaagtagaatgaaaagaaagactcagaacatcagagaataaagacaaaataaagggtcaactggcagatccaaaatttaactaagactgttttctagatgaaagaatggaaaaacaaacaaacaaacaaccaaaaaataatgaagaggagaaaattataaagaaatatcagaagagaacttccccaaatcttccaattgaaagagtctcctgaatactcagaaacaatgaatgaaataagatcaatacctctaaaattacaaaccagaaaggataaagagaggaacttaaagcttttaaaggagagaagtggggcacttaccaaaagatgaaagtcagactaacatcagatttaccatcagcaacacaagatgccagaggacagtggagtgatcccttcaaatggctctcaacctaaaattcgatattgtgtcaaaccatgagacaagtgtgaggcaggataaagacattttcaagcagaaagcctcataacttttgcctcccatgatctttttcttatgaaatatgtttaagatatgctacaacaaagcaagagaatcaattaagaaagggggtggcatggggtgaggaaacagtgactccagcccaagagagtaatcccaggatgcagctgagcagcagacctgacaaacaatcagccttgagtgggtgacaccacgaaggcccatataacaaagtgcacattttcctctgctgtgaaccatagttcaaagacagacttatgtacatatcttttattcattttcaacttttagaatcaatctttagaccaataaaaagtatttaagtttggctacagaaaagaacacaaatgttttaaacctctatagtgaaatagaaaaaaaaataaataggttggagggagaagtgaagaggagatgaggagtgggtaataacgtcatcttaccagttagggagtgtttataattgatgaactgaaacaaaacaaaacagccttctgtatgttacttagagttgcagaaataatcattaaggaaattaaactggatatgcctatatttttggaaaaagaaagtggagaagtaaagtaaatgacttaaatcttcgtctgattttggaaaaggtctaatatttataaatccagaaatggtaatatatgtacataatttacagtttttgggataaccgtttgatgtaccttctgaagtttgagagtaattttctctggggagtgggactggggctgtggtgatggaggtgggggcatgaagagtctcttgctttactagatatgccttaatgtagtatttgattttgtaactctttgcatgtattgctttgattgaaaacattaaaagtacttaaaaaagaaactagtatactgtaaacacttgatatatggcagccgttattatattagtaagggggcagggaaataatccagaattatattaaggagttgttatggcaaagtatttgaagcatggatttttggctaagtttgagtcctggctgatggatgtatatggttggccttggcaatgctcaggttctcatctgtaaaacggggataatagtagtatccactacacatcattgttcggaagattatacgtaatattccatataaaactgttagcataaagtcgggcctattataaagataataataaatatttcttattttattcagtattattaattttagaataaatttgatttaaaggaacaaaggacctacatgtggctccaattttactgtaggtattaacaagctttgtgacacagaatagataattgcaattgcccacagcattgtttctctttaaaaaagtagttataatcctatctgcttttgtaactttagaatcaattgcaaaagttaatgcagtttctctttaaaagagtagttacaatcctatctgctcttgtaactttagaatcaattgcaaaagttaatggagtctttaagaataaaaactttagcaataatcctgggggaggaaatgtggactctgcagctgataaagctcttatatgtaagtgttcagagtggaaccttctgtaggcttgctcctgaaatagatacaggctcacagttccttatcgaaaactttggagccagatatatttagaaatttaggattttctggttgtagaaagacaatatggtgttgtctgccattttattgtgcaataactccagtgacatctgagaaagtacctgtaatcaaacacattaatgtttttatattagaaaatattaattcacaagtattaggtaggctttaagaagccatcattaaatacataacattccaggtcagatattgctgcacaaatgggttcaagtcagatcaggttttgccgtaaagtaggttttgaaaaaactttgcattttctgtggttttttgtattttgaagttgtattgagcatttgaggatctgtacagccatcccatatagttttgtgatttttctttcccatatacttttggaaagttcacttctttggtacatggttctgaaatgagaagattatatttaacagtaatgatgaaacagccattttagtgccagacatttgaggctgcaaaataatacactaaaaatacttgggggaactatttttgaattttaaaagataattattggaatgaggttttggttatttttgttgttgttgttctcctacaggaaaaagagcctgtggatttctcagtcaaatctcaagcggatagagaatttcagttctttgaccaccatctgatggaatccattaaaatgggtgatcccaaagttcatgaattccttaggttacttgctctctgccacactgtaatgtcagaagagaatagcgcaggtaagtgaaaagttatgtctgagtggtgaaccttgtttttgttttttaaaattgaaactgacactaaatttgaaggatttacaaattaagcatttgagcagtgagccttgttttttgtttttgttttttaacacagaaactgatgttaaatttgaaggattttcaagttaaagatagaacatagtttatatcccatatgttttgaaaaaatgtggagagatttaagtgaaaaagaaaagaaacaaggacaatggaaaagtgaggacccaaatatgctagtcaagggatgacatcgttcttacaattgagcaccacatttgactgtaagcttctgggtagccaggacaaatactgaaatacagttgagtcacacatctctcattattagtatgcatatctaatagatgcagatgaccttcagacatatgcttagaatgaattttcccagtaacagagataaattgaccttgatattagaatagtcttatttaggctccattatgagaaggtcctcacacttgtgagatggttgtttggaactcagggttcataggatagaacaaaaccgcttgggccacttaacattttgaagctgtgagacaggtagataatggtatagtgaactggcttcttgccctagttgaacctaatctattccatttatatgttttcctcagcccactaattcttcctacaaggtctttggttctttctcaaatctgtttaattttatatctcaattttatttcttgaaatctgttaaatatattgcatgtgctgtttctgatacttccaatatctaatttttttttcagatcttattctgcattgtttctgttggttcttaggttttacttgttgttgttgtatacttttcactgtgagctgaccattttactttgaacttaatttatataaattttttgggtccagttggttcctccagaaaggatttacatttgcttcaatgttctaatgtagaaacattttaaactaaagtttcaacttgatttctttcaggccacctagatattgtgaattcagaatgcaagtttacatgagagtcagtgattggttataaattcttggcagatatttttttcccttccaattataaggagggttctatttaggcaagttttattccaagccctcttcaagggggcatgggtgtccagtttacccttatattgagagtagtctttgggggacccagttttgagaggccatctttcactggactctcaccttagacaggtactgggctatggctttttaaattaaagcccagagacattgaaaaccaatgatcaagttctcctggttcagaaaacaccctcaaggcaaatgctggctaatgtgcttctttaatcccttaagtgttctttttctcagtctctgacctgaacagttcttactttcttgcaagttcatgaatgtatttaagaatattaaaatgcttttatagttgtttgtagcagttgagattggtcctgacacccattccaccatgttaccagaggtagaacttatgttatttcgtgggtagatcaagtaattgctttaagttttttccttttgtgaatttcaaaaattcattcatgtctattgtattaagtggaacaatacaatacaaaaatttataaaggtgaagctaatggtagcttccctgaactccagtctcacccctacagaggtaaccactggtaacatctagtgtttatcatttcaccctttcctctggctcataaatatatacatatattcaagaatatttctagatatttaggtgatttgtttctttttaacaaaaagaactcatagtatagccattaatatgcaacttgtttacttaacaattatcttggacatgactataaatcaggaaatatgggtctagctatgcctaattaatagtctttaaacattaattaattttcaaattaatttttacatataaatataatataattttatataagggcttactttatatatgctgttttataaactctctctctctatatgtatatatacatataacttattttattctttttgtctcctctcccctcttacccccactccaactacacataatatcaggtaacaagtattaatatcctggtttgatttcttacatttcaagggatttcttgtatgcattctcataaaatggtcattagtggcagactgaagtagaatttggagtatctctccatcactctttagctgtgtgatctcatcaaactcatgtaacctctttcagtcataggttccaccagtataaaatggaaataataattttaataatctctacctcaaaggctgccctgaggattatttgggttaatatatattaaaatgttttagtttacaaaacattcatggcacatctctagtcacagaaaatacaaaggtttgatctctaacctaagaaactgagcacagtgaagaggcagactcagaaatggatgttttcctataagatgacaagggctatagcagtgatatgcatagagtcctatggtatcccagaggacagataccagattgagctgttggtgagtagaaaagatctgaggacaggaaagatttttagacctgatgcttgagttgggtgttaaatactgagttggagttggcattggaactctatgaatgttagctgttagtcagtattgatacacttgtttctttaccttttaggagagctgatttaccaagttcagtcacctgatgaaggggctctagtgactgccgctagaaattttgggttcatttttaaatcccggaccccagagaccataacaatagaagaattgggaacactagttacttatcaattacttgcctttttggatttcaacaacaccagaaaaaggatgtctgtcataggtatggttggtagctaagactatttttgatcttttcatactgttgtggttatgcttttcaaggattaatttcacttttggctatgtgctgagggttgtgatagttttgaaactttatgtataaactcttgtgttgctcaacctagcctcaatactgcagtgatatataactaacatttatcaagtgctcattatgtgcccagcactgttctaaatgccttatatgagtatgtacaatgtatcaataaaaatataaaaaaattttaaaaataaaccacaaaaatgctctccatgaattaatttattcaattgtcccaacaatcctaataaggtaggaactattatatttatacccattaacagataatgaaactaagacacagaaaggttgagtaacttgcccaggttcgcatagtttgaagtagaatagctgggattcagacctaggaagtgtgactgcatagcccattcacttgttcactatacagtactggctccggatgagtttctaaattgcttggcacatgacagttgttgtgaacatcgtcctcagcctcctcattatcattcattttctctgtccacctccattgctggagaggaccacctaatattatatttagcaccacaacaaatctgtgctttcctgactcaatgctaactcttagtgctgtgtcaatgtcactctcattcatatttagtgcctttttccattttcacaatagatattctaaaccttggctgtttcctcaagttctcaacactgctacaatcttctttactcttgaaagctaaattcatctcctatttctctaagaaaataaaggccctcaggaatgcacaccattaagtcttttccccatcctccctcttcatccctaagctgtatctttaataatttactctcctgcatcagaaaacaattgctctttttccttttcaaagctgaaggtttttccagtcccattccttatccctccttgcttgctcacttcttgcttttgccttcaatttctcaattactggctccttccttcagcccacaactatattatcctcctgtttccttaaaaatattcttcatatgctggtgtccactgactttgccactatatttttctgctttccatcccagattagtttctcaggtcagtttttgcttcttgcctttcttactcttttcatcccattagggttaagtttcttcttcctctactcaagaagaaatgctttctcagaggtttccattaaccttgtaacttcccagtccaatggcttttccttattaatctgttcatctatctatttttttaaacttagtagtatttgagactgttggccctgttttcttgacactcctgttttggtctctgtaaactttctggctcctgtttctcttcttgtcccattgttttctttctcaagctcctttgctgactattctccttcatcccattcttcaatattgatgtccttttctctttttagctcctgtgttcttcttggatgatcttgaccacatacatggtggtagctattgcttatattctgtgaccttcttatacagctgtttagcttcgatctctttctagagtccaaacacacattttcagcttccgttatgtcctgtcactggattgttacctaaagttttatgtcaaatatggaactttctttctcacaactatagttctttctataatctgtattaaaattcacagttacctctctcattgtatgcttgtccatgaactttataatgaattcttttattgaatcgttgcaactgcatgtaacatgcatgtcccatttaagacaagaggagactaaatgcaaagattttaagtaacttgccaaagattgtcacacagctgtaacacaacttgtggcgcagttgggtaagaggcagatcagatatgtgaacccaggttttccaaaatctggtcttttaaggcctattatagctcactcacttttttccatagcttttgtgccccttggctgatggttctcaaactttacctcccatcagcgtcaccaggagggcttgttacaatacagattgctgggcctcagcctctagtcttatttagctggtctgaggtggggcccaccaatttgcatttctaacaagcttgtgggtgatgctgatgccactggtcagggaatcacagtttggggaccacttctctagactaatagatcctcaaatactatccattattttccccagagatgtttgagacatttctctaatccatctccttctcttccagtctcaggccttaacatctctagaatattctattgtcaccctgtttgtaagtctctcctcagaggcatcagaataatatttattaaaatggcctcataaacccctttttaatcatgaaagctttttgtccttttttcctaattcccagtaccctgccttagttaagtttcttgtcactgcttgcttgtattattgtaatatcttcaaaattattcgcttttaaaataatcctctatgctgtcaccaggatattctttctaaaacataggcctgattttactaccccctacttaaaaagcataggtggcttcccaaaccttaaaagaaaaagtcattagtatgacgtgcaaaattatttgcaatctgatctcaatctacttttcttctactttccaaaactttgagctcaactagacctcaccatccctggatgcattgttgctgttataccctttggacatgctgttctcctgtcttgaatactcctttcccccacttctcttcttggaaatgttccctactactcatctggtaatgtccaattcaaatgttacccatttttcaattctttttctattctccaaataaccacattcttctgtgttccccagaatgccttgttcataacaccagtgtggtattaattccatgacactcacaactatcctagtcattaaactgtgtgctacctcaggcaagtgctgtaccttagtcttcctaaactgcccaaggcaaagcacagagcttggcacatgataagttttctataaatgtttatgaaatactactcaacccagcactttgtaaattatgaatatcctactcatggtatttaatcaatttcttactatttaaaaagtgtttatacgtaacagtagggtttttggtctctaactactagaaactagccttgaaagatggctctcagcaggtaaaaaccaaataacatctgagaatgtttatttttatttttatgttttgacaacagggaagtcatcaccagtgccactgatgagcacacatgccgttctaggtgttggcttaatgttgtatcagcaggagctatcttctatttacagcctcagggaaggtgttattgatgttggtttggcccagagttggtttctttttgctctgagggtgttgacaaaaacctaaaattgctacacagggagatgtttggcttttcctcagcattggtcaccattacaggctgtggagaaattgcagcctaaccacaaacatcagatgtttgccttaatggatcccatatgaggaaaggtagtgctctaccacagaatgcatgaaggtttgctggatttatttttattctgcttggtttttaatcaggaggatttttagagggactctaccagggcagaaaagtctttgcatgataacaaggcagaaaacaatcctggtctcatgatcgtcacatgggttggtctgtaggaacaacaccctgatgcaaaggctcaggcattgcttctgttgctgctgatcctcccctttctcctcctccctcttctgcttccttgtttttgggtggcagccattattcactaaatcatcaatgtataatttcaataccagtagtactttcattctgaagaaagagccctgatttaagtcagaagtatctacataaaaattgatttctataaaggatttttttccagagggaacagaatatactatattagtaaaaaatataaatgacattatatagttttggaaggaccaattctactaattctgtaaatagaaatacagagataaaattcagagatagctattaacaggggcaagtggcagataaccgttaaagaagaagaaattacaagaagcttcttggaaggctcttacgagatctttagataaaagttgctcaactctaaactttttcaagattatcaaagtacaaatcacactgtcatgtgacaggcatttctctgtgtagatgtatgaacagcggcgatatggcaaaatagaattatttaccacccttcacagtgctgctgttgcatctaactggaagccatttgtgacattttttctttcctttatgtcacaaaggcatagcttctgctttcaataaattgtgcacaattttggttcatcttaattaagtaaatattgatttaagttccccatatgttccagggccttcaagctaagggagaatgtgaaaagttgaaaggtagttctatgtggctgcctccaagagaacatggtaaaacagactggatagtgcagctgttaataagctctatatgtcatgtcaaggagtccaaacttaatagaagggagagggaagctattgcaggattctaagcagcagcatgaagatgactgtaactggaatatacagaagagtctggaaggaagcagtactggaatgggtaaaaccagttaggttaaagtgattttctaggcaagagagaagtggcaagagaaatccgtagcttcccttagatgtatggttggtgaagggagaactgtgagtgatgcctagatttctgatttgggagactgaatggatggtgaagctgattactaagactggggatataagaggagtagctaattattggaggagggtaatatgtccagtatgagtttggtgtgcttgagcatatccaagagattttcaactggtagtcggatgtgcaggtcagaatggagtgctagagatggattggacaggagatacacatttgaaaacagcctggtgttggaacctgaagccatagaaatgatgcagttgcccagggacagtatgaaggatgggaagataaaaaaaagaccccaagtaaatctctgaagaacactaatatttaaatggaaagcattgggagaagattttataacctaaaaactgtaacctttgtccaagttctggccatatgttatcgtgaccatttaaaactatgtcctttttagtttatttaagaaatactaacttctgaaatgacttagattttattaactttgaacagaaacgaccagaaggcttggaagaaaagagatataaaacttgctgctaaagcaaatgtttaatgagtaaacataagcaggattccatgaaattggatttccacaaaatcaaatttaaagggacaaatactaggttaagggaaagtatcagggatggaaagtatttattgaatcagaaaattgtactgctgcaaaggacctttgaagttagattgtttaaacatctcctttttacatgtagaaactgagatacagtgatggtaagggatttacacaaatcacaatcagtttgtgattcttccagaccagtgattctaaatgtgtggtccagggaaccttagggaactttgtgagtttttcagaggatgcacaaggacaaaagtattttcattataatatcactattatttatctttttcattctttttctcatgagtataccatggagttttgcagaagccacgtgacatgtgatgtcacaacagaatgaatgcagaaacagatatgggaatccaaccctcttttattaaactagatgttacaaagatctgtaatcatgtaaaataatgccaatctccaaactaatattttttggaaaatatagtttttttatagaaatgttatttatgcttatatgttagatttacaataataataattatagtaactagtgttataaaactgatataataaaatttctcatttttaatttctaatatggatattgatagataacattcacttaaaaaaactttttagaatcctcactcagcattgaaaaattataaagaaggtcctgagaccataagttagagaactaatgtcctagtctagaatacaaaatacaggcaaatgtaggttattcatcgtttgcctttatacctctggtgttggaagggagaaaatataagggaaattattcaattggattattgtacaagaaaatcaagagagagtctttcctaggattaagtttccccccctggtttaacaattagataaattgcatatgtttttctctttctttttccccaatgtaggggttagagctagagtacaagaaaacccacatgagttctggcaattaggcaagctaaccaagggtcttaaaacagaagacaagacctagacaaggcccagtcctaaaaagcttccagggtatgttattagatctatgtaagccaggaggaaactagaatagataagtgtagactggggtagaggggagggtaacattgtattttggtttttatatttttttaaattaagcactaaattttgtacgccattttctttggcattacattaacagtaaataatagtaaacatttatgttaacctttttttgaggcattctctttgtagataaatgggataattgagtagaaagcatgtaatgatctttgactgaactgatgaagcctatgagggcaagagtattcagattatgaagttgtgacaaaggcagttgtcttaagttgtaggcagttctgggaagaaatacccagccatgtcattcattcattcaacaaataattattaattgcctactatgtgtcaagctgtacaactaaacctaaaaagttaggccaagtgttctgtggtttgaaagaaagctttgtctaacagcaatatgctgggggttgtcggtgggaatggagttgagggtagcctaggaagggctgtcagtctcaaacctgtggggcaggttaaaaacacagtactaccgatatagacttccagtgggaatgaggtggaaactttatttttaaaagcccctctgtgaagtgtgttttcagccagaattgttacccaggaacgaaccaccaagaattaatggacttttccggagtaaaagggatgaagaaatatgtcagcaagggccaagaaaaaatgcataaaccatgactttgaatggctagaattgcatatggagatgatttagcatagcactgatactgatttgaacagcaggtcttgaatttcacaccaggagacaggcaaataaagctctcaattctgcttaatatggagatgaagacttaatttaaatgtatcaacccttcagaaatagtaagcaaggaaaacaggaaggtcatgtgcttcagaataaaaacacttgtttctgaatttgggaaatcaaagattccagtagatggagcatttcttaagttaataaatgagaataaagccaagtgacttaggtaatgacctaaccaaaggcactgagtgtcttactactggctaaaacattatgcccatttccaaattgccaggctggagctctgggagaatctaattttgatgtatgacgttgattatattctgcttttccaaacttttttcttttcagttcgaaacccagaaggacagataaagctttattccaaaggagcagatactattctgtttgaaaaacttcatccttccaatgaagtccttttgtctttgacgtcagaccacctcagtgtaagtgcctccgtcttaaggttagcacaatggcccttttgccatctcctatggttaggtcttgtttaaaaaaaatagcagctagatgatttgactactgaaatagaaagcatctggagaatggttccacaggaagctgtgccaatgattgtctgggaattggcacaaggaccacccccctttctgccccgttggaagtccagtcagtctctacaggtggaggaacacacagcaactgagtagtagccacagaatgtgggcgtctagggaacctgctgtaactcccctgcagcttcatgttgctcctcttggaagactggactagttttggaaagaggagacagagagctccttttccttgggttctgatgtgtttggcaccagtggaatatcttatgattacctctagggaaagtttagagttgtgtttagattgtgagaggaaaatagtctctggtgcacactttctcctctaagggtctttttattcaggtcataaatcatgatgagtcacttgtgtgccctcagacaccaaacttgtatattctgagaccagcataatttctttccaaaagctttctgaaagaagtaagagtgatttttggcacttttttgttaaatgccaaaaagtaagggaatgggaattaatatgagctttacttgttttaaacctgagattcaagtgtgtctcaaatatttgcctatggttccatttaagggcatctggtcaaaactgtcattttctcattggtttctttcctttaagatattattgagtattcatgttctttgtcagaccctatatttaatgcaaaacattccctgaatctttaaaaagcaaataaacaaataaaaaaaatcctctgtctcactttaaatttaaaaaatgatggtttggtaatattggttacaaacatagctattgttttttgtctttccaatagagaattgattttcttttaatcttttccaggaggccagcatggtcttttaaattttttttaatgaacacaacactggaatcataagtgtctgacttattgccgttactcaaacaccaaggccctggtttttcatacattctcctttaatactaaactataggaaacctaatttggtctttttacatttctctgcaaaataattttttttcaggtaatataaatttaacttgctctttgcttcattcactttattcattttgacttctagattctgaggtcttaaatgtttatttaattactgatttcgaattgtttaatgataggaaaagaccttaataaaatgctcatttaggattgaacttgtgtttcatgtactaattaaataatttaaatcatccgtttccttttgtaatgtcatcttattgttcattcactgttgtgcagaacagagaggaaggcagtggtaatgcccagtggggatgcaagttaaaggcaaaaaagtgcttgtgtgaattaagaggacaaaagatcattacaagacagtagctagattttcagatccgtaggggatccagttgtggtcttgaaaggcagggcttgcaaaatgtgattccaatatccgaagtgctaccaactgcctactatagaaatttggatactttttctcaatatctgtctggggtaaaccatctcattgcagtacgcattgacttttctatttacctaattacagtatctcacagtttaacctacgcctgattataaacctctatgtgtaccatacgccaaaacaccacagaggagacatactcaatggcaatacccaaaggagcagaaatggccataaaaatgctttacttgcagtgtagaggcccataaaatgaccactggaagcacaagcggaatgggagtttttgagcatttcccccaaagcaatctacgtatgtttctagttactatggctgtgtgagacacttagcaaataccagtctcctctttttcttttcccctactattaggataaagcaccaaaggtgtttgagattgtcacgatacaggaaaaaggaagagtatgcttccccaatcagtttgactaatttagtactaacttcatagaatatagcttctaaaaaataataccttttttgcactaagctgacttgataatggtatctttaaaattcccaacaatttgttattattaagataaaactttaatacagcaaaaaataaaaagtttcacggaggagtctataatgaaaagtgaaggtcagcctccacatttagtcctgcttcccagaagcaaccacctatattagcttttcttcctttctctccccttttgccctagaggttattgttataaccttaagtaatatgcttaaacttctaatatctgactatttaacatctatttattcatttattatttacttttagctttttatcatgaaaattttcaagcatatgcaaaagtaggactcaattttaggcataggcatatcactagggggaatgtgacaagacttgggtgtgatgtcatgttgtggttcctggggagagcctcctgcctttgatttgaggactatggcttctctaagggtcctttcctcttcactgaaagctgaggtccataaaacacactgggtccctctcatggccagaaatgcttccttccgtcaaggacagattggaaacaaatatatgttgccataaatgaatatctcaagtcatgggtgtcactgatcacctctcaactaggacacttcagcaggcttttcagctgtgtttagggggaagacttgctcccctgcatgttttaacctcatagaaataaaacggaaaacacacacattatctcccatttctgaggagattaaaaagttgagagtaaggatagccaagcagtgctcttggtacaaaatgaatttgagtgaaaaatttctcaccaattatttttgttgttgttatttctgtgcttattgtttctttgatggttcatgagtctatgtcatctctggcaggaatttgcaggggaaggccttcggaccttggccatcgcatacagagacctggatgacaagtactttaaagagtggcataagatgcttgaagatgcgaatgctgccacagaagagagggatgaacgaatagctgggctatatgaagaaattgaaagagatttgatggtatgagtttagaagcatgatggtttgtgtttacaggaaagatagtatgtgtttagagatttagcacaggaataagccattggctaagtcatcttgcacacagcagatgtttctctttcaatcactgaatcatgctttatatgttggctttgagttttccatgtatggtcctagagagcctagaattgtatttctattagcagtagcttatgcaattggaagcttcccaagagtagaagatagtaggctacctattctttgtcaacctctgatggtccttgatgttatgggatttttacttttctccttgttttattacccacctttttagagcagagaaatttgctgtgaagaatggggctacagttctaaaccatcctaagccatgagattctgatgatatctgtgctatccagagcatggtctattctaaaaaccactcttacctgaagccccagtggccaggaatacctcacccactgtgaggtactagagagtatgctttgctcaacttttgatgaaaaatcgtggccgggcgcggtggctcacacctgtaatcccagcacttcaggaggccgaggtgggcggatcacgaggtccggagatggagaccatcctggctagcatggtgaaaccccgtctctactaaaattacaaaaaattagccgggtgcggtggcgggcgcctgtagtcccaactacttgggaggctgaggcaggagaatggtgtgaacccgggaggcggagcttgcagtgagccgagatcgcgccactgcactccagcctgggcgacagagcaagactccgtctcaaaagaaaaaagaaagaaaggaaaaggaaaaatcatgcaggaactttcactttagtttatggcgtctgctggtttgttaatgtagaagaatgactagactttttgtgatcagcttcctgactatgggatgaaggctattctttggactcctccactgttgatataagtggggaagcagctggggagttcttaagtccaaatggcttcctactgctcacgctaacatgttatctgagcatatcagccccttcaagtaaataataagtcccaagatctctgctaagttggcttgatttgggaacttccttctggagtccttcccaatccactttcacacaaaataggatgcctgctatatcaatgtatcataatttctgtcttcaattaatattctttggcctccagaatctgtgagtgaaatccatagatgttatagatattgtttgcatgcattaacataaacttttctctctttttcaataaagctactaggtgccactgctgtagaagataagttacaggagggtgttattgaaacagttacaagtttatcactagccaatattaagatctgggtcctaacaggagacaaacaaggtaacttgaaaatggatgttgatgatattttgaaaatggggagatgacttatatcacaaaattttaattaaccagaaaggttaattaattaaatattcacccaatcttccacataggaaagacttgaaatagagaagaggaagttaatgtattgcaagaatctattttaaaacaaaccaaactaacaaaatgccttccatagtataagctggagtcagttaagtttcggtccaattgcctcttgaatataatcattacacctagaggcaaaaatggtatttaaaatgtttaacaattggtttatatgaacactgtccccattcaggacagatattggcacagaactaaagcaggatattggagaccttgggttactcctttagtttcttgatggtggggaatttgaaggatcttaggggaagtgtcagggtgatgggaacactttgaagaagctcagggaaacagctgtttatcaacaatttatagaaatattttggtattttaataactactacagctgtaacagtgcaacctggctgaattccaggactgtctatacaaggtacagtgagaattcattgaccttcaggcttgacaaaatgccaaatcattagtgaatcatcgtgttctactatgtttcctatgaaagaaaaggggaccaacatatttttgatctactgctagcagtaatggttaaaacaaaaatgattttatgcttggctatttgtaaatgaaaaatattcaactaactggcatacacctatgttaaaattctatctacttattaggtattttttatagcattaggggatctgcacatgtgatgcatcaattctctacatctttatccaaatcattgatcacaaaaaataaacagtagaaagttgagcactccggtgtgttactaggtagaaactctctagagtttgattttggtcagttacagccgttctattattactaatatccatgagtttactattatttagctttaatttctgtggtttatacaaggtatatgctgagattttatcaattaccttccttaatttaggacaaaactaatgattccatagaattagctagagtctaattattctatacagttagagacaatcaaataactctattagatagaaggagttatctgattatcttaggttccatttctataaaattagaggaagaattacccaacaccatctgattctccagttctctaggagaacagtgctgggtggtttttgagatgatagtcaaattccaaatttccatatatttaatgggaaaatggcaatgttgtgtgtgagagaactataaaaatttcataagagcatttttttttgtcattcaactgaacattttgtgagttttttcttcaaattgtcttccatttcagaattaaatattggctaagtttagtagtttatctctcccaagacagtattcagacttctggtcaaaggttttatatttgtacatattatgtcacaagatcttattttcatgagtgctaatttgggaatgaaaaggtttttctgaaaactagatgagaaggctgcacattcattagtgttgctacttgtgcatgggtttagcaagtagggaatttgatcctgaaacccaggtctttgaatttccctctgcactgcttgtattttatcacctgttgtgctctctctgacatcagccccctgtaggctttaagaaaatacagctaagccctcaaaactttcattaaaaatggacttaggttattaagtaacattttaactgaattgggctttattttgtgttagaaactgccatcaacatcggttatgcctgcaacatgctgactgacgacatgaatgatgtgtttgtgatagcagggaataatgctgtggaagtgagagaagaactcaggtaggtgttgaaggaaggaggaaaggatggaaggacgagagggagggagggaaaaaagatcagagagttgagaaagtgaaaagctatgctatagtttcctgtggtcttaacttagtataaagttctttgtgcatgtttcctaaacttcctttcattttggtgacaaactgagatgaagctgatatcagtaatgaattattgtcttcaggcctccaacatttctcaactatttttagaaaagaatttcaaatcagctatgttgagttgtcctttaaaattgtgctttggttagtacctgctcactcttgcgtggtgatgagtgatcagtatcatgagatacttcttaaaaataccaatgccctagcttcattctgacctacaaattaagaatctacacggaatgggatatgggactttgtatttaataagcacctagatgaagcttatgatcagataagtttgggaaacagctgtaaacagcatataaagatggaatagagtctttcagcattaaagaaagtagatattttgatgtagttactattgaacccagatatacactgtttatgtgaaataaaatactgtgagatttgtgtaactactgcacagtaccagaaaatacgtaagtgctgaaattggaggtagcagtggacagacattaaagtttgagagataatatttcttaagatgtaccaatttatttcatttccttatttcttgttactttatttggagaagaacgtttaaaaatctacaaaaatattttcctagaacttaaaaaatactgtcttataacaatttttgcttgcttgctgcttgtagtagcttctctaagctcagctcacttagacactggccaagcagaatgatgacacagatgcaaattacttatcgcttgctccattctagatggggagctaaccttccttcaatataatagtagagctctgtggcttcccaaatatgtctctgtcattaaactattcttcctgaactttaaaaaaaggaagtcttaaaagtcagcaccactacttgatggtacttgtacacgaatctcccagcctctcggttttacctgcagttaaaaaaaaaaaaaaaacctgctatatcgtgctggttagaaactatgactaaatactgcacatgtctttgccaaataaaaattgggaaatttaattagctactactaatataatttaaatattattattggtataattttaatgatagaccccatagagtcagttggggaaatattagtaacttatttaataatcaattaaaattttaaaagtagattctttaccttttgatttttggattgactctttaaattgatatacaatatttatacatattttgggggcacatgtgatattttattatatggatagaatgtataatgttcaagtcagtgtatttaggatatccatcactttgagtctttatcatttctttgtgttgggaaagaaagtcctctcttctggctaacttgaaatatacaatacatggttgctaactatacccaccatattctgctgttgaactttataatttattccttccatctaactatacgtttgtactaattaaccaacctctcttcatcccccgcattcccacccatacaaccttcctagtgtctggtatctatcattctactctctatgagatcaacttttttagttttcgcataggagtgagaacatgtgaaacttgtcattctgtgccttatttgacttaacatggaacccgtggttccattcatgttgcttaaaatggtaggatttcattcttttttgatggttgaatagtattccattgtatgtgtatacaccacattttctttattgattcatccatttatggacacttgggttgatttcatatatatttgatattatgagtagtgctacagtaaacatggggtgcagatatccctttgatatagtaatttcatttcctttgaataaatacccagtactgggattgttagattatatggtagttctatttttagtttttggagaaatctccatagtgttttctctagtggctgtactaatttacattctcaccaacaaagtgtaatagctccctttaccagcatctgttatttattaatttatttatttaatagtagctattctagctgaaataaaatcacatctcattgtagttttgatttgcatgtctctgataattaatgatgttgagcatttttcatatataagttggctatttgtgtgtcttattttgagaaatgtctattcatgttctttgctttttaatgggattgttttcttactgttttaattgagttccttgtatattccagatattactcccttgttagatgaatactttgcaaatgctttcttcctttcaacagactgtctcttcagtctgttgattgtttcctttgctgtgcagaagctttttcatttcatgtagtctcacttgcctatgtttttgttgcctgtgcttttgaggtcttagccgtaaaatcattgcctagagaccagtgtctggaagttgttttccctatgttatcttctagtagttatatcattttggggattatatttaagtctttaattcatattgagttaatttttgtgtatggtgagagttaggggtccagtttcattcttctgcatatggatattcagttttcccatcactacttattgaagaggatgtctgttctctagtgtgtgtacttagtgtctttgtcaaaaatccattgactgtaaatgtttggatttatttctgggttctgtattctgttccattggcctatgtgtctgttttacaccaataccatgctgttttggttactttagtcttgtgatatattttgtagtcaggtagtgtgatgcctccagctttgttctttttggtcaggattgctttggctatttgggctcttttttggttccatatgaatgttaggaattttttttccatttctgtgaaaaataacatagtatgataattttaacaatattaattcttccaatccatgagcatggaatgtcttttcatttgtttgtgccctctccaatttctttcactggtgttttgtagttttccttgtggaggtttttcacctccttggttaaatttatccttaagtattttatttttttacagctattgtaaatgggattgctttctttctcaggtactttctcaggtacttcattattggtgtatagaaacactactgattttgtatcttgattttgtatcctgaaactttactgaatttggttatcagttctaagagtttttgatggaatcacttgaattttttctgaatgtaagatcatgttgcttgcaaacaggaacaatttgacttctatttttcaatttggatggcttctatttttttctcttgcctgattgctctgactaggaatttcagttatgttgaataggagtggaaaaagtgagcatccttgtcttgttccagttcttagaaaaaagggtttcaactcttcctcattcagtatgatgttagctgtgggtgtcatatatggattgtattatgttgagttgtgttccatctacacctagtttgttgagagtttttatgaagggatgttgaattttatcaaatgatttttctgcatcgattgagataactatatggtttttgtccttcattttgttgacgtgatgtatcatatttattacgtatgttgaaccatgcttgcattcctgggataaatttcacttgatcgtggtgtattatatttttgatctgttgtaggaatttttttctttgagacacaaaaaaaaaagccaggtgctctgtcacctggctttcactgcagtggtgcaatcgtagctcactgcagcatcgacctccggggctcaagtgatcctcccacttcagcgtcctgagtagtggggactacaggtataagccaccaccacacccaactaatttttgtattttttgtagagagagagttttgccatgtttcctaggctggtttcatattcctgtgctcaaatgatctgcctgcctccgcttcccacaggaggatcatttgagcccaggagtttgagactagcctgggaaacacggcaaaacaaggcatggagccaccacactcaagcctgctgttggacttagtttgttacttttttgttcagaatatttatgtctatgttcatcagagatattgatctgtagttttctttttttgttgtgttcttctctgattttggtatgagggtaatgctggccttgtagaacaagttagggagaattcccttctcttcagtttttttggtatacttaaggataatttatagtaattcttctttacatgtttggtagaatctggtagtgaagtcatccaattctgggtttttctttgttgggagactttttattgcagactcaatctcattattggcttttggtatgttcagattttccgtttcttcctgattcaatcttagaagtttgcatgtgtccagaaatttatccatttcctctaggttttcctgttagttagcatatagttgttcttaaagtcttgatcttatatatttctgtggcgtaagttgtaatgtctttgttttcattcctgattttgtttatttggatcctctctctttttttcttggttagtctagctaaaagtttattaactttgttcatcttttcaaaaaaaccaagttttcatttcattgatcctttgtattttttagtctattttatttacatatgctctgatctttattatcttttaccttctactaattttgggttttgttcttgcttttcgggttctttcagtcatttcattatattgcttatttaaaatctttttacttttttgatgtaggcatttattgctataaaattctctcttagcagtgcttttgctgtattccataggttttggtatgttttgtttccattttcatatgtttgaggaaatcttttcattttcatcttacttttttcattggcccagtattcattcaggaacatgtttaattttcatgtagtgtattgtttctaagttccttttggtattgatttctagtttcattccattgtggtctgagaagatacttgatatgacttcagttttcaaaaatttgttgagactgattttgaggcctaacttatgatctatactggagaatgtttcatgtgctggtgagaagaatgtgtattctgcaagtgttggataaaatgtcctgtggatgtctgttcagtccatttgatctaaagtccagtttaaatctaatgttcttcattgattatctgtctaaatgatttatttaatgctgagaatgtactgttgaagtccctcattattattgtattggagtctacttctccctttagatctaatgatatctgctttatatatctgggtacttcagtgttgggtgaatatatatttagaattgtaatatcctcttattgtaatatcctcttactgaactgatccctttatcattataaaatgataattttggctctttttactatttttggcttaaagtgtcttgtatctgatataagtatagctactcctgtttgcttttggtttctgtttgtgaggaatatctttttctatacctttactttcagtctataggtgtctttacaggttaaggagtttcttgtaggcagcatatagatcacatttttatagatccagatccaggccatctggatcacatttttaaaaaacccattccgccattctgtatttttcaagcggaaaatttaattcatttccattgaaagttgctattgatatgtgaggttttgttcctgtcacattgttaattgttttctggatgttgtatatatcttctgttcctttatttcttttttattatatatttttgtgtcagtagttttctttagttgtaactttgagtcctttctcttcctcattggtgtgtttgctttaccagtgagttttgcacttttatgtgttgttcttaatagtagatattgtccttttgcttccaggtttaggattccctcaattattttgtagggcttttctagtagtgttgaattcccttagtttttgcttgtctgggaaagactttatttccccaaagagggtaattttatttctccacaataaagtaactttatttagaaataaacttatttctccaaaaaggataactttgctgggtatagtatttcttgacttccagatactgtctttcagcactttgaatgtattatcctgttatcttctggcttgtaaggtttttactgataagtctacggtaagtctgatggagactcctttataggtgactagatgcttttctcttgctatttttagaattttatcattgtcattgactttagacagtttgactataatgtatcacagagaaaacctttttgcattgtacctgtttggggattgctgggcctcctgtatttcaatgtctaaatctcttgctagagttgggaagattttatctattatttcatcaataggcttttgaatgcttttgttctctcttcacctttgggaatgctgataattcagatatgtggttgctttatgttgtctcgcacgttatgtaggctttgtctactcttgctaattcttttgttttacttttgtttgggttatttcaagagacctgtcttcttctgaaattctctcttcttcttgatctagtctattgtcaaaactctcaaatatatttttttatttcattcagtgaattcttcagttgcaggatttctgtttggttcttcgttatgatatctacctctttggtaaatttctcaatcatatcctgaattgtttttttcatttctttgtattgtttatctttgttctcttgtatctcactaaacttccttaatatcattattttgaattatttttatgggaatttcataaatttcctattcattggaatctgttactggagaattatggtgttcctttggagttgtatttcctagctttttcacgtttcttgtgtccttacgttgctatctgcacatctggtataacagtcgcttcttccaattttgtggatttactttcataggagaggacttcctcaatatgtatcttggtattggttgggtagggcactttggctttgattctggatgtgtgcagtagtatagtctccatataatttatttggctttcttttttttttttttttttttttttggtaaacaaagccagtggtgtctgtgacttcctcagtggcttagggtgtggttgttaatggagactgtagtgaagttttattgggcatggggacagcaggtgggacagtccttgggccccagtgggagcagtggtaggctgagcctgcctgtctttgggtccaagggtagcacatttggcactggcattagtgtgtcctggtgggatgattcttgggccaccaggaggcttgctcaggtgacagcagtagaaacagtgggctggaccttgggcccctgggctgcaggcatggcataggcaatggcagtagcagtggttggacaactctctggctcccaaatagcctatgctggtgttggcagtggctgtgacaggctggtcaggccattccccaggtccacgggtggtaagtgcaggtgggtgctagctgtggtggtagtggcaggctgggttagtctgtcttccagtctctgggaggagtggtcatgatggtggatggagccacggcagtggatggtggatggagcagggtgatccccaggcccctaggtggtatgctcaagtactggggtggggggtatggagtgcggtcaaagccagactggacagacctgtctgtatgttccccttctccccgctgtccagtggtatgtatgggtgctggctgtggtggcagggacagggttatcccaaggcctctggtggaatgctcaggtgggggtggcagtagctgcactctggccgtgctggctgctggggtgagtgggattgcttttagtagtagcagccttaggcaggtggctgggaagtgtgtgctttggctgtaggtggcagctatatgtaaggtagcctatccttagggcatgtggaaatgtgaggaagtcctgttgctggaagggtagtggggttgctgtcagcgtcttgcactttggccatggtggcagtggtggcagtggtggtggctgcaggtggggaatgtcagtggagctccaggaatgtggaaagccaagtactgttgggccctcaggcaggatgcagtctggtggggctgggctctcaaaatgacactttgctgtcattttgtggtatgtgggacccagtgtgagctccctctctggggcaatggcactgccttgtcttcaggcagctccctatgttaatttcagggtctgaaagggttgagaggctctcctatggctaggagtggagtctgtggtgagattgtggaccactgggcatccctcacttatactttccctacacaggagagcctttctgggctcccagccagacaggatgccttgtttccctcttcttcttttaggtgtttcctgtcacttctctcttgaactccaatattttctcttagatgacatatttgaagtatgattatctactctctatcttggtgcttctttgtggaggaggcaactgccagatgcctttagtcgtacatcttgaaggaccactctcattcagaacttgactcttgctgaaggaagatagatgcaaacagatctagattttaataagcctgttgctaaatgttttgagacagtgcctggaagagtattgtaggcagtacacatgtattacctcattttgttcttaagaaactcaatcgtaggcattactgttttccctgttggacatatgaggaagtcgaagtatatagagggtaagtaacttgcccaaagtagtccgtggttcaggtgggatgtgaatctaggcagcttggtcccagaggctgtgcacttgccatgtgtttccctaaacatacctcagatttatttttattccctttaataattaacctaaaaatatagttgttaaggtatcttactgcttcacttgagtaaatggtcagacaccagattagcaagtagagtcagcagaaatttccaggggaaatagcagatgtaggagaaagagtatgggcttcatgtcagctggattcaagttggaatctcagcttcatgcttaggctgagtgggaaacttttgatatgggaataacctctgtttgcttggtttccttatttgtaaaatggggatacaaatatctactctatatcttattttatttgggggattagataagaacttaaagctttatgactgttccatgcgcatctttcttgccttcctcattccttgtctatttcctcccttctcccttccttcattctttcagccactgatcccaatctttccaccaacaaggactacttttgtaactatttccccaataagggcagcaggcctgaaacagtggggaaggaaagggtagaataaaatagacagctttttggaggtagaatgaataggtcttgtaatttgattggatgtgaagagaaatagtaggaggctttgtcactgctaggtttcacagcccagagtgtgctcaggcatgcaagaatagaaactcattaaattttctaaaactgaacttgaacctctttctgtctgaggacagaacaattaaactaggcattttcagttaaatttagttcaagtctgggatgtacaattgcctcacctgttactgttcatcagtgtctaccctgctggcatccagcacttcccacgtctgtgttcctgtctggtctctgctctcttagggttgttgttggctttccctcttggctgacttccacactctgctggggaaccatggaaagtgtggctgctcttcctcacctctctatgcccaagatgacttgtgttcttatatggccacttcagtttctaaaatccctttactctgctgattcccctaaatttatctgaggat

SEQ ID NO: 733 - DNA, 855 bp, Homo sapiens
caggaaaaagagcctgtggatttctcagtcaaatctcaagcggatagagaatttcagttctttgaccaccatctgatggaatccattaaaatgggtgatcccaaagttcatgaattccttaggttacttgctctctgccacactgtaatgtcagaagagaatagcgcaggagagctgatttaccaagttcagtcacctgatgaaggggctctagtgactgccgctagaaattttgggttcatttttaaatcccggaccccagagaccataacaatagaagaattgggaacactagttacttatcaattacttgcctttttggatttcaacaacaccagaaaaaggatgtctgtcatagttcgaaacccagaaggacagataaagctttattccaaaggagcagatactattctgtttgaaaaacttcatccttccaatgaagtccttttgtctttgacgtcagaccacctcagtgaatttgcaggggaaggccttcggaccttggccatcgcatacagagacctggatgacaagtactttaaagagtggcataagatgcttgaagatgcgaatgctgccacagaagagagggatgaacgaatagctgggctatatgaagaaattgaaagagatttgatgggtgccactgctgtagaagataagttacaggagggtgttattgaaacagttacaagtttatcactagccaatattaagatctgggtcctaacaggagacaaacaagaaactgccatcaacatcggttatgcctgcaacatgctgactgacgacatgaatgatgtgtttgtgatagcagggaataatgctgtggaagtgagagaagaactcaggtag

SEQ ID NO: 734 - protein, 255 aa, Homo sapiens
MESIKMGDPKVHEFLRLLALCHTVMSEENSAGELIYQVQSPDEGALVTAARNFGFIFKSRTPETITIEELGTLVTYQLLAFLDFNNTRKRMSVIVRNPEGQIKKKGADTILFEKLHPSNEVLLSLTSDHLSEFAGEGLRTLAIAYRDLDDKYFKEWHKMLEDANAATEERDERIAGEEIERDLMGATAVEDKLQEGVIETVTSLSLANIKIWVLTGDKQETAINIGYACNMLTDDMNDVFVIAGNNAVEVREELR

SEQ ID NO: 735 - DNA, 40495 bp, Homo sapiens
ttcagtacgttgcttatgttgtgattggcttgagatgtacagtgaaaagaacccgcggaccagactcccttttgtttcctatgttgggtggaatttcctgggagaagcagcgggaacaaagaacaaaaagtatgtatcttgttgaacctagaatctttactctggcagagaatttcagggacattgagtccagtccctcgttttacagaggaggatcctgatcctgcaggagctgaggatcagcggtaggcaaggctaggaccggaaccaagtctcctggctcccacttcagcgctctgcctactctacctgatgataagtgacctcttgggttgtcataaatttggaaaagctaatggccatatcctttttttttttaaaaatactgtcttccctcaacccctaatcagaaaatgtttgctttatttggaatctaaaggagaaatatccagaaacactcagttcaatatgactatgtggaggaaatgagctctctattgaaagagacctcatgacttgcggggtgtgtcatagcttagagctgtgggagggacaggcctgtccctaggcgaactgtttgtagaatcatctggaagcttgaggacaccttctgctggcaaacgctccaactcaactgccactgagaaacaaattaaatataatttgttctaatgagatttccagccagatttctggaacagagaggtttggataaaggagactaggtctctaaactgaatcatggattctttttaaggacatgccttatcccaatctattattgaaacccacatgagttttgtggcatccactgtgggtttggattcacaatttatacctgtaacttattttaaaagcaccctatgccttcaggacttttcgtaaagaggaactgtcccctaccaaggatacagccaaataaaaaaaattggttgaagtcctatttagaaaattcatgcttaaaattatgcaactactggtactgtgtacttgtgagatgatattatctgatgacaatttatcattgtcagtgagatacagggctgtgtattttttttttcttcaattctactgtgatatggaagcaattatcttgtcaaggctggaaaaactttagttctgtcaaacagtataataaagcaacaaaaagtttggaaagtgacgtgaaagactgcgactaatcttaaggctttgatgacttcatggatttggttacctgtgagcccgtctccacctggcatggtagctctgctccccctcaccttccagatgtgctctggggaaagtccaggactggacgagtgctcaggcctgggtcactcctcctggatgctgcgagcgggtttttactaattacacaaatcaataacagatgtgctgaggctgagcacctcatatttattccacaatgtgttttctttaaatgacaaatgttttttaaggcccccaaaaggtcattagataggtttcctctgcaacacataggaaaagggggatacacatctccaaagaggtagtaagttcatcctgttatttgaacaaggagctcagccagtggtcgagcagaaagagcagagaaagccctttgcagctgtttaagaactttattaaggtttatttaaatgtgtcattctataaatcataggttttgtgttctccaagctgtttttagattgtaatttgtagctggagtatttttaactctatgtaaaatggttgataaggctgataaattgctcccataaagaagggagcgaggagctttccttaaatagaaaaaacagtgaagttggaaaaatgaactctcctccctgttttttttttttctgatctgtgaagagacacttataggattttaaacagacttgtgacatcttgtagtagcatggcttttctctcttgttcagagtattggagatagggaacaaatattttggaggcagaggtgccatggcttcccctgtgagtatgggtgccctagggaaaatggttttttgtgggactccttttatataaacaatttgagtcacccaaaatcagagtgtcgacctagaaatctgaaaagagtcatcatccctcaacctccaccctgcccctctcttcagggcatctggtcaacctgtgttgggtgggttgggagggaagaagaggtggtagagtgcccgagcatgcttggaaggggagaaacagggaggttgatctgggctcatgtgcccctctcagctagtcctagtcaccagaagggggccttaaaatttttccaaggggatctaaggaccacaagtagaagtggggcatttactagaataactattcgagtagctggagatctcttgcaaggattcttcaacagaaacctgttgtagaagaaacattgcttggccaggaacggtggtttatgcttgtaatcccagcactttgggaggtcaaggcaggtggatcacctgaggccaggagttcaagaccagcctggccaacgtggcaaaaccccgtctatactaaaaatacaaaaattagccaggcatggtggcaggcacctgtaatcccagctactcgggaggctgaggcaggagaatcgcttgaacccagggggcagaggctgcagtgagccgagattgtgccactgcactccagtctgggcaaaagagtgaaactctgtctcaaaaaaaaaaaaaaaattgcttgtggccttaatttctgtgaaagaccctgaagtctaaactgtgctaagccaatgcccatatggcaaagttggtttctaaggtaaaggactcaggttaacacattttggtagagcctgagataaaaaccagaattagagtgaacagtgattgaaataattaagtattcatgaagaaagtaattgtaccaaggtactcatttttctttaaatcttgttctgatgttatattgatctcatggctaccatagtttattatagaaataaatatctatggttaattgtctcaataaagaattctatttttataaaaatatgattagcatgaaaatgtacctttttatttacccattaaacacatctcttgaagcttggatccctgcatgctccccccatcctccctcctttcttccttccataatatggtgctcacttattgagcagtgtctttcaggtgctgtcgtggcatttacctcatttcattgaatgctcacagcctccctgtaatcctcattttatagcctaggaaaccaagacacagagagattgagtatcctactcaaattcacacagttctgtctgccgactcccttacccttaagacaccagcttccttttattgagcaggttctgagtttggttcttgggccccacgggtgagttagattacccgctctcaagtagctcacagtctagtgagacagggctaggaaccagcatataaataattgtaagtcagtagttaagaagcagtgaggtataggggcatcatggaactaccgatgagtggtccagaagccactcatggaggcacggagtggccaggactcagaaaggctcctggaagaccctggccattccccttcccatgctggaccttcccggatcaaccatattgaagcagatgagaagtaagaggatggacatcccagcagaggagccaacaggaggaaagttccagcagtgaagaatagcttgggcaggaacacaagccatcaggtatctggggagtgatttgatatggggtgttccgcagagggccaaatctcagatttctcccccggatgctaaagaggatgtgatggtatcagatactggtatagggaacccaggaggggcgtctggttaaggtaatatgaggatgagctctggtcttgatatattaagtttgaatctatggtgcatctatgggaaaatgcctagtagaaagttaaatatgtagcatttactaaaaagttgtaaaataattaattcaacaagtatttatagagtacctacagtcaacaaatatttgtagagtatctaccaatggctagatcctgctctgggcattaaaattatagttgtgagtaaatttctgttttcatggagattatattctagtgggatgaagacagataataaagacataaatcagtaagataatatcagaattgttaagaaagaacttggtaatgtaaaaggtctcactgagagggtgaggtgacactggagttgtgacctgagtgttcagaggaaacttccatatgaataccttgggattaaagtgttccaggcagagggtacagccagtgcaaatgtcctgaggcaggaatgagccagataagttggagaaagcccatcagcgaagcctcagctaggtgagggagggtgagaatgttgtgaggtgaagttgaagagtctggcaggcaggggaccaggaagggctcttaggacatgacgaatagggagtctggattcattccaagtaaaatggaaaaccattagagggttttaacccaggtcaatgctaatgttgttattttaaatcagtggtccccaatctttttggtaccagggatgtttcatggaagacaattttccacagaccagtgggggtggttttgggatgagactgttccacctcagatcatcaggcatagaactggcatatgcacagttcacaacagggttcatgctcctatgataatcttatgcggctgctcatctgacaggaggtggagctcaggctcgcttgcctgccactcacctgctgtgaggcctggttcataacaggctatggactgttataggctgttggggacccctgttttaaatgccaaaaaatagcatataaaattgtgtatgctctcaattacattaaacaaggtgagggaaaaagccttcaaggaaactttctttttttttttttttttcctttttttttggagacaggatttcacttctgtctcccaggctggagtgcagtggtatgatctcggctcactgcagcctctgcctcccacgttcaagtgattctcctgcctcagcctctcaagtagctgggatcacaagatgcacaccatcatgaccagccaattttttgtatttttggtagagacaagtttcaccatgttgccaaggctggtcttgaactcctgagctcaagtgatccactagcctcgacccccaaagtgttgggattacaggtgtgagccactgtaccaggccaaggaagctttccaaatgacaccactgattgagagaggtggtttcatgtagtggtcagtgttgtgggcactaaggttcataggcttggagttagctctgacacttgcttggctggcgttctcaaactttgtgatctcaggaccccactatcaatatttattatcttaggaatgaaaatgaagaaaaaaatctaaatacttttattaatttgttaaaaaatagtgaacccatgatgtgtttacaaaatgattgtattttccaaaacaaaaacaagttaatgagaagaatgccattgttttacacttttgtaaaactagttaacataatagaagacacctgggttctatatcatctgcattcaaccagctgtgatgtcacatatcatacagactcatgagagaatggggtgaaagggtaaatacataactttttgtattattgtgaaaatagttttgacattatggatcccctaaaaggttctgaactatacttggaaaacctttttttcccctttgggtttttttttaatataatttaaaaaaattgtgggtacatagtaggtatatgtatttattgggtacatgagatgttttgatacaggcatgcaatgtgaaataagcacatcatggagaaaacctttgcatttaaggtatgacattgagcaatctcctaaccttgataggcctcggttttcccatgtataaactgggaactatcaatagtacctaccttatgtggttgttaaaatttaatgagccgatatatgtaaagcacttaaaatggcacagagtagatgtttagtaaatatcagctatttttatttctttttgttattgtgacactgagtggcagcaaaacttctgagaatttgcagaaactcattgaaaccttactctgatttttccttcctgtcttctcttgctccagctgtgaaatgagtcttcaaatctgagtgccggttgacaaatgctgatagttgtcaaataagtgtagcttgtaatgcgagcccatttgtgatgatgagggcacgctatgccagactttcagctgtccacagttgagtacgccataatttctcagattctttctctcttcttaatacctggaacagtcagatgccatcatcaatgagttgaagatttgtgtcagctgctctgctttaaaaaaaaaaaaatggaagtgagtgtaattcccaatcttggcttcacattggaactacctgggaaaaatttaaaatgaccaaaacttagatccttctcccagagatactgatttaattggcctggggtgtggcctgggcatcaggatttttggaatcttcctactctctgaaatctcactgggctataactataaaagaaggtcacgtgtttaatttttaaattttttatcattggtaaagtttaacaaatatattaaaaagtatataaatatcagcttaaattgttgtgaaatgaacacccatgtaccatgatccagtgcaagaaatataacatttccaaacacccaacagctctcctgcttttcctcgagacctctttccaatcctctagaggtgaccattaccctgccatcttatagtcacatttcttctgttttataactttaccatatgattaggagttccgaaacaacataggaatagattttcatacttttgcactgtatttaaatgcaattatgcctttgcatctggcttcttttgctcaatattatatgtagtttttattcatttgttttgggatatagttataattctttgcttttcattattctatagtattctgttatatcgatacatgataatgtctttatcccacacttgaaggatgttttggttgtttttgtttggggactattatgaccaatgctgctatgagtatttttatatgtatcccactgcacgaagatagacatttgtgaacatatgtatctagaagtagagttggacacattcactcatcagaaggaagataaagaggcttagctgcagttttggtggactcttgagggtagataggagttggatactgggaccctgtcacaactgctgctctgggctgggaccctgtggggtcgcactgctctgaaccatgtaccttgggaatgttgataatctacaggaggcaactgacagattgagctgtgccttcagtagtttcctgggctgaagggagaaggttcagtgcctatcgagggtagagatcatgatgaaacccttcctactctgggctgggacccaaaggcagcctcccagcagtgaggtcacagactctgccatagcaggacagttggctagcccagaaaatatcaggccttcgttctgtcctcgacagctgatagaaggaaataaacatagagtctggagaaggatcgcattatcctaggccttgagatagttattaagttctaattctcttcttgatcttgacaagtcattccccactgtcttgttagttcattggtactttgatgaagatgcatttgtttttttctcaacttttttcgttatcttcagcaggaggtttggtatgaatcaattattatggcacgtgccccctatcctgtgtgataaattcaggcttctttcagatacctctgctaaatacccaggggggttccagggagtgccagccagcttttccagtctgttctcatggttgcctgactagtggactactgccctgcccttctgcaggttctctcatgccacattgagtgcattatccttcaggtagctgctgcaggttctctcatgccacattgagtgcattatccttcacgtggctgcagctgtcttgtatcactttgctcccagcatggacctaggctgtggtatcttggaactggcccatactgattcacaagagctgattgttaaattttcatgaattttgtgagccagtggttaaatacagccattattaaacgttatataaatttacaatttaagttatattaaaaataaaagacagttaatatactcaaaatgaatcccttgctaattattttcccatgttttactatttatgctcttgagattatattgggtctgtatagtagaaatactatataatggtgagtatgtctcaactccacattcagtggcatcattgcttgaaatcagtcatggaggaatatttataccatggaaattggcaaatgctacaaatcaaggcttttttttgtttgtttgtttgtttgttttgagacggagtcttgctttgtcacccaggctggagtgcagtggcgtgatcttggcttactgcaacctcagcctctcgggttcatgccactctcctgcctcagcctcccgagtagctgggactacaggcgcccgccaccatgcctggctaattttttgtatttttagtagagacggggtttcaccatgttagccaggatggtcttgatctcctgacctcatgatccacccgcctaggcctcccaaagtgctgggattacaggtgtgagccaccacacctggccggcttttttttttttttagcctgttgttaaacatttatcagcatgtcattggatatagtccccctttctaaatccttacagctgggtttagaccacataatgaaaataggaatcagagagtaacaaaggagagttaccatgaagagaacttaaaatttgttattagaaatagttattctgagtcataagctttcccacttccaccattgtcttcagtttcttctcagcatagcatccagagtaatcctgttaaaatataaataagaccaggttgctcctttgcttaaagtcctctaatgtcttctactttcacttaggtaataagccatgtttagttacataggattgttcttcttacctcctgacatccattattcttcctacaggtcactctgctctacccaactgggccaccttgctgttctctgagcatagtggatgctttcttgccttagggttgtttcatggggcctacttgcagtatagaatgctgcacgtcccagcatttccagctgtttcagaaagctgcatgttagatccatttccttcaggtcttatctcaaattcacttctcagtgagactttcttcaatctgctgtattacaattacagccctcccacattccctatcccctttcctctctagcacttactaccttctaactaattaagttgattttaatttttgcttttgcccataataagctctgtaaccgaaaggttctgtttccacaactgtgtgtactcataggcaaaatggggatatatgcctgcttcacatgcctcattgacttttagtgaggcccatgcagggaattcttgtgtaattagtctacaaaggtgtgaggggatatttttgttgttttgctatttatgcccatcttgctttaaaccactcccccgcaaaaacctctccattttaacacaggatagaaataacaggcttattactatatttatctctgaagattttagtgaatcctttgtttaccacttggatcagataattggactcattataagccactgaaaacctggagaataaaatggcaacccaccacaaggtcaggggctcatacgtgtcccgcactatgttaggggtactgctgcatgtattattttgtcctcactgccacactgcaggaagggtatacatcactttagagataaagaaactgccgtttagagagatctagtatcccattaaggcaccagagctgataagaggcaggtctaggaaagaattcatatttgtctgattccaaaagtcaactcccacccacctcagaaaacctggttatttaacctaaatgtgaatattctcactactatggatgatgtttctcacttatatgttatatttcttttcagactgtttatgaccagtggttcatcaccctttttaacattgtttacacatcactgcctgttttagccatggggatttttgaccaggtatgttttttttccatctttataacttagtttctcttttatgccttttagttttttgtgggttctaagtagaaaacacaattctaagtagcagccctaggaatgcagttgttttagttgcttttgcatggatcacacatgcttccaggtccactgtgcctcccttacccctataccctagcttccccaaaagcattatttgataaaagttggttactcttctcttagaggttcacaccccatagattgctctaaaggctctagaagtcctgtacgaagtaatctctttaacttcattttaacccagcatttcccaaacttctatgactgtatatgttttcatatagcacctattaattaatatgtctcagaactagtgtctgtggttcacacacggggaaatgctgccttagcctctgagagcttataaagaaccatgcaatgatagaaaatcatggggctaggttggaacacagggggctaacacctgcagtgagactcccttgttgcgaacatctgcagtgagacttccttgttacacacagcccagaacaggagccacagaccagtagagcagtctgccagtgggagaggaggatgagaagctccatggccaaggaaagaaagagcatggatttcttttgtcccagcatcaatgtgcttgagtggggagaaaggagaggatcaatcacaaaaatggtagatccttggcatactcagagccttggaagggacttcctggaaaggggaaaaagtctggctgcctgtggggaagtgaaagactagccagtggaatttccgtggcacaattagagtgtcttatttttaaaaagactttttgttttttaaaaaagtatttttaaggagaccacattttctccaggctgttgttagacctatttgctaggcctcattttctgggccaaagccgtctattgcaaaatataaatcttcacattatgagctcactccagtctcccatttggctggctttgtagtcagttgttaagtctcccttctcatatgtaaaaagggcagtttgcgaaaggcatattttctggaattatacaaaaaagtaatgaacttctgaagaccttagatgtaaaggattaagcacattcatttctcagcgcccatgtttacaagtgtttcttttcttggagctttgtagctgcccagaatgtggaataaaataataaaaataaagcagtttctgggaaaagatggttattgtgcaattcaaaaaaaatataataaggcttcctattaccatcaagttgagtgtctgctcctctctcctttcctgctttgtcaaccttggcccttaaactgatcacaggatcgtggaatgctatgctggacaggcctcagcaatcatcaacagatctgctcattttttaaggcagaaaccaagccttggagagtcatttccctaaagccacacagccaataagtgacacggctaagactagaaccaggcctcttaactttgaggttgctacattattgctattgttgttattatcattattttattaattgttatttatagaagcatctggcatatttattacttacgatgtggcaagaactctactaaatactttacatactggtttaatcatggcgatagttccatgtgggaggtgttattgtttgcatttctgggcatgaggaaaccaaggctcaggcggattaagtaacaggtttaagataacacaccagctaaacccgttaccagggattgagctcatgactgtcttgtttcaaagcctgcgcacataaccctcagtcactgaactaggggaacaagcatccaaaagcatctaaaaacaggactctctaaagagaatatgcctgtgtttttccatgggactctgtttggagagacctgggccatcccacaagcaggaaggggaatgttcctctcccacaatagttcaccacctgtgttgcttccactttcgcctcttctcctccacctgtggtcctctgatgtcccctgtggttgattcttgccatcctttttggtttttggcatttggctttggtgctcactgtggttatcagcattactttggagctggctggaaatgcagtcttgggccctcagccctattgaatcacaatctgtttcccaggcgatttgtgtgcacattaggtttgagaagcatttagtttctcttgggacctggttggtgtcaaatgtgccaccttctcattctgtctatattctttctttgtcctgaacacctggtaactgctgttaaaattctcactgggtaggatcctcatcccagcctccttctcacctggaatcccaaatgcagtttccccttttccctgctctcttcttcctgctcacttccctccaaagtcatgagctctgatttgacaattctgactccacagctctctgctgtcatctcctggtcactaccactcactaccttgacaattaacttctggggcccattggctgcacatgatgtgctggaattctgggagcacgaatgcttctgacagcctgcaggagagtgtaggaaagaaacttcaatttgaagccaaatagctaggctcaaaccaagccctggttctgctacttacgagctgtgtgacctctcatgaatctctcttggagactcaagctccttctctgtaaagtagagatcattttattatcttctggtttattgtgggaatacaaacaagataatgtcctgttctggcccagtgagtagtgcattttaggacatgtttaaacaggcatttgctatttctgaagatagggaatacaaggcctctctgactctttttaatccttctccactgaaattacactctgtttacaggatgtgagtgaccagaacagcgtggactgtccccagctctacaaaccaggacagctgaatctgctttttaacaagcgtaaatttttcatttgcgtgttgcatggaatctacacctcattagtccttttcttcatcccctatggggccttttacaacgtggctggagaagatgggcaacatattgctgactaccagtcctttgcagttaccatggccacatctttggtcattgtggtcagtgtgcaggtaacgctgtcggtgtaagcaccttaacttgatgggtttacaacttttactatttcattgttgattgattttgtctacttgttggggggaaataatcctaaaggaatactggggctgtccttttaagtacacattttgagatgaaagcaggaagctttaacataaattactggggagaattagcattaggcgtctgtaacatccatgttagtagaaacctcacaatgtatcacttctttgggttgtgcattgtatgtaaagagaaatgattatactattatttccttcttgtatttgaagaaaaaaaaaattccaataacagaaggagaaactttcccatgatttctttaagacttaataactgccaggttttaaagtgagatctaaagtttgcttggcaatacatttctatggagttattcaagaggttcaatgctatatctgtggcatatccgaatctcacactcagaggagctcttctggtggggatgattttttgaggttccattgaccttcttccatcttgagttgtgtctctatttcctttttactgtgaatgtggtcaatgccattagatactgagttagagttcacaaaaacttttatttcttgagaggaggccttgctatgttgcccaagcttgtctagagctcctgggcttaagtaattgctcaccttggcctccaggtggctgagattataggcatgcatcaccgcacatagttagaaaaacttttcctctattactatctgtagctccgagtaggtacagcaagctatgtgacctctgttttattttgttgtcttttgattactgagcaaactgttaataattaggtgatcttctctgtcatgagggtacatttccaattctctggattctccttccatagagaagacagtggtggggtgtacagggacatctttttagtggtaacagctgattcacctctggctcagacctgttcctcggtactccaagagattatttgaaaggtagtaactgaaataaaaggccactatctgaagaagcagcaaatagaaaacattcttcatactgtcctgttaacatgatctgtttataagtaagggtaataaattacctggaagagtcattgtaggtgtgacatgtaacaagcattaaatgtttgtgtgtatgtgtgtgtgcatgtgtacatgcatgcatgtgtgtgtgtgaaactggtgttcacaattaaccctacaatttttggttaacttaatctttataattttagaaaaagcctgctgttatgcccatgcatctttttctctttttttttgcttgcccataatttgttttatgtgctattacaatagtgccagtgccatgtttttatattaactttatgtttagaagctgtttttctcataaaacatacagttcttattccagttgaatgttgaaatcacatttctactttctcacaagttgagagcccacagaaactatcacattttaaaaacattgtttagtcacgaaaaaattacagaacttcaaaagtttattttaaaagcttcaagtgacttcttgtcgcttgaagtttttaaaataaacttttgaaatttctaacccttgattatccaagttttataagaatgatatagaatgatatccatgttttttcagagaggattcacaccttaggctcaaagtaaccattagcccctcattcaggatgttttgcaagaggaaatccaaatccatttgcttcagaccttaatggccatttgtctcttcaaaatctattctctgccttccatctcctcaaggacaatagtggtcctagccatccctccaatcccattactcacacgccccagccacactggcttttgttctgctcctggaattcaccagtctcttgcttgccttatggctttgctctttcctgcctggaacattcttctctcagtttccctcacatgtcatttcttcagaggggcctccctggatccatttaaactaaggcccctttattttctctagtggaatagaaatcaattattttatctcatagttgtcatctccccttgtaagtacaaatttagtggtgtgttctctcgtttaatgtctttctacctcctagagtgtaaccttcacgaaggcagtggaaatgtctgttaatcgctgtatacccagagctgagcacatcacctgttagtgtgacacacaatggatatttcttgagtattgaataaatgagggagatgttgagaggaaattctcctgctactgatcctgtcataacaagagagttcatctgggtgtgtcaagttcctaggaaagaatcattataactgatgtgtttacagattgtgttgacagttttcaaatgtgcccaaagtttccaaccagtctgagagagggtcctcctgtgctgagtccagcagaatgacccagctgtgaaatgtggtatggggaaaagtgagagattttagatgccttcaaaagcaaggcagtgcagggagagtcaagtactgcatggcctcagaaggtgggatgtgctgcggtcgccacacctcctgcagccaggcagaaacttaggccatgtatgtacctgtggagcctctgccctaaaaacacaaaatccttttagtcttattataaaaggaatacattgcaggaaattcaagaaaagcataaaaatgcagggaaaaattaaaattcacatgtaatcacaaatcagggttagcatgaaaaaaatggaaatcggattatatatatataattttatgtcttattttttcacttaactttgtgtcacaagcatttatcttatttataaaatattctttgaaatatcccttttaatggctgtagtattccaccgtatgaatatgccataatttattcaaccatgttgctgttagattgcgtctacatttcactatggcaaatgatacaatggcaaagtttcatgtagtacataattctcagcatgatcctctagttattttctaaggttatctccttaaaggtgggaattctgggctagaagacataaggaagtttaaggcacttgacacatattgccaaatggctttccaaatagattgtatcattttcagctgaagggtgcaaattacccttctcagcagcccttcactgatttagagtattactttgaattattttataattaaaaaatggataaccttttgttgcttgggaaataatgaatacatcttgttcaaacaggaataatttctttaaaaaacttttaatttcggaataattttaaatttgtagaagagttgcagatactgcaaagacagttcctgcataccctcacctagcttttctctgatgttaatattaacatcttacctcaccatggtgcatttgttaaaactatgaaattagcattggtataatactattaactgagccacagatttgattcagatttctccagtttttccattaattacccttttctcttctaggatccaatccaggatccaatccaggatcccacattgaatttagtggtcatgttccttagtctcctcccatctctgacagttctatagtctttgcttgtctttcatgaccttgacacttttgaagactggtcaccaggtattttgtagaatgtttttcagtttgggttttctgatgttttttcttagaaatagactgaggttgtggatttggggaaagaatcacaaagagtgatgtgttcttgtctcatctatcagggagcacatgatagcaacatgatttatacaggtgatgctaatcttgactacttgcttacaatgatgtttttcaggtttctccactgtaagctgactatatttccctttccatactctagtgcctaaaagtaagtcgctgagtccaacctacattcaagagaaggagaattaacttttacctcctagaggaaggagtatcaaagaattagtggttatatgttaaaactgtagcaggtgtaattttaaataaaattgctataataggggccccaaaggtataagggatttgcccaagatcacacagtgacaacattgcaggtttagcactaagatccaacagtctgatttcccaagtcgatgttctttaataaaggcatctgtgattattctgttaaagatttgaggcaagcatttcctacagcacaattattactgggctttgggtagttaggcatagttgggaagcagtggaatgtaatcctcatcattgcaatgcagacagaaagtcgtgtactttaaaagaggtggtgctgcttgtcacccctctgtggctgggatcactttgccacgttacagggttgaagttccctataccttatccatatactcccagcccattgttttctcccctacctaatttctccctgccctcactcccagtcccactcccaccattaattctgagtgcttgagggcctaaaacagctaggagattgaggataactttctggagaggaggatgaggttagaaaagatccaggctagaaatggtggcctagaagcagaatgagtagaggcttccagtgtctggcatgctttggttgccactgcattcctaacggaaaccacagggctaaagaatacaggggcaaagggatatgaggagagaggttgaaattgagcaaaggaagtgaaaataatttggttgtgttatccacctatccttcaactctgtctgtcttaacctagatgaccaaagcaggcctgtccttgatggcagctgtaagagacctgtatcatcatcaccaccatgagtgataccatgcattatacttgctcctcatgatgccattatgcagtaaatattatgggctgcttttatagataaagttcagagaggttaaatgacttgcctgaggtcacacagtaagtcccagagccaggagaatccagttctgtctaattccagtgttatctggaacaaagtctacagtgagactggttaaaacacaaaattttcaagaaatatgagaacaaaccttatactgagcgtaaaggaaacactggatactgtgccatatactgggataatcccattatctcatttaattatctttatggtcctatgaaatgtaagtactattaccaccattgagaaaacagacttaacaagaagattaagttatattccaagtcatacaaaaagtggtaggccaggatttgaacagaggtcttctaactccagatgcccagctccaaagctacgtgaacctcccttctttgtaaagataagtagaagctgtgggcctccccagtcacatagtaagtacagggaattcgtggtccccacctctctcactcatgtgggaatacctaggataccagtatcacccttggctaacatgggagacaaacggttaatagatgacaagcacataggtgtttctttcaatggcagagtttcaacttgaggaatatatagactcccagcttctgtcatttcagtctaattctttggcaaatattaccacttgtttttatttctaggaagccctgaaaatgtctgttttaccataccagagttcttagacccaagtatgtaaatgtttgtaaccatggatgctaggcaattttggcttcaatcaatcaaaaactgtggtctttaatatatagaataataactttaaggaattctgtgaataagctcactttgacagcagcattaatatcctttcctcactgtttaagcttgacttttcattgtggtaacaaccccatgaaatttccatggtctgtaattacagttataaatcttatgtcctgctgatgctacaggccaaatttaagtagtctctattgtttttttaaaaaagtatttttcaattatttgaattataaaatgctcttttaaacatttcaaagagtacaaaagtgtttaaaataaaatgaaccatcttcctttccttcccttctttaactactatgatgatgaccatagcttaaatcctcccatacattttctgtactttgagacgacgcatacacacatatttaacaaaaggggataataattatgtatactgttctgtaatatgcttttcttgcttaactagatattctggtcagctttccaaatcaacacattcagatctatcttaattgttttaatagctgcacagaaattcataatatgaatgtataagtatttatcatctattgataaacatacaagatgtttctatatgtgttttgctattaaggcaatgctacaatgcatatattagtacatatattttatatactggcagataagttcctagaaatgagacttctggggttagaactcctaatttttaccaatctgctggataaagaatggtattttgctgttttcattactgggtcagagagtatgtacatttaaaattttcataaatattgccataatacgttctcaaaaagatagtagttccaaatgacagacactttaaaaatttaagctaaaaaaagagctttattaaaacatattaggtagcttcagtggaaacactgctgttattacaccttacagcttggttgtcatcaccctggggacgggttgccaaaaggttcgccatagacttccagaagaaccatcacctttgccatcatgtctgtcaaatgctgagaaaagcatattaaagtttgccattgtgattatgattcctattaagttttccgtgtgtttcaaagagatttttacctcatataatttaagctatatctttgccacataatggtttctgattgttaatttttctttgtagtttttatcttttttcataataaaagattcttaagttttgtatttttatattagttttcttctcttgcttttttttagtttacatttgcctgatacataatctgggccaatttcttaatttccatttatttcttgtctcattctattagtcttccttgataagaatgtttaagctactcatttttattataataacttgtattttatcatgctatattaatattattttctgattacttttaattctgcttttcaattttttttttaactttttcatacttgtatgcattaattatggttttaaaatatcccatttctggccaggctcagtggctcacgcctgtaatcctagcactttgtgaggccgaggcgggcggattacctgaggtcaggaggttcaagaccagcctggccaacatggcgaaaccctgtctctactaaaaatacaaaaaaattagccaggcatggtggcgcctgcctgtagtcccagctactcaggaggctgaggcaggagaatcgcttgaacccaggaggcagaggtcgccatgagccaagatcacaccattggcgacaagagcaagactccatctcaacaacaacaaaaaaatcccatttctaatgaataacttacaagttttactattatattcttattttactagtgatttctctttattttcatagttatttaaatatatatatttccatattggcagaatggaactccacagataatatgaaattctatccttcatcaaatgtttcactatcttgttctaaacctttccttatgcttcttcaattaaacagttttggcaatgtttttatcttacttacccttctttgtccttactcccatccccaactcttacatgttaattatttagaatttaattccaggatgttattaaatgctcctcctgtaacatatttgctgactattcccatttttttccaaattaatactgccctcatacattattactcatctagaactaactatttacaagaatcattgctcaccactatttttatgacctgtcttctgttattttgaggtctttgtacagttttaatttttatttcagtgcagaaatatccttgagtaatttcttcagaaaggatattgagatgttatactttttagcttaatgttttctgtctttgcctttacatttacatgatatattggacgagcataagatccttgagtcagtctttttctttaggaactttgttgttgcttcactatatagttgttgtttcaacaattttgtgttgtttcacagtttcactgtgacagtttgatgttaggttgattctttttcctcctctgtataaaagattatgtcaccagaatcttctttcattactttggataggacctaaaggaccctctcaatctgaaaatctatgctatttgttatcacagagcagttttctgctgtcatttctttgattgttacttttctatttattcctttttctctttctaaaatgccattatttgtatattggagtcatagatctgagatctgtgaatttgctattcatgtctcatatctttttgcaaatggtttccatgtctccaagtctttgttctctattgtgagatattatttgtattgttttgtccagaatattaatttagttctattcattgactattctttggttttgctgttgaatttttaaattcaggaatagtgtgtttttctttcagattatttttttctgtgacctaattgcatcttcttacggggtcttattatattttgttgttgttatcgtgcttgtctgtctcttctattagttctgcttcaataggagccacctattcttgctttttcagctgaatccttttaaatgggttgtaatttttctttgcctactcttacccacacagatcaggctatcgttgactcttgagagtgttaaactaacaggtggtggaaggtaaagttggagattttggtgagatgtcttggcagccaaatgaactggaaagcgggcatgtctttgctgaggcatggatggcagggctgttttcagacctcctgaggggagaaaaggctgtacttttataaaccctgtagttcacatcaaaggctgccagcatcattttaatggggaaacattttaagggacagtaaattacaagtgggaagagaaagtatgtctcagcatgttgagagggatctatttactaagcaggtagggccccctcagacagatgagaaatctttagtcttgcaacaaactactagaaatacaaaccttcacttggacgtggatcacttgggaactatgagatgcaaataatgataccagaacctacttttttattctctgaagaactcaagtgttcatatttaccagtggtgtccttgattctccagtagcagaccactcttctagctgagctgccgcaacaagttactagaaggaagaagagctcgtgaccatgcttccaggccattgtgaatcccagtttctgaattttatgccaaaataaggctgaagaattttctttgttataagttgagtaattgaagagaaaggatcatcaaaatgagttgggatattggtgtaaaaaagatcatgcatgtgtaaaaatggtattgtgaaaatttacttacagagtataaaatgttgcacttgcccattacagaaagaatttttttccaatagaaaagttttgagagacatttgtaaagtaacttaaaaattataagcccttgtgctttcatatttctcacttaaaagaagtttaacatgtttaacatcttacctcctgattctgactcgaccttggcagatataatggcttgcgtatagaagttctaaagtcaattttctaccagaaatatgaagtcagatcagtcccctgtgtgtgttcagaaagtggggatgcccgcggttggcttggcaactaggcaggtgcaaacttcctgccacagggcagttctcgcgaaacatcacgaggtaaaatgatgctgttttaatcctcaaagacctcccgtttgcatttgattttatttacagatagccttggataccagttactggactttcattaatcacgtcttcatctgggggagcattgccatttatttctccattttatttacaatgcacagtaatggcatctttggcatcttcccaaaccagtttccatttgttggtaagtgagtcatgttgactagtggaacctagtgtctgctgctgtttacttgtcttataatttattttttgtgttaggtagagctggggatgattagtgatcctttgtccagaaattgtttgagccaggcatctgaaggcttccgagtttaaaagtggctctaaaagctcagtttctgctgtctctactggatgcagaagaatcactcacagtagcttacaggttctcaacagcttacatgtagtaggctgtctctttgcaaatgagaggcatagcacatacattagggctacctgaagacctgtcaaatgctcatatatggtagagagaagaaaaagaaatactagactctccttttatgccacattatcaccaacatctgccaaaattcacccatagaacttatttgcatttagataagaatgaaacaatgtataatttagagccttctaaaaattcctggacattaatccataagtggcatgaggagtaggctttgtagttagtcagtcagggttcaagcgccagctgtgccacttaacaagctgtgtgactttgggcaagtttcttctttccatgcgagaatatataggaataaacaaaactcagtttctcctatactctcattcagcaagcaacacagaagacttctgtgacctctggtcatcgagaagtagggatttcttcccaccaacaaccaatgaggtgtttctgcagaggaccccagctggatgttctccaattcaattccggcaatatctccttggagggagtgtcagatcctacaagttgagggctaagttccgcatgactgcccccacacttccaatgctagtagcaagccacaggatgttttacctctacttttggccagctggctataaattggggtttccccccaaccccctccctgggtttgattaatttctagagtggctcaaagaactcagggagacccatttactggtttactataaaggatattacaaaggatacagataaagagatgcatagagcaatgtgtggaggaaggggcgtggaacttccatgccctttccaggcatgctgccctccaggaacctctacatgttcagctatctaggaactctttgaaccctgttctttaaggctgttatggaggcattttttatataggcatgactgataaagtcattggccattggtgatcaatttaaccttcagtccctcttcccttccaggagattagaggctggggctgaaactcccaaccctctaatcctaccttagtctttctgatgagcagcccccatcctgaagctacctagggacttccagccatcagtcaactcattaacaaataaaaagacacatatcactgaggatttcaaggagttttaaatctatgccagaaaacagagaagaagaccaaacatacagctcacaatattatactatgcattaatgtcttcacttataaactgaggatattaataagcctattttcatggaaaatttatgaggattaaatgaaataatacatataaagcacttagcatgtatcctggtacatagtactttttaaatgttaaccatggtgatggtgattattattattcatgcaaatgtggctcgattactggtgggaagattgcagaggaatttgaacatcagatgagtagcaaaggaccctctaaaatcccttaaaaaagattctattattctacaaagagtatacctctggtctatgtatagggtataccatcattgcactccacatttcaaaatgattcccagcaaaggccactgagctttataaaagagggatattaatatactttctcagaggttttgaaatctctagtgtgtgtgaaataagctgctaaccgagttcatctaaacaaactggaaaagagagatgcgcagtgaccaacattcttgaacttaatcaggcaagagtgagatttgtatccactaattgaggaagtaaattcttggactaatttatgtagaaagcaaaataagaccacaaggactaaaataggattataaggttagtaaggttacaaatccacattgatgcaaaggcacctgaaattgtaattcaatttaaattcacgcatacacttaaaaatgttcttcaccttttgccttttcctacatgtaaatggaaatctttaagttgcaccactcttacttaatatgtactggtaatacgttgtttaccaaaagattccaactatgtagagacatgttggtcatgagtaagaatgagcatattgggaaacaaagacaccaaaactatttttgttttatttttttaagatcgtttgccaaaatgaaaagttcagtgtattgactagaagatttccagtcctaagagagcactgtgatgcataatgagactagaatgcctcaactggagaaagtaatttgtgcagggaccactcttttccagctaagcacaagccatttcagtaattaattactgagctccagtgaaattttttaaaagttagatcaacattggggtttcaggaaaattttttttttccttagtagctagcagcaaacaggagtgtggtttcaaagtgaagcttgttttcccagccatgcctgagggtactaagcttcaaggagctcaaagagacatttaattgattaagtcaagtttgtttctgcccatggctgaaggcaactggaatcagctgctcttgggtaggcagattcctgtctctaaagccagaaaaagcagacataccattcagtagccaagccctcatacccaaagcgcatttgaatggtggtaagctttgaatactgggataggggacctggataactgggggtatgatgataaatctctagaaaatgaacagggacaaaagtttattttggtgatataagcagggttggcatcttcccatggagcttgtctgcctgccttactgacccgtattgccttgtttaaacccacaatggggtatgtgaggtgtgagtaaaaagtaaggaaactggcttcaggcttggaaatgagtttcactgtcctattgccctagcatgttggatggctgcatcaacagtctcctggtgagggaatgttcttttcacaaacccaggagccttcttgatcttggaactttgaggacttcataaccaagtgaacaatagagaaataacaagttcctctgaggcaggttttctcgggccattgcctgaaattaaaaagttggtcctgcaatagataaagctccccttttatgacaagccaatcaatgcgatcattacttgagattgtacctgcatctggaacattttttgtgtagctttgatgtgatagttttaattcaagagtccacaagggtaaagggtaaatgtgccttttaaaaataatggctgctttgtaaccacaagatcttgatgctggaagagagaattgtgctccgtgagtgatattagactgagcctgggtgagagaatgcttggctcaggctggtaatctctaagtgatcaggccactaagccgttcctgagggtgatcttagcacttctgccttcttatcatcatggtgacattaggtgatccaaatctcaccattgaaaaaagatcttggccaggcgtggtggctcacgcctgtaatcctagcactttgggaggccgaggcaggaggatcatgaggtcagatcgagaccatcctggctaacatggtgaaaccctgcctctaccaaaaatacaaaaaaaattagccgggcgtggtggcgggcacctgtagtcccagctactcaggaggctgaggcaggagaatggcatgaacgcaggaggcagagcttgcagtgagctgagatcgcaccactgcattccaccagcctggaagacagagcaagactccatctcaaaaaaaaaaaagatcttgtaggaacaaagaacctattaattaataattcagtcctacttgtaaccacagtgtatattttctttaatgattgataggtaatgcacgacattccctgacccagaagtgcatctggcttgtaattctcttaacaacagtggcttcagttatgccagtggtggcattcagatttttgaaggtggatttatacccaaccctgagtgatcaggtatgtcacagtgctgatgaatacttgaaggctggtttttggctcttgaaatggtgtccttttctgccttattggaagctcagagatgggctaatgaaattgtcacaagcaaacacctactggtgcatgagatcacatcagaatagatgggacttcccacatcttgaatgtactagtccttagtgccatgaagagaggcatctatactaaatgtggatggggagtcataaattacaagttgaactgggtattttaaaaagctgacttttaaaaagaagatcacaggcatcattttggacaatttttccaagggaaaggcaagctataggaaaagatactgatttgagggcaagtacaagcacaataaaagagagacaagcatggtatgagtcaaaggggcttaacatttttgtagaaatccagtagcagattcagaaacatgggtgagatgttaccttctgaacagattaagaaggggaagagcagcatgctgggtagattagtacacttggaaggaaaataggaagaacaggttatagaaattccttaactggagaattaacagaacatatttcagaatttcatgggaagaggagtaagtaggacaatatcaacttaggtcaggactcagataaagcgtgaaaaggagaaagggagacaaacattcatagccatgtcatgagaagggggaacatgctgctgtggtgagtgggaccaggccagtgatgctgagagagactgaggtaggtaggtaggtaggtaggtaggtaggtaggtagatagatagatagatagacagacagacagacagacagacagacagacacacacacacacacacacacacacatttttttttaatcatgatgtctctgacattttgggaccaaagtgtaaaaagattccttccggaaaaattcggagtcccttgtcatatctgtcctctctctttggttctccaagctcattctgacataaacccagaaaatggcggatgagttaaggaaggaaggatgtgcttgtttgtccgataagtttgatcgtgatgttctgcttgatggttttctcctgacacaaaagtcaggatccaagtgatttgccaaaccagagaacaaggttgcttacaacaaacctcaggtctttttctccttagctttacagggaaatgaaagagtacagcaaacctcaggtctttttctccttagctttacaggggaatgaaagagttgtgggaaacctactcacataatagggaacatttagaaaggccatacaaacctaagaaatcaaaaccctggaagtctcatgatacgttgagctaccacaagaattgaatatttctgactcattttctgaattttcttctagtccagttactgacaactgttggatccagagaatctctaaaagagaggaaaaaggctgttttgggagaatgaaattataaattattatgctgactttgggcggtgcatgttagaaaatctttctatacaaatgtatgctcatatgcattgaagatacatgagagacaataatgaaatttgtctgatatttcttaattacttaatagtgtctcgatagagataaaaatggaccagtgcccccccagtgttatcttttgggtggaaaatttcttagtttttagatttaaaacttccttttgcaatgttgtttttacttataaaaaaaaaaggctttcactttacaaagtgggccactgcctggagtctatcatttggatgcatcatctcactttgggtctgtttctctccagatccgccggtggcagaaggctcaaaagaaggcaaggcctccaagtagccgaaggcctcggacccgcaggtcaagctcaagaaggtctggatatgcttttgctcaccaagaaggctatggagagcttatcacatctggaaaaaatatgcgagctaaaaatccacccccaacatcagggctggaaaagacacattataatagcactagctggattgaaaatttatgtaagaaaaccacagacaccgtgagcagctttagccaggataaaacagtgaaactgtgagtcaatatgaatttaaaccacgtagttatcttttcacttcaggtggagctgaaattctgctggctccagagtttgagatttgaggcaagaggtggggcaggcagattgcctcactttacttaaatctgcggcagacaactgccagtgcccatcaaacaggagtgtgcgctatggaaaaccaggccagagggtcactgtctggtttgtgatttggtggacaaaacactcgctgttacaagtacagattttttttttttttaaatcaacctagataccaattgacctgaactttagaatcttatttatggagaaaaacttgtaaagctgcatattcactgaatggatcctcaggcggataaaagggtgcattttaaaggtatatatccaagctgaaaagcatgcctattgacagataaacatgtatctgtaagatcagcctttcccaaggtatacttttaaaatttaaagcgtgtactgtgttgctttcagactgagttgcatgtcactctttagtcttgatatctacctgtctgttcagccaggacaacaaatggcttccaagcctgaagaatacaaaagtgtgcttgtgtttctcatttttataccagtctagggacaaaggagactgaacatctttgcagcaggataggctggtaatttgatcaaatttattcaaaaagctctcagtctgtgtcatgtaaggacatgcttatgaaatgtgagagaggctcgccactaagtattctaaatacttttcaatggcttttctaacaacctcagtagtaatttgctgagcatcatccagaccattaatagaatcagcaaagcactggaatttcacactttaatgataatattccacatagtctatgggcaaatattttcaacatttccaatttttaaagcttcagaattgaagccaaacaaattaataaataattgttttaattactatttaaaaactcaggtttagattgtttaaaattagttgcttttgatactcagctgtcatgtttataattcaaacatgtagtaaacatatgtaggtaaggttgtttttttggagatgttgcagctcaaatttcagtccacatatgaatcatcagtgtattttccataaagtgattcgggcatatttgtgtgaaaacctcagttctgtcacttcttacctctataaacttggacgataatgtgccttctctgagactcagtttcttcctctgtaaaatgaggacatactacctacctcacgtggttggttgatgattgtctgtcaaagcacaaactctgaaattattaaaaacataattatttcataaacagatgagttaagttccagttaactcaacatcagtataacagagcaattggaagagaatatgaaaaaactggaatctaaatagtcagtgaggaaggctttgataaaatgaaattgccagaaagatataaaactggttagggtcctacagggaaataaaattataaccgtggaggtacatttctctaccagaaagcaaaaataaagcatcatgtcttaatggttttctacaaatcaacttctaattctacagagtccttaatctggtccctattaaattcttggtcagacaaagttacatttcccaagagagtcaggtgacacttgagtgagtttgatggataatgagctaatgtgatatctataggtcacaattttttaaaaccaaaattttcaagtctgggataatctttcctaaatgggatcaaatgaaataatatgtgtaaaagagtcaaatgcagtcctttaccatagtaactgcctatggacgttgtctttcccttacatgcctgcctacacttaaccagatgttggttttcaatgtctaatttgtcattagtttcaccacatttgctcactttttgtaacatttttgcaagatttgaaaactttcagtaaatgttttggcactattggtacttgatgttttatctcttctttatgggaaattcattggggagatttttgttacattagtccacgggtatttttttctctcctttacatgctggggaaaatgtactcattcttagaatcagagtcaagaataaaatgaaacaattggacctatgtgtaagggataggaaagattagaagtggtccaattttgcaagtccagtttaaattaaataaggctgtttataaacaaatagtgtggatgattgtgagagaaacatattatcagcttactttggccccatgagatccaagtaaactcacacacccattgcgagatcattcaattacaagcgccagggattattttgaacctgaagatgaaaagtgatgagaggtgggtagtgatggtgggggcactggggaataataacattttaattttacataaatgttatcaaattatttggaaagaaaaactattttttctagatttaagctgataatcttgtgtttttaaaatctcagcccaagttttgagctattataggtaattgcaaattgtgtttccctgacttagctctgctatctttggctctctcctctgcctccagatgtatatacttatgaaggaaagaaagagagagaggaaggaagaaagtaagacagataaagcaagagaggaaaaagtaatggaggaaaggatggtgggagggagaaaagagttttccagttatatgtttttttgagataatctgactctctgaaaaataaatgtaatccctcaaagaaaaaaaaagtggattatatttgactcttgaatagtaaaatttccttcacatcttgtgtgagaacaagaaaatcttaccagaatgggggccgggagccctggcttcctgtcacagtgatggtgctgatctgtgtgagctggggcatgccacctgacttctccaggccttggtgtccttgtccattgatagagaaattgggacaggatggtcttaaagcccttttctcatttacccaatctgtgagctgttcttgtcagtgttgtctgttgtgtatttgcaattgcctttgttagagagacagattttctatatatatatatatagagagagagagagagagagagagagaagaaactgacttggatgttctcttgagggcagggcctggctcttcaggctgttgtactggtttgtatttctctagactagcccctgatgcactgctgtctctggcttttctctcagctcaccacagagctgctaaaccctgtggtggcattttacctgggtcagttgaatgctgtttcttgttaatgattcatgaaggtatctccacaccctcctttcctctctcatcattttgagtaacaaaagtatccagatgtgaaggtaagatactcatgtcctgttaagaagagctcatttaaaagtcctccctaccttgaatctgggcttagaggagattctttgagcctttgttcccttgggaccgaagttgaagcaacagagcttgaacaattttcttcatagttatagagcactttgcagtttgtgtatcattcttacataaactgtattgtgtctgtgtagatgtaaagtgtgcagatttagggaaaagtgtaaataaatgtaaaaatgttcagaaatatatgtttcaaatgttcttttacctttcagtgcaaataagaaaaatctcccttccttccttcctttcctacagcatttagtgacgtcaggtaggtgtggaaggcaaaggaaataaaaatgtctcaaactatttctaaaaagtcactaggaaatccaactaatgagaaaagctctacttctgatttttatggtaagaaattgaattactctgttagtgtgtgcacaaaatgcctcaagattgatataatctaattatctcagttatatgactcagaattattattttacactacaaagagtaggcacaaagttaatagtgtaggaatccaggaataatgatgacttacagactttgtgatggaattctgcaggccatgggtcagataaccgtgtgggggggggggtcacaattttccaatttttacattaacatctggtattaaatgtctgcagtttgctctactgcgtcacatttcattccttggtgagaaatcataagcttttgcaattctctagcctaagcctttagctgaactgcctggaagccagaactaaatgacccacgtattaccaaatgtgtattgcaaaagatttggaggaccttgctgggctaatctgtagtttggggctatgacttaaccctatctgtccttgaatttcaaaacttcctggcagatctattcctgtaactggtgcagaatacaaatcagcttggagctgcatacataaacatccagatttcaagaaataataatgattagttggccagatatctctggctatctcaattcagattcccataaggtttataagggcaagttaaaatttttaataaactgcagccctagacttacacagaaaattcttactggagcaggatgcatggagagatgatagttaacttggaagtaaagtaatgatcaagaagaaatctagttgtttcaccccttgtaataaatgtttctatactccctgccttcttctaggtaaatgtgagcaatgattaggatgcttctttaacagctgatgattttccttctcatcccctttctgtctctgctccagtatgtgacactatagagatacagggaagtatgagataatgcaccaagattggacagaaataataatattgaccccaaaacatcctcagaaaaggttttgaataaaattcctgttactgaatttcttgagataatgtcactttcattaaatgactactgaaaaagaataaattaatttgggattatgattagtgactgggggagatattaagcttatttaacaaacagttggacagggacactgaccaataagaatgaacatgggccatcaatggctagtcttgccccactgctaatggcagctggcactctgacctatttggaccacgtgataagtcacatttgaaactatacctatttttctttatgaggtgcctatttggtctaaaccagataaaaacagcaagatttttttttaaaccaagtaacaccaaaaacactatagggcaggtcaaaatattttcctggtatcgttttgtgtggtagctaatagttttctgaaggtacgagatgatgtgttttgaacaacaggaatagtttctaactgcatattattgacaaaatatgtttaggtattgtgtatggttttttgtctcaatgaatactaacatttttaattgaaatatttttaaaaatatatattttacaattataatataaataattgtggttcatagtttgggagcttagttaaatacttaggggtagacaagatgaccagaattatctttttgattgacaggcaagactttgttttacggttccatttcttcctcaaagttctcatgtatggttcacacatagcttacatctagtagacctctcagatgaaatgtactaacaaatttagttctactggactaaatttaaaattaataagtgaatcaatcacttaatagaacactgagtgtggagaggccacggtacaagataaataagaaatggtttctttttcttgccttcggagaggttctaacccagtatctttcaaccatgcattatacataccacagttgatggaatctaaaatgcccccttgtaaatgatgcaccattcatttacataccacgggaaaacaagaagaatattgccgcttagagttgtaaagatgccattggatgtaagatttacttctaatttcagagatgttaaattatgaaatctggtaagtattggattgcaggaggtttaaaaatatagttcatgtcaactacttttttattgtattgctgtacaggaagcatgtcagcatctgcttctggggaggcctcaggaagcttccaatcatggcagaggtgaagggggagcaggcacatcacatgatgaaagcaggagtaaggaaaagggagtggggaagatgccacacactttgaacaaccagatctcctgtgaatttatcaccaaggggatggcccaagccattcatgagagatccacctccatgatccaaacatcttccaccaggccccacctccaacattggggatcacatttcaacatgagattttggcagggacaaatatccaaactgtatcaggactaaggaccaagcccttctctgtctcttgggactaggtaagacctgaaattcttatacgctccaaggagatggaatggacagactagaggttcagagccagtctaatttgatatgaaaaggtaaaaaaatttgatacttcttacatctcagttctgtagaagaaactcaaacccattgtgtaattctttcacttgatatttggtataatagtcatggtcatcagctcattctgagcaggagtgctaatgaaggatgtgtgtctgtcaagtccaggctgcttcatacaactcttgtgcactccaccctctatccccccatcatcctcacccccagttcttcctcctattccccacactgtggtggtgttgttaattcatccacccattaggctgaaatgcaggatatcaggcccaggcccctaattgctgttgtagactggatacacattcttatcaactccctttaccatgggcttttttctctgaccctctggtaagtggcctgggaccttctctaaaatagcatcataaatcagccagagctggagtggtatcaccacaaaatgaagaaggagatgagtagagtaccttctacacatcctcaccctgggtggctcaaagaggaactatgcttgtctgagtaccattgatgattgagatagaattgtaaggtgggtgatctgtcttgcgtagcctccttcactctaatctaatcttaccacctaacatgcccttccccatctaggttactcttctaagtctgcctcagttacctgctgtaacccctttaaaagtgttccaggtgattctcctgcattcgcccaggagactatgtacatactttcaacttgatgcaggaacttccttcagaataagcctgcagatggcattcagtctctgctcagatgttcccaatgatgcagtgctcatgagctcaacgaagccagctcccttcgaacagctccattggtgaggaatctccttcttcttttgacctgaggtctgtttccccatcattaccctgcattgtttgcctctgcccttgcaaaagagactgaataagtatctctcatgtgacagctcctcaaatatttgaaaatagttgttctgtcctttgagttaaatagcagcttttgttgattgtctgtagtctttaaattagtctgtagtctagatagtgtgagttggaatagttcctgacctcaaaaatgttttgatcttccttggggaccttgtctagatctgggaaggagtaccttgaggctgaaaaaatatgaaaaaataaaaactgaggaaaaggtggtggtgggagaataatttccaaagaatggcaaactgatacccaaatagtcaaggggatttctctaacaccacttcttagtatgggatagtcccgaatgtccttggcataaaagaattgatgagaacaaaatccagcaacaaagaaaaaatgttttcatagtaaaagaaaggacttgagcatcatggggagctgggaaaggggaatatttgagagaaagtcatgggacagattgagtcgtaggaaaaaagtgaaagaacatttatactctgtatagtttgaccacctaggagaaggaggggaaggagaagccaggggaatggctgacactttagaaagtccatcggttacctgtgggactgttagcaaagatgccttctctaagtgcatttacccacctggaaaatggggatcatgagatgttccttgaaggattgtgaggattactaagtgctgggtattgtgctaagcctcataataattagctcattcaatgcaatcttcacagcaacccagtgaggtaggcaccattattttccccattttaaagggaaagaatcaaaccccagagaggttaagtaactttctcagagacgtataatggaagagctgggattcaaaccccaggagtggcttgtgctcttaacccaatgctatctctagttgacacttaggtcatagatttggtctttttttttttttaattttaacttttattttagattcagggggtagatgtgcaggttatataggtatattgcacaatgctgaggtttgggatatgaatgatcctgtcacccaggaagtgagcatagtacccaatagtttttcaacacttgctcccttcccctagtagtccctggtgtctattcttggccatttttatatccatgagtacccaatgtctagctcccacatataaaggagaacatgaggaatttggttttctgttcctgcattaatttgcttaggataatggcctccatctgtatccatgttgctgcaaaggacatgattttcttcttttttatggctatgtaatattccatggtgtatatgtaccacattttcttcatctaatccacccttgattggcatgtaggttgattccatgtctttgctactgtgcatagtgctgtgataaacatacaagtgcatgtatcttttttgtagaatgatttgtgtatatacccaataatggggttgctgagttgaatgataattctgttttaagttatttgagaaacttccaaagtatgtccacagcggccgaactaatttatattgctaccaacagtgtataagtcttcccttttctccacggccctgccagcatttgttttttgactttttaataatagctgttctgactggtgtgtgatggtatctcattgtggttttgatttgcatttctcttataaatactgatgttgagaattttctcatgtttgttggtcacttgtctgtcttcttttgagaagtgtctgttcatgtcttttgcctactttttaatgaagttatttgttttttgcttgttctgctgtttaagctccttatagattctggatattagacctttgtcagatgcatagttggcaaatattttcttccattctgtaggctgtctgtttactctgttgatagtttcttttgctgtgcagaagctctctagtttaattaggtcacacttgtcaattttggttttgttgcaattgcttttgaggacctagttgtgaattctttcccaaggccaatgtccagaatggtgttttctaggttttcttctaggattcttatagtttgaggttttacttttaaatccttaatcaatcttgagttaatttttgtttacggtgaaaggtaggggtccagttttattcttctgcatatggctagccatataaacaaaaattaaatccaccataaacaaaaattaaaaataaaaattgacaagtgggacctaattaaactaaagagcttctgcacagcaaaagcttctatctcagcactgttgattgaatagggggtccttttcccattgcatatttttgttgtctttgtcaaagatcatatggctacaagtgtgtagctttatttctgggttctctattctcttccattggtctatgtgtctgtttctgtagcagaaccatgctgttttgattactgtagccttgtagtatagtttgaagtaacataacgtgatacctctggctttgttcatgttgcttaggattgctttggctatctagcttgttcttgggttccatatgaattttagaatagcgtttttccagttctgtggaaatgacatttgtaccttgatagaaatagtattgaatctgtagattgctttgggcagtatggccattttaatgaaattgattcttccaatccatgagcatggaatgtttttccatttgtttgtgttatctatgatttctctcagcagtgtttgtagttttccttgtagagatctttcaactctttggttagatgtattccatgtattcctagatatttcatttttgggggggctattgtaaattggattgtgttcttgacttgattctcaaagcttgaacatttttggtgtatagaaatgctactgatttttgtgtgttgattttgtatcctaaaagtttattgaagttgtttatcagttccaggagccttttggctgagtctttaggactttctgtctatggaatcatatcatcagcaaagagagatcattttacttcttcttttcctatttggatgccttttatctctttctcttgcatgatttctctagctaagacttctggattcattcttcatagtttctggtagcttaatttttggtcacaaatgtgcacacttcctattaaggctcttcttttttatctgattcccttagacattcaacacccttcaatatttcttagctgtttctttattttctcaacttctaagctatgagtcagtttaaggaaaaaaaaaagaattttctttgaaagttaccttatctgcttttgtttctacaggagaaagtcagaacctgacttgagctaacactaggcaagtgtccattttccatggacccctgctttggtgcttcttcagatacatatgctggaatcaatcactgtaaattctaagcaagttgctttttgcctataataattttataaattattcagcattcatactatactatataaatatatatttatacatataaataatcaatcactgtaaattctaagcaagttgctttttgccaatcataattttataaattattcagcgttcatactatactatataaatgtaaatatatatttatacatataaatatgtataatctgaaaatgttatatataactatagtatgaatatagtatattaatattatatttttgtatgatcaccaaagtattctttagctgggtcagcaggaaggggatgcttcagatttttgagtcaggcatcagaggcctgaaagtttgaaacacttgttcacttttgattgctggcttccagtttttggtgcagatcactggcaaagaaaccttccattttaaatctctcttgagatgctagatttttgttttaaatgtgatcataggtggtttgaatggatgcatagtcagccagaaagttgatttggatcctgaagttccctttaccatatacagaattgccaagaaca

SEQ ID NO: 736 - DNA, 2103 bp, Homo sapiens
ttctcacttatatgttatatttcttttcagactgtttatgaccagtggttcatcaccctttttaacattgtttacacatcactgcctgttttagccatggggatttttgaccaggatgtgagtgaccagaacagcgtggactgtccccagctctacaaaccaggacagctgaatctgctttttaacaagcgtaaatttttcatttgcgtgttgcatggaatctacacctcattagtccttttcttcatcccctatggggccttttacaacgtggctggagaagatgggcaacatattgctgactaccagtcctttgcagttaccatggccacatctttggtcattgtggtcagtgtgcagatagccttggataccagttactggactttcattaatcacgtcttcatctgggggagcattgccatttatttctccattttatttacaatgcacagtaatggcatctttggcatcttcccaaaccagtttccatttgttggtaatgcacgacattccctgacccagaagtgcatctggcttgtaattctcttaacaacagtggcttcagttatgccagtggtggcattcagatttttgaaggtggatttatacccaaccctgagtgatcagatccgccggtggcagaaggctcaaaagaaggcaaggcctccaagtagccgaaggcctcggacccgcaggtcaagctcaagaaggtctggatatgcttttgctcaccaagaaggctatggagagcttatcacatctggaaaaaatatgcgagctaaaaatccacccccaacatcagggctggaaaagacacattataatagcactagctggattgaaaatttatgtaagaaaaccacagacaccgtgagcagctttagccaggataaaacagtgaaactgtgagtcaatatgaatttaaaccacgtagttatcttttcacttcaggtggagctgaaattctgctggctccagagtttgagatttgaggcaagaggtggggcaggcagattgcctcactttacttaaatctgcggcagacaactgccagtgcccatcaaacaggagtgtgcgctatggaaaaccaggccagagggtcactgtctggtttgtgatttggtggacaaaacactcgctgttacaagtacagattttttttttttttaaatcaacctagataccaattgacctgaactttagaatcttatttatggagaaaaacttgtaaagctgcatattcactgaatggatcctcaggcggataaaagggtgcattttaaaggtatatatccaagctgaaaagcatgcctattgacagataaacatgtatctgtaagatcagcctttcccaaggtatacttttaaaatttaaagcgtgtactgtgttgctttcagactgagttgcatgtcactctttagtcttgatatctacctgtctgttcagccaggacaacaaatggcttccaagcctgaagaatacaaaagtgtgcttgtgtttctcatttttataccagtctagggacaaaggagactgaacatctttgcagcaggataggctggtaatttgatcaaatttattcaaaaagctctcagtctgtgtcatgtaaggacatgcttatgaaatgtgagagaggctcgccactaagtattctaaatacttttcaatggcttttctaacaacctcagtagtaatttgctgagcatcatccagaccattaatagaatcagcaaagcactggaatttcacactttaatgataatattccacatagtctatgggcaaatattttcaacatttccaatttttaaagcttcagaattgaagccaaacaaattaataaataattgttttaattactatttaaaaactcaggtttagattgtttaaaattagttgcttttgatactcagctgtcatgtttataattcaaacatgtagtaaacatatgtaggtaaggttgtttttttggagatgttgcagctcaaatttcagtccacatatgaatcatcagtgtattttccataaagtgattcgggcatatttgtgtgaaaacctcagttctgtcacttcttacctctataaacttggacgataat

SEQ ID NO: 737 - protein, 195 aa, Homo sapiens
MATSLVIVVSVQIALDTSYWTFINHVFIWGSIAIYFSILFTMHSNGIFGIFPNQFPFVGNARHSLTQKCIWLVILLTTVASVMPVVAFRFLKVDLYPTLSDQIRRWQKAQKKARPPSSRRPRTRRSSSRRSGYAFAHQEGYGELITSGKNMRAKNPPPTSGLEKTHYNSTSWIENLCKKTTDTVSSFSQDKTVKL

SEQ ID NO: 738 - DNA, 71594 bp, Mus musculus
  misc_feature (1)...(71594): n = A,T,C or G
agttgatggcccaggactgaaggggtcatgcaaaggatttgaggcttggcaccacgaagagagcctatgagaggctattggtaaagcctagttggagtggaacaccccagtgtattggagatgtcagtaccataggatgatcaccaagaacagcagccatagtggagtggatcaacctgagcttagagtgctacagagggcagagctggagaagtgatgccagcccttaggaggagcccaaaagatcaagtatggatcccagacactgaaacaagaagctgtaacattgatattgtcttggagactcaaagatgttaaagatgccagagccatgggatacatgctgaggaaagctgctaacagggagtggaaccagcctgggagaaagcagtttgttgcagtcaagaaagatgaaaaaggagtggagatctgaagactgctttgacatcagtcatggagatgcagagtttggagtttgcccagctggtttcctgtctttctttgggaattaatctcagaaagaccttgaactttggacttttaacattgttgagactgttatagactatgaggactttgaaagttggagtaaatgcattttgcattatgctatgtttaagtatagcccccctccaccagactcatgtgtttgaacaagtctatgggggccagggagtggaatgtgatggtttgtatattcttggaccagggagtggcaccatttggaggtgtggccttgttggaataggtgtgtcactgtgggtatgggtttaagagcctcaccttagttgcctggaagtcagtcttccactagtagaaggatggatgaagacgtagaactttcagctctgactgtgccatgcatgtctgggccatgcctgcctggctgctgccatgctcccaccttgatgataatggactgaacctctgaacctgtaatccagtcccaattaaatgttatttttttataagactctccttggccatggtgtctgttcacagcagtaaaaccctaactaagacaggtagtaaccacagagagacagcagtggagggtccaagagcaaaggaaaagaaaaggctgtacagtgccagaggagagactgcaggcacttcttgctagaagagttccagagagtagtgaagtctttggagacaaatgtccagagccaagagctctggccagggtcaagggctaataaggagtctggatttgctagacctatagagctataacaccctatactgtcaaggactgagcaatctatgcagttaaggcttgcctggaagctgtaatgccagccataacaaatagctaaagtatcatttcttccaaggctgtcacaggcctgtaatgtttgtacaaatgaggccttgcagaaggccagaatgagaacagtaccactggagggcaccacctgcctctgctcctgtctgcccctgttatacaaatatactatgtgggcaaaataattaaatgtaacaaacagaaatcagaatgtatgagttttagataaaagaaagagaacctgtggaaggtagaaagatggcttccttcctgctagggcctgaatttgattacctatgttggtggcttatgaccacctgtaactccaaggaatcggagactttggcagacagacctacagacacatggttgtgttgttgtttgtttttgagacagggtttttctgtgtagctctgacgacattcctagaactcactctgtagacaaagttggccttaaacacattagagatcagcctacctctgcctcccaagtactcagaattaaagccatgcatcaccatgcccagccatggggatttaaaaaaataaaataaaataaaaataatttgcgggacacaggacaaaactcaacaggaaaaaaataaaagtgaaaacaggcagttctcaggagaatatcttcatgacatcaaagacataaaaagaagcctgacatggtggcagtctcctgtagccccagctctcaggagcttaaggtaggcctgtgtatcccagaccagctcaggcaacacagcaagaccatgcctctgtctattgagtactgagagtacaggcatgcccagtgtaagaatgagattttggagctgggcagtggtggtgcatgactttaatcgcaacacttgggaggcaggggaaggtggatttctgagttcaaggccagcctcatctacagagtgagttccaggacagccaggactacacagagaaaccctgtcttgaaaaacaaaaacaaaaacaaaaaaaaaaaacaaaaaaacaaaaagagagagagagagagagatttttggggctggagagatggctcaggggttaagagcactgactgctcttccagatgtcctgagttcaattcccagggaccacacagtggttctcaaccatctgtaattgtgatctgatgccctcttctggtatgtcagtgacagtgtgctcatatacataaaataaataaatatttttttaaaaaaagagatttttgtccagtgctaattgttaggtctcaaccccatgacaaaaggctgagatgcctattaacagatcaaggtggacactggccaccagcctacctgttacagggtcttcctagctgtcaaaccctacctgttaccctaaactctccagcccagtaactgagctaggctttccttcccccagctcctctgattcctgtacaactttggctgagctggcctcttggcctctttgctcttggcagccactcttggttccctctctcctctggccttttggcttctggctctctgctgccactcttctcacatggctccgttcagtctgctggtcactaatagtagtagaggggccagagggatggctcagtggttaaagcacgtatggctcttccagagtcctggagtctgcttccttgtacccatattcagaggtgcacagttgcctgtaactccagttccaggagatttgatgctatcttctgacctcctcagacacagactcacagagacacatacatgtacattaaacattaaaaatacatctatagtcaacaagttttattttatttatttatctattggttttgttgttttttttttaaagatttatttatttattattatatctaagtacactgtagctgtcttcagatgcgccagaagagggcgtcagatctcattacgaatggttgtgagccaccgtgtggttgctgggatttgaattcaggaccttcggaagagcagtctgtgctcttaaccactgagccatatctccagcccttatttatttatttattttggtttttcgagacagggtttctctgtatagccctggctgtcctggaactcattttgtagaccaggctggcctcgaactcagaaatccacctgcctctgcctcccgagtgctgggattaaaggcgttcgctaaagtagtggcagaggctggagagatagctcagtgatcagaagtacttactgttcttctagaggacctgggtttgatacctagcatccacatggaagcaaatggaattactaactgtaactccacttccaagaggtctgatgctctcatctggcttctgcaggcaccaagctctctcatggtacacagataagcatgtgggtaaaacacccatacacataataaaaataatttaaaaaaaaatcacttttagccaagttgcagtggtacacacctttaaccctagcactcagactagggcagatgaatctctgtgaattttatgccagtctggtctatagggaacagctaaggctaaacagagaagccctgtctcaacaaaacaaaaagtaagcagtggtagaatttgagggtgggcaggaaaagtgtagtcctccctgctgcacaataaagccttcaagttcattgtaataagtagacaatagatagataggcaagtagatagatacagatatagacagacagacagataaagtaatggtagagacaggtttacttattttacagggaaattggcatgtactaaaaggccagccatgaagcctaatacagtagtacatgcctttaattccaggccagggagacaggaaaattgatctctgtgagttaccagccattctggtctacatagtgagagagtctatttagtcctggctgtcctataactcaatgtatagtccaggctggcctcaaattcttagagatcctcctgcctctgcctccgcttctgcttctgacgtgctgggattagaggcatgccaccaagcccagctttatttcctatttctcgtatttttagccaagaatgaagattttttggttttttttaacaaggggtggtggtaggggtgggaaagaagaagaaggggaggaaagaagagggggagggagacccccaatctctgtcnnnnnnnnnnnnnnnnnnnnctgtccttatggtgctgacattctagtgagaaagacatctcaaacatgagaaataagtaattgcaagggatgtagtaacttaggaggtgaactctgtagcacatgctgttttggcctgaaggatatttatcaagatgaagagactggccgggttggatacaggcagtaggcaaggaaaggtgcagggtcttactaggccatggctgccccgtggacatgcagcactgaaccagcaggtacatgcagggctggggagcagtcaagctcagctgggaacaaagggtacctctgttaacaaggaaggtgcaacacagctgtgtgttcaggacctgtgtattcaatactaggcaaaaggtgactgatgaaaagaatgaaggaaggaaggaatgagtgaaactactcatttgttcataccagcaggcccaagtccttccaaattaagaagtgagcctgaagcctggcatggtggtgcactggcagaggcaggcagatttctgatttcgaggccagcctggtctacagagggagttccaggacagccagggatacacagagaaaccctgtctcgaaaacaaacaaacaaacaaacaaacaaaaacaaaaacaaaaaagtgagcctggcccaagggtctccgtgcctgtcatttcttccatatccactgagttctagaactcagctcgaatgcccttcctggatgaacaggaggcaaggaggtctgaaatcactgaagtagatgtttagtgctggcaagaaacacggggcacatctggcctcctccatccacaattttagcatcactaaaggcaggggccaagaacagagataaggaagtcagtgaacagtctgatgagctacataatagtttcaaaattggaaactacctaaatcttcctaagtaagggaatatttcatgaaactgcctagaacacaagaataagtagcactcaagtcttctctaagaagccgggtggtggtggtacaggactctggtgcccggcagatctctgtgagattgaggccagccagggctatggagtaagttctaggacaataagggctacatggagaaaccttgtctggaaaaaacaaacaagcaagcaaacaaacaaataaataaagtgaaaataaaaaataaaataaaaacaaacaacccccccacctttttcaagttaaaaagttaatagaagttataggcacttcctgctagcctggacaacctgggttccataccccggacccacatagtggaaggacagaatctgctcctacaaactgtcctctgacctccatatgtgaccctctccccagcacacaaatacacgtgttgttttttgttttttgtttttcaaggtagggtttctctgtgcaaccctggttgtcctaggactcactctgtagaccagactggcctagaatttacagagatctgcctgcctgcctcagcctcccaagaactgggattaaagacgtgtgccatcaccacccaggagcaaataaatcttttttaaaaacgagaaaaataaattgaatagaaagaccaactaagggatggagagaaggctcagcagttaagagcactgactgctcttccagaggtcctgagttcaaatcccagcaaccacatggtggctcacaaccatccctaatgagatctgatgccttcttctggtgtatctaaagacagctacagtgtacttatttataatagtaataaataaatctttggaccggagcaagcagggccagagggagcagaggtcctaaattcaattcccagcaaccacatgaaggctcacaacaatctgtacagctacagtgaactcatagacataaaataaataagtaaatctttaaaaaagaaaacaactaaaagccaagcaatataagagcatataccacaactaaaagcataataaactgttcaatctcactcacaggaacagtcaatgaaaggttgcttttctgtggtgttttcttattgttgttttgtgttgctaatattttgtgggttactaattaacacttgcagggtttctcgtagtgcaggctggactggaacttcatatgcccagaggatgaccttgaactcctgagatgataggcccagatgcctttcagttttaacctacctgactggcaaggattaaatcaaaacgaaacaacaaacaacactggacaaggctggagctggagcacagaaataaaaagctaatctgatgtgtgagatcttgggttcccatgtgtgtatgcacatcataacacactgtgatcctaccaggtgaagagctagacactttatattttgccaatgaagctaagctagtacaattgctatagagaacacttagctaatatttactaaggtcaagacagattaatctgctcgtacactgataattggacttctaggaatttttactttataaatgccaacatatgcagaacacagattagacaaattatagtattatttgtaatgggaaaagattggaaactacctaaatgttcccaaaggcgggaagtgggcaattaaatccttataatgtttttatgtttctagctttttgttttgttttgctttgttttttaaggcatggtctcactctgttgaccaggctggcctccaacacatagaagagatctacccacaccttcctcccaagtgctcagactaaaggtgtgtgccactaaagctcaccgtgctctttgggttttgtttttgtttgtttttaagaatttagaaaaccaggccagtgagatggctcagcagatactagcactcaaccctgacaccctaaatttgatcctcaggacccatgttcaagccagatgtggcccatttacatgtgtaatcccagcaagaacactcagacagcaaagtgggaagcagaagccaggacagtgtgatcttgtccccaaaacaaagaaaacaagcaaggtgagtgtattagttagggttttactgctgtgaacagacaccatgaccaaggcaagtcttttaaaaacaacatttaattggggctggcttacaggttcagaggttcagtccagtatcatcaaggtgggaacatggcagcatccaggcaggcatggtgcaggcagagctgagagttctacatcttcatccaaaggctgctagtagaagattgacttccaggcaactagggtaaggatcttatgcccacacccacagtgacacacctactccaaccaggtcacacctattccaacaaggccacacctccaaatagtgccactccctggtcaagaatatacaaaccatgacagtgaggaaaacccctactctctaaatgttgttctctgatctccagatcattaccattctctttttctttagtttcatatgtatgagcattttgtctgcatgcctgtagtataccacaagcatgcctatgcattggacctcagaagagaatgtcacatggaactggagttacagatggttgtgagccaccatgtggatgctgggaactgaacgtgggtcctctgaaagagcaaaatagtgctctaaaccactgagccatctctcctgctccacataatatccaatgatcaaataaaatcagtcactagagaatcactggttataatgtgttaaacatttgtacaagttcctttttttaaaaaaaaaatatacttacttgccaggtggtgtggcatgtgtctttaatcccagcacttgggaggcagaggcagtcagatctctatgcattcaaggccagcaccagacagaccctgtctggaaaaccaaaaaccaaaacaataaaacccatttatttgttcagaagacacgcttactcgtggtctggtctggggaagtagctgattcagaattacccttctgacaatgagcattacagagggtgagcacacaccaccaggccatggtcaggccttaccgtgggaaagcattgagagcattgaggatcacactggaggcagcatgatagtgctgatgagagggcatcagagaaataccaaggagttagcttaatgtaaacgggtaaaagagccgctatggagaagggagggggaagagaaatagagaatgagaaaaatagagagcaaaacagccggagaaacagagagaaagaggcagatatctcttaatctttacaaggcttctctaggagctaagggaccggactatagctcaaggaagaaatgcaacagcatatttatttacaaattcctgttccagccttacaatagagcagcaagaagggaagggagtggcaggtcaggtcccatgatctaacacgtgtgctcgtgcttaagtgcaaaagcgggtaccttaccaggagctggagggtggggaaacaattttgagttagttctttcctttcactatgtggattccaagatggaagtccagttgtcaggctaaggagagagctcctatataggatgaatcatctcaccagcccccgtccctcatttaaccttcagcccactgcagcaaagctgttaggaaactgtgaggcccacacatgagaaagctgtggaggacacacacaccattcggatcccattagagttgcttaagccatgactttggttttagaccagccagggtccattccgatctagcacctctctctctctctctctctctctcgtcttatagccaccccacccctcttcacacacaatctttcttacttcaggtaatttattaatttcttttagtctctgcctcctttggctggtttaataacacccacctgggagcgtatgaggctcagagaagataacgagtttgaaacaattctggtgtgtctgttcccacatgggctcagctctccagcacacaccaaatttcagtcaaggggtttcccaaaaggatagaatgaactctgtggccaacagtacattctgtgaaagacggcgagttgctgtctccagactgtcagatgctgtgcagaagagcagctttttcctgaggccatgttgtcccacagccaggaatcagcagagaaagatctcctgtatcatgtcgtggacactgctaggagttcaagaccaacctagactgtatagtgaattcaagatcaagggcagcccacagctacataaccagaccctgtataaaaagaaagaacttgccttgcaagcccaggatctgagttccactcttgaacagaattaacgcctaaatattgtcctcagacctccatataaacacggtggcacgtacatacccacactcatgtgtacgtgccccaaataaatttttgaaaaactgagttatagctcatttggtagaatgcctgactacttactatgcacaaagttctgggttcggtcgccagcaacacataaactgtataatagtgaaacaggagaagagatggctcagtcgttaaagcctgggctcacaaccaaaagaaaaaagaaagaaagaaagaaagaaagaaagaaaggaaggaagaaaggaagaaagagaaaaaaagtaggtcatcctatgctacatagattgaggacagactgggctgaaaaactgttaaataaatgtctttctactgcactggtcagtcagtcagggtttgcatttttaaagagatcactcactcactcactcactctaaggcaactctcgttttcaccgtcattatcacaatgtcaggatttttttttccaaagcactagagattacattgtttgtgtattttcctagttgggtgtctccacccgtaaggtataagtcttcataaaaacagagacattgccttgccttgtgtcttcaacaaaccaaactaagggctttctattcttcaggcttttcaagtagtacctgatacacagtcaatgaaaggtcaatattgctgtctatttttaaagtgaggggggaaatacacaagttgagaaacctgttcgatgttggacaccgacatcgaaaggaaaaagcactttttctgtagtatacaaagggacagatggatgaaggaactagattgaaggaatgtgaaccataaacgttccacgcgcctgagactcctcaaatcgctcgccaggggtcgctgctctcccatgtctcgatgccagtccctttctggcgcgcactccttttgcgtctcgggctcgcgcgcgctgccgcggcaccggaagtggctgcgcttgcaagttcccccggtctcttcaggggaaactgaggccggcttctccgggagattcagcacgagcagtcagccaggtaggcaggcttaagtccgcggcatacttcccagccgcaaaacgccctagtgtctggaagccactgggcctatgaaggggggatgtggccccccacggctctctggggctcgcaggtgagagcgccgcctcccctgtgcctgacaggcgctgggcccaatgggagcctttgccgtcccgcttccgtgccgactcgacccgcggattggctaagctggggcgggccgcgggggcgagacccctccttccagagaggtctagggggcgcccctgagggagggcggttgcctagcaacggggcggtggctcggcgggtacccggcctaggggagcgcgagcagtaagcgaggcctcagcccacccacccggggctccggcgcggagcggcctccggccctcgagccctgcagggggctccagaaggccgccttgggctcggcctcaggaaaaacgaggtctccactgtgggagccccgacccttcttcctggccggtggcggggctcagtgcctctctctcaccccgtctttgtgcgtggggtgccggcggccattgtgtccgggcgcggaatggaggacctggccgtcccccagtgctgtgtccagggcctttggggaattcaaagacaactagcggtgtttgtggggggtctccagcatacgcctctcggaaaaacccgggagtggtctttccgaaatcagatcacagatccgaggctgtcttccccctgtccgcgtccctgcgcgaaaccttgagattcacttggaagtccctttagggtttcggaagcctcatctagggctggtacttaaatagaaagaaagaaaggaggggtggggggaaattacactaaacccatacctccgggagagttctcctgactcccagtaggaggcggagagccaaggggcgtgctagagcgagggggttgggctcccgggtggctggagcctgcggagcagagagaggccgccctcgatctggtcgatggaggaaccaggttgtgagggggcaggttcctaagcttcgcaattcctctgtcgccttctgagctgcctaccaggtcgcatgatccctccggccggggctggttttttttttttttttttttttttgctgagttaccggcgacccagccaccacctcctccccgacctatgatacaaaagaccttccgggggttgtacctgcttgctgtcgccggagatagatttgaatgtaggtggtggtggtggggatatgccaatgggggtgacttttggagaaaggcatttcggagaaaagggggtgggtggttgtagtaaaaagaggcggatgaaacaattcaaagctggctggtcctttcaatttgacttcattgaagtcccttagaacccggactcagaccttcataagagccacaaagaaagcaattctggtacctggaggaggaatgggaatattgtaaggtaaatgacatgcatattaaatttttctcctgaagctctctctctctcttcagaaccttatcttggctttggatcctggaagagaatcgctaaacacagagcagacccagtaagtgagcaggtgttttggacaatggactggttgagcccatctctattataaaaatgtctcagagcaaccgggagctggtggtcgactttctctcctacaagctttcccagaaaggatacagctggagtcagtttagtgatgtcgaagagaataggactgaggccccagaagaaactgaagcagagagggagacccccagtgccatcaatggcaacccatcctggcacctggcggatagcccggccgtgaatggagccactggccacagcagcagtttggatgcgcgggaggtgattcccatggcagcagtgaagcaagcgctgagagaggcaggcgatgagtttgaactgcggtaccggagagcgttcagtgatctaacatcccagcttcacataaccccagggaccgcgtatcagagctttgagcaggtagtgaatgaactctttcgggatggagtaaactggggtcgcatcgtggcctttttctcctttggcggggcactgtgcgtggaaagcgtagacaaggagatgcaggtattggtgagtcggattgcaagttggatggccacctatctgaatgaccacctagagccttggatccaggagaacggcggctgggtaagaaccacgccccttgtgtgtccgccccttgcttgtgtctctcttctctgtgaacatccctaaaactgccctttttggtctctttctgttatatggcatggttgttaaagataccgattgttcaggagaccttcctggcttcattttaatacaagaggttaactttggaaatatagatgacccaatttttaagggacctgtatctttcatcctggctacccttgtggccccacagtttcatagttttgttccaatttctcagcaaagaaaaacagcctatgtgtttacttggcttaaaacctatgagagcagcaagttctccccgcgttctgctcactctcatgaaatgggtcaccttggctggggtgatgaacataatacccaggaaactgcagaactggaacctcaggctgctgtgtacttgcatgcatggtactcagaccatttggccagtcaggagcccccactggctagagtggctgagtattgtctgattttagaggagggtggtctgggccaatggtgtttgtgctgtgctcctaagttctttttccccaaagtgtgcaactttctgcatggttggcttgtttgtagagcccttcctgtgccatatcaagccccaggactttgcacctcgctgccctggattggttggggatctccagctgctctgcccagtgtttttctggtcagggccctggggcctctttactgaagcactgtttgctggcagagcaagaacctggtttgtgaggctccataggaaattaagatttggtgacagactgtatgtgggtgtgagtcctggccctgtcacttaactggccatgtgaccttggacaggctggtttaccttctagagccttagtttctaacagactattgtgacccaaagataaagagagcagaggctgacacaatgagtgctttttcttcagaatcctgctcgccacctcatcagtcagggtgagatagaggtgagagttccattactagtagctgtcgtggtaggcgtttgttacccttcagagtgaactgcattctggaataggggatattgcggcttctgagacgtattctgtctccttagaatatgtagaaaatggacagactggaaaataagtcatccattgaaggaagtgaggtggaaggggccatgcaccatggactccggaatgtcaagaatttagttgtccataggctgggcctagggcggggcaagcactttgctttactacagggtaagagacctccaggttttccctgggaccccatcctgcctctagtttcccatttctttgaaacttcacctttcttccctccagtagctcttgtaaaggcaaggaggtcacttgtcagtagaggccagatgaccagagtagagttgactgaggtaaaggtgggttcccttgagctaagggttgccagacttgaaagctaatctgtaaatgaactccctggggagataaatgattaaatagttcctgttggtttgtgctgtgacctcttctattcattctcttgctttgattctcttttggggcaaatatttgttcagctgattacaggagggacaggattccatcgcttcagacacaccctctgaagcatctccaagtagatgtgcgccctttccctccatcgcctactgactgtctttagttgactgagtggtcctaataacaggtagggtcttgccagctacaaacagtaggtgattgacgaggtacctgctgggccagccaccctcttgtctgcagacctaagaattgccagctgccccatactataagtcttcttatagtatcacctggaaaaatgctaaactgacctaaggcagcagcttgggggacagattcattagatcttcactgactaaaatcccactttccagtgtctcttcactcaagaatctccagcctgttgggcaacatacctggtaacttgccacttctgtgtggtaaacagagagggaatgtgtgcagaagagccggttagggcaggaccatttctggatatgcattctttccgggaccagcgggcaagaaacattcccctccgtgttatttgagccttggtggaagatacctacccatgtccttttaggtacagtctcctgagctgtacagatgctgctgcagtggcatcccctaacgtccctggaggctgcagctatgagttcagatagtcacttagggtatgctccaaattagcatcctttaggaaaggggacagaactttgcctttcttgtacctgagtacctcaggtgttttatcctttacttaatggggcaaatttactgaacagctactataaggcaagcagagtgctaggtgctagcttaagctagacattatctctctatcatggaaatatgtggccattcacatgttccatacagtaactttccaaggtacgtgaatttattcccagtttgtacacaaagctcccagtggctaaataaccgagcttaaatgtttctcagccaacttagtgtcctaaattgatattggcctaattttagagtccagactctttccatccatgccttaatcaggaagtaataatccagacagagtagcatagaaactcatggctactgttgggctgagaacagcatgcctatagaaagtactcattccatgttgcaatcgtagcagtgttctggtatctgagaacagtgcctttatcatcagtagcaggttcccaaatgtgtggaaacctccgattggggtactaagaaaactcaggcatagcaagtgttgcgtggcatcaggagtttgcccagtcatgatggcttcttgttagtgttttccctgttaaaatctcagtcttgtcaatcattgagagtggcatgtgtgcaaggagacagatggcctgccccagaatctctgttaattgtagggtgatgctgtaaggattggaactccagcctctggccatactactgcccgcctgcctgagtcacctggaaaaatgttgtacctgtttgtgtctcttgtcttttgtctctcctacctgtaaaatctaataatgatacccaactgccagaataaaagcccttcgctgaccttaattgtagggtggatgcccatcttctccaaaatgagcttcctctctctaaggctctgaactttaccccctggagttactacttaagaaactaagcctgttcactgagacctagcccccattagatgaaacccttttgggtttttttgtttttttgtttttttttttttactttgaatgtgggtgagactccaagtgggccagtcactttggtattaccagccctggagataccctttgcccagtggaaacaccattgttaggagcagagaacgagtgatactggggagagcacctagcttggccttccccaagctgcagctctactcttacctgttgtggcttcttcagtgcaacagagagatggacatgtgcttagttgaagcacctcagctccatttgcaaattcggcagttctgtggttttcttggggaagccccatcagaaaccccaacacagaaattcttagtaatctcattcaggtctccaaatgaagtaaagtgtctcaggggctcccccttggaacacctacttcttttcagtgtctttttttaggtggctcttaaaactcctttgccatcatagggttttccagactcctgaagcagcatccccagcaaccacatggaactcttcatcttctgcttaaaaattacctaggtaatttttagggggccccagtggaacctggagagtttcttgactttgtgtgggcaaccaccaattttgtttgggctgtgtgaagctgaacccctctcccagcagactcctgtcctaaggccagtggtcttgggcatccttctctcatgcctcgcctcctggtttttccccagcctcccaccacaggacttgctttttgcaattgctgccttgtctgggttagtgtgctttgctttaaaggtagtccccagtgagctgccttccaacagaaacagcctcaacaacctaagcctatcaggatttctgcccccatccctgccctccaaccagagtctgcaggatcttcccttgaaggattcactccgaatcctgttgtccctgcagctcagtctgtcttccccacccccactgggcatctagtgataaaaagagtcccacgggatctttgtttcacctagtgagacaaattgccaccagcttgatactcacctttttttacatatgatccctcgcactttgtataaagaaagaagctgttagtgtcaagttggtgcccagaggcatttccaaggctgtactctgtcaggagttgaggcagagtccacatcttgctcactggttatcttagcccagtgcacaggtcttgggcgtagtagtcactgatgaaaagatactaagtttctgaaggaaggaccttatcaaacaagaataataatggtgggcgcctcctttgacccagttattgagcctctactctgctaggctcaatactacacaaacaacaaatactaatactaaacaaaactaagtttttgcctcatgtagctcattctgatagaaagaaaaaaaatacataatagaggctgaggctcagtctgtaaaatgcttgctgtgctagcataagaatctgagtttgggcaagcccatggttttaatcccaacacttgagaagtagaggcaggctggtctacagagtgagctctaggaaagccaagactacacagaaaaaccgtctcaaccctctaatccccccaacccccacttccaaaaaaaaaaaaaagagaacctgagtttgatcactagaattcagaatctgtgtttaaaaaaaaaaatgccagacacagtgatgtacacttacaatcccaaagctggaaggcagagactagggctttctggggcttgctggccagccactctagactaatgtgtgagttctaggccagtgaagtagatagcttctgaagagcaatacctaggattgacctccagcctcagtgtgcatatgcatagaaatgcaagctaagccgagtgtgcatgcatgcacgcgtgtgcacacacacacactcacactctgtgtatacacagcagtccattgatgatacagcctgggagctagagagatggcttaatgtttaagagctcttgctactcttctagaggacccaagtttgtgtgtcccccccttctctgtgtgtgtggggggagagggagctttcagctgatactatgaactctgaaggaaataaggggggaaaagcagattggtttatagataatgcctagcacagcagggtaggacagcactttaataatggtgatcaaaggacctggcaggataattcagcttataaaggtataagctatcaagcctgatatcttgagttacatccctggtttccacttggtggaagggaagaactaattgcgagttgtcttctgacctccatatgtgcccatggcatggccatactcagtgagtagatagatgggtggatggatggatgaaatttaaggagtgatcaaaaaagtgaacaaccaagatacagggaaatgtaaaatagctcacctgtcacctgttgggtggctagaatatgaattaacttgacataagacaaattaacaaaaaccccaaacattttgataagtcatttgtgcacaagagccaaactcaaagaatggctaaattcatgattgaggctctgtagcatcctgaactacataaagaagtaggaggctgagtgtatggcacatgcctctaacccagcagacaggcagaccttggagtgagaggccagttctcaccaggtcttcatggtgagaccctgtctcaaaacaagaaataagtaaataaatagatggaaggaaggaatagggttttggaattcatacagtgacttcaagttacaggaagcttagctacaaattatagtgggtaaatattgtaaagtgtctcaggtaataaaagttgtagagcaaccagacacaactgacagaaataaatacttttgtgacagatgtttcttttatgaaaacagcttttctcagatcagctaaggctgcacagggaatgcctatcttgaaaaaccaaaaaccaaaagaaagaaagaaagaaagaaagaaagaaagaaagaaagaagggaaggggaggggaggggaggggagnnnnnnnnnnnnnnnnnnnnnnnnnnnnnnnnnnnnnnnnnnnnnnnnnnnnnnnnnnnnnnnnnnnnnnnnnnnnnnnnngggagggaaggggaagaaggggaaggggaagggaaagggaaggaaaagaaaagaaaagaaaagaaaagaaaagaaaagaaaagaaaagaaagccagcctgcctttcagggttactcctatgtgtctctgagtatatatttctcagaataaccagcttccagaatgccacatatcatattctggtcttccaagcctgttcttagaatattgtatccagaaccccagcaaacctgaaggtggtatttgagccaagaactgaaggaggtggttcactgtgtgggtccatatagagcttttcaagcagaggagtggactaaggagaaaagatactcggtttggcgttttcagggatggcaagaaatcagtttgcctaaagaagcagcaaggaacagagtggtaggagatgagggcacagaaagcttggggaaggatggagagaaggctggggacagagtgttgcaagacaggtttgaagcaggtaggtacgcttagaattctgtaaaggtggaagcaggtcctccccttttgaggaagctggtgcctggcagatgaaaaggcatcttggctgtaagtgggtatgcaggtagagagaggagaccaactttgcacatggtatattattgactgatctgtctcaccacattggaagccttttttttggtggggggagctgtttggagattctaggtggaatacggactgaataagctgttagctgggcgtggtggtgcatggctataatcctagcatttaggaggttgaggcagaaagattgctttgagtttgagggtagcccagactacattgtgaattcaaggccaacatgggctatacagtgagtccctatctcatgccaataaataacctaactctaattcttcttcagaaatatttctctccaaatatattttacagttgactctccttcattcttctgtttctgcctgaaaaactgcaccttgtctaagtaaaaatcctaccactcccacatccaaactcttgaccttcctgaatcttgggcacaatgataaaacactaaagtatgctgggatctggagagccagacagcatgttgctgtcatactttttattacctgtcccatggaactcttggctcattcacaaagcatccattcgccttttgtttatagtcacccactagcacgttctcatggcagccttctgtcacggtatgaattatagtgtatacctgccttggtggaccaagctctcccttgtcttagggtaaatatccaaaaatctactcccttagttagctctctatattcagtctgtctgcagatcagttcagccccagacctcagcttcttcctcatgatgagatcttggaattgacatcctaggagtcctggttctcacaggcctcagtccttggcagatttcaccaaggaggctagtccacagcagtttttagagtagctttctactttccaagacacagtgtcatcacagggtcatttgtcactggctacacaagagtaagtctccatgcacagtgaccagcacattccaggttacaaagcacttgcacatctatcttgtcttagtgctacctttagccatgcagattggtgatcaggacagtgccatctccctgtcacaggagcaggcaagctcagagattagtgagttcactggtcacctagtgtgtgacctcgccatgttgggaaggctcagaaagtcagttcttggtctgcagtgttgagaaccatgaccatcatccaggcagtcctgtcctgctccatgggcccctccatcactgttttgtagagagaaaccacctttgggtccttgtgctgctgcttggtttcatccccagtgagtcttaggccaggcctgcattggctccaagctatggagttctctgggtagagagcagagctcccctcggaactagagctttttctcgtgctcttcaggaaatgccattgcaatgacttccatagactgtttcctgtcccggcccagcagccggattcctgctgcagagtgtggaaactggaaagtagtgtccacatgccccctacttttttttttatgcccttccctttcctctttcagtcactttctctgctctcattcccttccccttcacctagtctctccctccagtcctagtcttccctttagaactgggaatgcctttctagtaggtctgcctctgatgctagactgtgtggtcagttggaaaaaactcccggccattgtccctggctccatcagttataaactctcccctagaggggcattagacctgtcacttgggagtgccctgtgtcatccatgaactgatttctcccttgggttccgacccatccattcgggcataggacagaggatcctaagggaagtatccaaggttctgcacttaaaaccctgcttcttggagattgatgactggttggagtgacagagctggccatcccttccctagtcacctttcaggaggaagctggaaggttgcgaaccttgttggacagtcatctgaagaatgggagctggcctgggaggagattggaatgcactcaactatgcttcagatcctttgttccaactcttgaaagggaaacattcccctccctccaccctggccacacacatgtgcctttgttccccaagtcagagtcaggcagcgcctggaacacaaccactgggaacacagtgtcccttcagaggaacctgactcccctccccagagggtcagtgggactgggacttaggagcccagcctcatgccctttttacaggctgaaggcttgcttccagacacatgtccaggcacttctttggaattattccatgggatgcccatgtcccaggactaagcaacccctcctcttaattccgcctggtgattaatattattgttaacattgctattaatagcacctaacatttattgaatgcttactctgtgccaggcattgttcagtatgcactacaagtactaattgattccattctcacagccgcgctcgctcaatgcagtaggtactattattagcccttttcacaactgaggcacaggaggaaggcagcagcctgagtagcacagttagtaccaggccaagctagggagggaggctgctagctgagccttgaaaggctgtaacaggaggcagagccagaacctgacttcaggcctgccttacactagagcttaggcagttgatttcttgaacttgaaacagcctataaaataggtagcatcttcattttatggtcaagaaaaccaaggctgagagaaaagaatgctgctgaggcctcccagccagtacctggaggggccagtgttccagtccagagcgcttagcttccagaactgcaccaccatagcagcctgcagatagtgacagttcctttcctgtacatgacagtgttttctaatggaccaaaccttttgttcacatctccagggaagatgggttactttcagcctcatttccagggaggaaattaaaacaaagagtgaagtgactgtcagacttcaagtctgtttgcctggagtttattttgttttgctttgtttgggggcaggtagcttttgagagagtctcctgtatcccaggctgctgccctcagtttcattatgttgctgaggatctccttgtactccggatcctccttcctatacttcctaccccaacatgccctgctcctgtgtctggctagttacccctaacttacttgtgctgctgcctgcctctcctcaagatggattcatttagtttaaataagtaaatgctaatgaatgccttggatggggacaccaagtggtgagtgagactacaggctttctgttggcagtctgtctcaatgcttcacaccatggaactggctagttgccttgcgctttgaatcagtctatgtgatcatctatctgtctgtccactcagctcccagacattttagctcactgtttcgaagctttcaattcattgcccttggctccattgtcctgacttatgagtggtgaggcagaactttatggcccataaatggtgaagcagagttgcttatcttatggcatcaaggaagccagtgacaagagagggaactaggaaaagaatgtgcccaccactgtgtgcccctagtgatttgcttcctattgcccaaagcccattaagttacgaatttgctctttaatgatgagaagaggtctggaatatttgccatgccggggctagcaggttgagcagacctttcaagcctctgaataaaatggtttgagcccagtcagtcagtaaacgcttgactgccctgcactcggagtgcatccaattaccttcctgaagatcctgcgtcagaacactgttgcattagggaccatgtcttcaacacaaaaggtctgggggttttggttttgttttgagacagtctcactctgtagtccaaactaacttgaaacttactgcaatcctcctgcctggaaagtcctgggatcacaaaatgtgcctggctaacacatacgtttttgaggtatatttcagagccagaccaaaacagtatttattaatcacttttaacaaactcgtggacaactcatatgtgaagcaacttccaattttcaaatccataaacctgagagaataatgctaaccttactggagtaagcaaggcataagttagagaaagcctgagtgttgttagaataatagcaggtgttgtgtgtggagtgcttgcttgctctgtgccaggtgctatgtttatgcccttgacataattatcttatttggtctccacaactgctctagtgtgaagagggcacatccaggactcagagacctccgtagtaatacatcttctaagaggcagagcacagtctgacgatatgccatgtgccaaaatctatccttatgccactatgttgtcgcttttcctgcagacctggactggcttattttatcccaaggcctggcacagagcccaggcttcagcaggggattggctagggtctgtacagtgaacaggagggttgttactactagctgtagtagtgcactgtcagtccctgaggaagcaaacacttctgaatcaggagtaagccccaaacacttggtgaatggcttgtgccaaatctgtggtgtagactcaaaacgtggaggaggccagaccactgattacatcctacaggtggcctggacctctgccagatggtcccgcttctaccaccaccacccattagattacccatgagagacctccaccctcggtctgcatcgtcaccttccacctggcccctggccagctagattgccagtctggactcttctgcactccagtggaaagggtcagagtggaaatgtcactgggggcttaagtacccatagctctttcagcaatgtggctttgtgtgctgaggtctcccatttcctcatctgtaaagtgaagataatggtaatgggtctcttccttagaggctccgtgttttttcctctgctgagagtcactctgcctgcctcatgtctgattaggactctctttatcattcaggtctcacttccccagaggctacccatgtttacatgtttactgtctaattcagggaaacttaagctcacagagtatttgcttttgtcttgaaagttttcctttattatcagcatctagcagaatgtttggaatttggtaacatttggccactattttttgagagaatgactgtgtcgagtgtagaccattcagctttctgcctgacctatagtagacagttttcagtgctattacctgttcggaagatatggaacatgaaggcgtctttgttcttttcctaccctgtatgctggaggttgaacccagggcattaagcctgctgtgcaagtcttcttcctcagtctgtagtctcagccatttcaccttgttttgaaacagggtctctgtagagcccatctgatcctgacctcagtcctcctgtgacacttttctggggttatgggcttgcaccaccacacccaactcagtgaaagattaaataggtgaaaggaatgtggctgggacaggctagatgggtaagaaccagccagccagatctgaagggtgcatgtgaaacactgagagatggtgagctatcatggcttttactgtgctgggtaaaactggtcaggcagaaggaagcagagactgatagaggcctgggggaacagggatgggagtaatgttggattcggaggggagagacccaaagtacccatgggatgcagtcatgtctccagtatcccttgggagaaaggaatccttgccaggtgggactcagcaggcagagctgcagggggagagaggcacctgggacctgcagaccaggtaggccgccctggttgttagttggggcgcatagccaggtgcagattcaaaagactgattgaagccttttggcaactctagcctttgtagggtaaacatcacctgtctcctgccacctgctatgactgtgccagcaaggtaccctggcagtcccaaagaggcctagctttcttgctgccctggtagagcaaaactactctccagagaggcggggagcttcgaaagtctcagatgacaataaggtgtctcctactaaagggccttcccactgaggaaggcagagaggggccctgggagcccagacagctgagccaactagggggagggctcagagcaaaagcaagagcaggtgcagatttcgaggagggtgtggcctgaggggaagtagggatcttggtaggctacaaaacgtccctcctcctcccccaggcacagctggcttctccaggaacctgatgacctagttaccatgcttagaaatagttagcttagcttatagttcaggactgtgccagtctatcatccttgagacttcttgggtccaaaaggtaccctggaatttccccagagtagttccatgtgaagaacatgcaccttgtcacgtgcatggggttgttgcccaaggatggacacagttaataaggtttcttctttgctgtgcctcctgccaagcccaaggagaagtccaccccgtccacttctctccagggggtggtggatggccagaagaagccacaaactccctgaggtacatagggcgaggaactcctgttgccatgaacacaagtcctctctacttttctcctctcagtagggtggtaaaagcaactacctgggaggatgtggcaagactgaggtcaggaccagctggactccagagaccatgtagaaaatggttgagactacagctggatgagtgagaaaggttctggggtctctggaggcctccaccctcttagtagcagctgctcctggtgtttgtggtacttgccttgccagtgcctcctagggagaaaattggtgatcaccgttgaagtgttaggtacagtagggttagaagtgcaactcatttggtagagtgtttgcctagggagaaagcctagggatcgagtccagcactgcacttatcctggctttgtgtaacccaggcctaaaactcagttttcaggaggatcagaagttcaaggttgtctttgactatataaggagttataaactagcctagccctacctcagactaacaaaaagtaagtaataatgagttggatatagtagctgggcacagtaactcctgcctgaagtcccagtacttgggaggctaaggcaagaagaatgccatcaaggctagcctgtactaaagagtaaaacctgtttgatgggagtggggaggaggggcaagggtgggtgagatggctcagtggatagaggcatttgttatacatcctaatgacatgagttcagaccccagaactcacatgtagagagaaagacgctacttcacctgacttccataggcaagcctcccccatttcactgcacataaagaaaggaacaaataaataaatggttaaaaaaaacagcaaggagataataacttacagtgcttttctggaaacactctgctgagcttaaaaacaactattaagatgcctggagcctggcatacagtaacttaactactcagtgtgacagctactgctattgctgttatcccattgctgtcacaggtggtcaagttgctttaattattgttggaattttctttccttctttcttccttccttccttcctttctttctttcttttcttatcttttcttttttctttctttttctttttctttcttttttttttttttttttagacaaagttgccctaggtagccatggctgtcctggaacttgttatatagaccaggcgggccttgaactcagaaacctgcctgcctctacctccagagtgctgggattaaaggagctactttctgaaagcaaatgtttgggctacagaagatgtgactatcctttggcccaagagttaggaaaacagagacctttggctcacagccttgtgcctgcctccctcaccagggagggcctccggtcagaactggtacacagctggacccatgttgttgactcagtatttggcaacagggtggattttctctaatctttgccactctaaaatggcaggtgccttcatatttgatgactggaagatttatgagttgaacatttaaagtgtacgggagcacacaagcctagcacacagtgagtgcctccatatcttacatgtaaactgtgtgggctctgtggagtttctctgggatgccctcatttcttgtttgttcaatggtcgtaagcctcttgcctaagctctgcctgttgcccgcctcatatgctgaagaaagataacacccgttttgcctccctcctgaactagcagagaggcacaaggaggagataagtgaaaaagcactttgaaaactataaatgtttggtcttgctgctcctccttgactaaggccacagccatagatatctgtatcattcattcattcattcattcaccgagacagcaaccaggaaaaagaaaaaaacaaaccttgacttaacattttcccatttccatgagttaggacaagcttatttctccaaacctagacatcattaagcggaaattgttctttctagacaggttgtttcacaggggagttatttggtgggggctaggggggagctaaggtggaagtgctgtgtttactgagcacaggatcatcttattcactcttaacagctaccactggtccatcctaccacttagtggctaagtatctagcagctggttagcaagcattcttaatcatggctggtgtatgtagagtgccccatatactgccttgtgcagaataagctcaccaaattctaggtcttttcagttcattctctgtgtggcttggttactcactgatttggctattggttgccctctgccataaaattactaggcaagctcagactgttgaatgtgattcaaatggatattggctaccccattatgtccttgcctgcccagctatggtactagtgggagcttggaccctgcccagagcaatatcattcacatataaaatccagggcacagacctcctcaccccacactcacctctggttcagaacaagaatagccatcccttgttctacccatgctccatctgccttcctttctcatagcactcacatgcagatggaaccatgagggaaccatgctagagaaatctttagggagtcactcagaaatgacccttggaggcaaggctcagagaggaagcccaggtctagtgttctaggtctcctgggactgggtcaagcagcaggtgcagctataagatgccagggtagtggctgagtggtgaaactgaaaggtgtataggcccagacaaaagtccatccgtcttgcctgcctgtctatgcaggtggtctgcacctgcagccctttcttggtctgatctggttataggagaatagaggtcaatattggtacccaaaacttcaataagagaagtatgtggaagtttggagcaaagcctgcagttgacatctaaccctttgggcccttttcagagcccttcagggtaaaaaagagttctctctcctttgggcttctcagtacctaccttggaagggtcagggataatgacctggtgaccaccagatcttcctttgcagggtctctgtttgtggcactgtgctaggtcttttcattttctttctgttttacttcattgttatgattatgagtatcatcatcattattgtgtgccataatagcaagtgtgtggagggcagaagacacttttatggaatcagttcattcctatctttttttttttttctaagatagggtttttctatgcaacagccctggttgtcctggaacttgctgtatagactaggctggtcttaaactcagagatccgcctgcctctgcctcttgagtgatgggactaaaggcatatgctactatgcctggctgttctcatctatctttttgtgtgtttggaggatcgaacacaggtctgatgagatttgattgacaagcactttttggttttggacacagggtctcacaatatctctggctggcctagaacttgcttttagaccatgttgacctcaaactcacagagatccactagcttctgcctcttgagtgctgggattaaaggcttgtggcaagcaattttacctgagaagccatctctctgatcccttgtgtctgagctttaagaggaggttatgtagttgggagcctggactgtagaattgtagttatgggtttgagtctgggcatcatcacatactgctgttgggcagtagccacgtttctttttttcccctctgtgtatgttgtatctgtatgtgttgtataggtgtgtatgtgtatacttgtctgtgtgtgttgaggaagccagagattggtttcaactatcctcctctgtcattctcctttattttgaaacatggtctcttgctgctccgtctaaacagctggcccagggaccagcctgtctccatcgctcaagtaatattgttacaggtgcatacaccacacctggcttttcacgtgaatgttaggaatcaaactcaggtcttgagacactatctcaaaaaacacaaacaaatcaaaagacaaactcaaaccaggaagaattactcttttaatttcattgtggaggagaatgaagggacagagaagaaaacatcacagaaatgtagctagtacgtggtggtaaagtagtgctttgaacccaagcagtctgcctcagaagccctttgtcccatttgggggtgggggtggggcactagaaatgttgctgctgtagctgttgtatccagcactataggtctttgattttgttctctctgctgattctaaactgggagggggggggggacgacaccaaaactagaaacccactctagtcacttcagatccccagagaccaacatagtactcacagtactcattaatatttgcttaatggcagagaatactccctttcttcattaatcaatcagaggctctttatcgaccatttcctgtaggctagctctgaacacatcctgggaggactgcaaagtacagctatgcttctgtgagagaaagtaatgtgtgtgtgtgtgtgtgtgtgtgtgtgtgtgtgtgtgtgtgtgtgtgtgtccatgtattgaggggggttacattccagagctttgtgtcattggcagaaattaccacatgggaggcaaaaatagtacaggtggccaggtggcttagggatgtttttcaagcctggattctcacccctccctgagtgggccactccctctttctacagagcagagcaccacagattgccttccctttgaccagggcagaaatcacccctatctcctcagggcttctggaggttttcttatctttcctgaccagtttatgagcatctagaaggagaggctaaaaggcaggagaacaagactgtagaaaaattacacctgcctcaacactgcagccaggtcagctttttagaacctaagttaaagtggggtacagaggacacgtagctcagtgtctggaaagaggagttcagcagcctcctcagctacacagagagtcgaaagccaacctggaaaaaccctgtctgtctcaaaacaactaaactgcatctactaagaacactgttaatagcgttctttcgacctacctttgtttatctggtttggttggtttggttttggttttttacagagtttttctgtgtagacctgggtgtcctggaactttctgtgtacaccttttgagtgatcactaagtaccaagtgctgtactcagtaatttatatgcattctttttgccaggtatctctaaatagtttcttaatgtgtgtgtacatttttgtgtgtattcacttggatgcctatgaagggcaaaagacaaaaacctcaggggtcatcctcaggatgttatttccctcctttggagacgggttttgtcatttgcctgcagctctccccatctcgggcgtggctggctggccagcaagctccaagtaagcatccacttgcctctgcttccctggcactgtgtctgaagcatagacttgagtagtaagtggccctaccttctttacaggaaatagagacccagagagatgcttaaggtcctcagcttgtataagataaaacctagatttgaacctagagaggtctgctccaaagcccggttctctctgttgctcttcccagtgtatttgagaatgtgcagaaggagggttggggaagcatcttggaatctgagggatacccactgacctgccagctgagaaagtttgtctgcaaggggatgctccagggcttagggttattgtaggatttgccacaggcatgtttgaacttagccattcagcatcctctaatttcctgcttttaccctctcagctgctagtcaggaggtttgtgaaggtgacatcatccagctgaatcagctgttgctgtagacttacgggaactgaaaatcattgccccttcctgctttgcaagtctctccagaatgaagttagagcatgggagtcttccacctgtctacagggtcatggctaaaactcacaatgttcactgttttaagagctaaaaaggtagaccaggtgcactcacctatatctcaatgcatgacacgcagaggtaggtagatctccctgagttccaggccagccttgactacataacaagtttcaaaacagccagagtggcatagtgaagccgtgcatacttattttattttatgtatttttcagacagggttctatatattaccctggttgtcctagaactctctatgtatatgtagaccaggctggcctcaaactcacagagatccacttgtctctgctttccaagtgcctggtgagaccctgtttataaaatcaaatagagcagaaagccaaaggatgcacttcttcctccctcctcccgttctccacagtctcattctgtagccctgggtgggtcaaactcatagccttcttggcgggattctaggtctgtgccaccatgtgaggcttaaaaggttaatttggggttgttttgttttgtttttgagggactggcatctcaagaacgttttcttttctgccttcatttaaccctgtaactcttgatccttttgtgtctttttgcctaagttctaagctaaggccagcactgtagatgggccaacaaaatgtatttgtggattttgattttaaatttaagcctcttagagtctgattaggagaattcaaacaaacaaacttgtatacttcagagtagagcagtgccacaatgtaatctggtggagctctgcctatgaccagaaaaaaaaaaaagttatgtatattttttcaaaaggaaagaagtgggaagctagagagatgcttcagaagttgaagagtgcttcttgttcttgcagaggaccccagttcactccccagcacctcctgtaactccagttccagaaggttctacaccctcttctgaccaccacagacacatacatataacttaaagttttaaaaattattgttgttattattattactactatcaccatcatgattattttggtggctcctacctgtaatttcagcacctagaagtctggggaaggaagattgttgtagagagaatctattgggaactgtatggaagcattacctgtcagtaaaaaatcgcctgtgaccaatgagctgaggcaggaaataggaggtgggagtaccagcagagagaaagaagaattctgggaaagagtcagggatgagtaaactgagaagaaggtaaccagtcatttggccctcagaatagaataagtggggagattctccccaaatactgatggagatagacggtcatatgaagctgaggagaggtaaccagccacatggtgggacgtagattagaatgaatggataagtaagttacaactcagccagggaacaagcctaagctattggcctaagcgtttcttcatgaaatagcaagtctcagaatcattattttgaggaacttgtacacagtggaaaagccctccattacagattgccacaagtttgagattaggctgggctacctggtgaattgaattccagggtagccttagctgcatattaagactatcaaaagcaaaacaagtgaggaacgagttagttgtgacagtaagacatcatacaaacttgcctgtgactttgcctctctcagtcagtggcatatcacatgagctatcacatttagaggtaggctcagtaaacagacagatagtcctggcactagagaggcccaggcaggaagattacatgacccatgagtttggagtaatgcacccagcacctacggagcactcagtgggtggtagcccctttgatactttcttgacagggaacaggccattggataagcctgggtgaggcttttagggataggttggcttggaactggactttgaagcccggttaggatgttgataggtgtagcctgtcagatagatatagagcaccgctggaggctggctatttgctgtataactttttttttttttttaagatttatttatttttattatatgtaattacactgtagctgtcttcagacactccagaagagggagtcagatctcattacggatggttgtgagccaccatgtggttgctgggatttgaacttcggaccttcggaagagcagtcgggtgctcttacccactgagccatctcaccagccccaactttttttttttagttagcacacaacactaggtatcgttacggcatctcaaacaatgggttatagtagattctccttcccttgtctaaccttcctccccagttgcttcttttttcacgtctcatgtgttcttttgcccaccactgttcttccttaccacctatattatctccgcttgatctccatcctagttattttggctttacccacatttacactcacttacacacacatacacacttgcacattacagcctaggatccatttatcagagtgtaattcttttatcttcctgagattgtgtcatattttgtttttattcatattttcaatattttatttaacataatttctagattcatccattttttgcaaagctcataatttcagttttttttatgactgaataaaattccattctgcacacacatacatacagatgtatgagggggagtatggcatctggaagatttcagactaaactggacaatgagaggggcatggaagcaagaagaagaaaaaagaagggaaaaagagccaaaagccaaagatcaatagagcacatggccaaaatggcatggttataaatggaatgagaagctaggggaagagatgtgaagagaaggctggagaggtttagggtgggggacagggtaagaagtgctggaaggagcctcagggcctaagtgagccttgtcctgggtttctttaggacctgatttgtgtgtgtgtgcgcgcacgcttgcacacatacacacacataatgtatttgtgtgtacacatatacacaccacacttccattatccattctttagttgatggacatataggctagccccatttccttgttagtagagcagtagtgactgtggatatacaaggacttcagtggtaggatatgaagttctttgggcagatgcctagcagtactatagctgggtcatactgtacctctattttaaagttgttgagaaccctcctatgatttccataatggctgtattagcatgcatccttagcaacagtcagtaagggctcctttctcaccacacccttgccagcatttgttgtcagatttcttgatgattttctgtataacctttaataggtgactttgtgtctcagagcctcaggtttcttctctgtaaagtgtggattctgctgacctcacctcaccaggtgctggtagaatagacacgtgaggacagatgaatagaagcccaggatgcattttctgcaatggaaatagccaggcccaggctaggaattaaacagctattgctcattctctctttcaccaagtcaagggaacttcctccatggtctccctgctttgccctggctcccttcacacagcagacatgagccttttaaaattacaggtcaaaaactgtgattccttgactcaaaatcttccactaactttctctctacacctcccccacacacacccttgatatacaccccaggctggccttgaactcagtcatcctgcctcagcctcctgaatgctgtgattacaagtgtgtatcagccccctcaactatccagtgatttttttttttttattcatgaagatgaaagctggagtgtatggggtataggggccttggcagggcagctaacaagataagtgccctagagttcactgtccctgatctctcagtgcccatgctcactccctctcctagaaccagtcttgtgttccagctctcatgtccatccccgtgtgtgtacacatgcccggaagcataagaggatgacatgtgctgatggtatgtacccaggacattttgtaacagggaaggacattgaccattgctctggggctaccaaaggtcacaagactaagaaaaagccaagggtatttgggcagccttcctctctaaagtgagtcatttcctgagggatgttggtcattcattcatttgttcattaacaaatacagagttcctgctgtatgtcaggcattgagctagagcttgagcaaacagtgtgagcactgtcttgtcattcagctgacattctagtaagagagagagaggctaagtacctaacatagcaggtagtatttaggaccacaggaaaaatacaagagaagaacactttctgttgctagctagactcgtcaggaaggcctttgataagggcttcctcgggcctgagtatagtagtgtgatccatgcaagtattaggggaaagaatattgaaatagagagaacagcaagtccaaaaaagacttcagacatgttcatatgagagaggcaaagagtgtgtagaaattgagcctgacgtaacctgaagccaggtcttcctgcaggccacatagaacactgtttttattctgacaggcatcgaggggttttgagccaaaagatgatcagatccaacttaagcttcaagagaagctctgctcactctggagcagggatctcagcctgtgagttgccacccctgtgggggtcgagcagccctctcacagtgtatgcatatcagatatttacactatggttcatggcaacaaaattacagttatgaagtagcaatgaaaataattttgtttggggctcaccacaccatgaggaactgcattaaagggtcgctcgttaggaagggtgagaaccactgctctggaggatgaagccctcaggcatgagcaggaacgagatggtgggagctgcttataccatgcagatttctggcagccgtggggagcagtggtcatagcttgatacactggttttgctgctgcttggtgggaggaaggaggagagagagggggtccggccatctggactgaacagtgaggaggtacttgctctcataaggagagtacactatagcaaataattgttttctgctggggctgtggccttttgtattcaagtgttagttacttgctctttgactctggacaagtgtttaactttaccaagcttcagtttcctcaattgtaagactcgtgtgtaagtgttaagcagttgggtgctgtaaaagctagatgggagtaacctgtatgacagactacaggccctgcctactctgaataagctctgactaagagtaacacaggctgcagttgttggaagggagggaatcccaaggctaagcaggcttctgaggagcagggagcaggctccactccatttccaccgttccctcaagaagcccaccctccaggagacagctcagacaccatctgtccagcagagaaaagccactgggagacagctttcaagggagcattagatagaagagcccttcccaagaaacctaatctcactctcagcaggtgataatcccagtagcctcccctggtatctgagcccagcccacccacttccttctcctcccccaccctgccacctagactctcttccccttctcaccatcttcaggctgccacccggaagacttagcagctggaagagctctaacaggaggcccacatctgattggatccagcctttcacatagatcaggtcaccagggactgtaggtaccacctgtccagacccctcccccaggtgcctgttcctgggcgtggagcttgatccctgccaagccagctggagccaggaactcccactgtggcccagctgccgccctcctgtccttttggcggagaaactagcttaacccttcaggtaccacacatgtagttgttcatggtctcagttcttccttgcagtgtttgctgtagtggccctgtacactctgaattgttttgtaaaattaatttattgcaaatacaacagagaattgcttggttttagtctttttagacagggtctcattggtagcctagtttggcatggaatttactatatggctcagactggccttgaactggagacagtcttcctgcttcaagcttccaagtgctgtatttgtatgatatgtgccacttgcctggtaacataaaataactaatgcatatgtatagtttcaagaatagaagataagagtaaacaaactctttacccagcttttaaaaatcagaatatggaccgttatacagtgagaccctctcggggaaaaaaaatttaaattaataaataaatgaaaattttaaaaaatcagaatatgggggagggggactggagagatggctcggtatttaagatcattgactgctcttccagaggtcctgagttcaattcccagcaaccacatggtggctcacaaccatctgtaatggggtctgatgctctcttctggtgtgtctgaagacagctacagtgtagtactagacataaaaattttaaaaaaattagaatatgggctggtgagacatctcagatggcacttaccaccaagcctgacaactggagttcccctctctggaaaccacatggtgggagaagagcactggctcctgaaattcaatgacctccgcaggggcgtgagctcctgcccttcttctctcgcccccttcacactaaataaatagaaataaaaagccaattctaccatcaggagtaccataaagtcctttgcactcttcccctgtcagtcacccactgctcacttgttctcctgaggtttattgggctttgttttgcatggatctatagagaacgaaaaaaacttcttcctttgtcctctgagggttctatacttgagtctgtgagatcagtcacagcggaagaacttaacaggtgaggtggcgtgtagcctttacaagttgattgcatgtacggggcacgcatggcatgaaagaaagctaacacccaacccatttcacaggaaaaaggtgtgtggtggaggccctgaggctcccttggcagaaaagggaggagcctgtgatagaaggtttctgggccatgttgtgacttcttagttcagtttctcctggttgtgagactgcagggagtaggttcatgacagttctttaacttttgcacaggtctgcctttaggttatgagggaaggtaaagagtccttccatgctgtgccccagcatgccctccctcagtgtgaggcaatcagcatttgccagcagccttggggatggaagtccctgaacttcagttcctatccccagacaatagactctcctcctccatgccttgaagctttaaacaaggctaaagatgtatgttcctatgtagtttgtttttttcattcagcattgagatccatctatgttacatgtatagttgtagtttatccattttttttctttagggaggttgttttatttgttttatttttagaacctttttttttttgaaagggtctataatttattactggacaaacatcctaatttaagacatgagcaagtctccaggtttaaaatgttgaaatccatctggtaggactgattgatgacaattcagtataaatcctcagtcttgccattgtgtgaatccttacagagccagcttcgttctcctccagtatcttctcttagagttgaacctgactttattaccagttttcatctggatccactgaggaatgggacgattttgcttttgtttcttggccagaaatctctggatttggaaagtcttgtgagaaaacatggcgagaagccgaatcaggcgtagcgcacacgatggcggagaaaaggagaagagaaagcaaagcttttttttttttttttttaaagattttcttacttatatatgtgaatacactgttgctctcttcagacacactaggagacgacatcagaccccattacagatggtcatgagccaccatgtggttcctggaagcgcagtcagtgttttttttttttttttttttttggttttttgagacagggtttctctgtgtagccctggctgacctggaacttactctgtagaccaggctggccttgaattcagaaatccgcctgcctctgcgtcctaagtgctgggagtaaaggcgtgcgccaccacgcccagctgcagtcagtgctttaaccactgagccacatttctagcttctttagaagaattttttaagggacaaggtcttactcttcagtccaggctcctagaacttattcttattctgtagtccatccagactggccccaaactcatagttgtccttcctcagcccctccgtgcaggaattgtacaggcatgagccactttcccagttcagcatcctcattttgcatgattaagtcttaaggtatcttcccagtgatctgtttagtggttgttcgggctattgggttccttgctgtcactgtttcaaacgtgtactgtgtgtgtcctgtacttatgtacatacaccttcaaaagcagccgttcccaaagtttagcccatcaggatcacctgtagggtttgcataagtcatagggtgctgggctcctgcctgtctgattggcaccctgagtagttgtcaggctctcagcagctgctgctgcaagtccttggacctcattttcaagatggttgtcattaagtgtattctcgggaatgctgtggaatcattgataggaaggtaattctggattgttgtcatgggttttttagagtttacactactgctagcatgtgtgtctttgctaatcttgatctggtcaggcttttaaatgtttatggatctgttgggtatgagatggtgtcctgtgttggttttggttttttttgttgttgttttgttttttggttattttcattttttagattgcaaatggggctaaaaggtttcttctgtgtgccagccatttatattttctcttaaaatacatgtgaagtccttatcccacttccactgagtcagcatcttcctaaggatttgtagggttctttgtattatcctgagtgtgaatattttgtctactcatgttataataacatctttcagtttctgatttcttttttctgtaaatgatttttttaaagatgtattttatgtatatgagtacactatcactgatttcagacacaccagaagagagcatcagatcctattacagatggttgtgagccaccatgtggttgctgggaattgaactcaggaccttaggaaaaacagtcagtgctcttaaccactgagccatctctccagccctctatatgataaatttttatgcctagagttttttttttagatttatttttagtaattatgtgtttatgtgtctgtgtgtgggtatctatatgtaagcactggtgcccccagaggccagaggtttcaggtctcttagagctggagttacagtagctctgagcaacctaatacaggggttggcaatttaggtcctctctgagagtagtaagtgttcctagccattcagtatttaatggagttgaattttttgtgatttataacatttatattttaatagactttccctttctttgcttttgatccctaaaaagacattgtcaatatattcttctaaaatatttcttagctttttaattaaattggtttgttttatggatgtgtctatgtgttgtgtgcacatgttcgggtcagaggacaaagttcagtaatctgttctttcttctcaccacctgggtcctcgtgaggtcatcaggcttggcctaaagtggcttcaccccacagcctcctcgatagctctctcctaaagtttcaaagctttgttctccacagttaagtccttaataaatctggaacattctgtctgtccgtccgactgtgttgcccctccccccatcactttagtgcttttttttttttaggtgggatacctttattctagtggcttttaactagctgcaaatctaaaccatttatggcttgagtcatgctagaccttagacatacactgcacccctcgtgctgagcaaagctctcctctctggggaagtttgaccacattgaaaacctttccaagattcaacttctaaacataacctttttcctgaatgtaccttgcttctcagaaacacatactgagtgcatctagaatttgcctcacaatatcacagggtagagaacggttgaggaacagatggcatcaggttggcactgaattaatatttgtggaacctcaatggtaggctcattttgtcactttgttttggttttgttacttagagaattcttttaatttctgtaaccaaatccctctagctaaggtcttatttaatactctgtttataccctgtataaatggaaagaatggttgacatttataggccactattgctattaatttctgtattgttttggttttggagatgggattcttgctgtattgtctaggctgaactcaaacttgaagctcccgtgatgcctctgtccccacttgctcagcattaggattaaaatgtatatagttcctgcttgacattccccatcaccctcagctattatgatacacagttaacaaccctatatgtttcttagaccatctgtgaatatagtacacatttgggagtaaatcaccacaagtagatttgttggcatatacctttaagtccagcacttgagaggcagagcaggcggacctctgcgtctacacagtgagttctgggacagccagatctaagatgattgtaagctactggatgcagctgctgggaacaaagctctggtcctcttgaggaacagcaagcatcttttcttctgcacacacatcctccttgggagattggtttggtactgtacatttatgacagggatacagaataacattttaacgtatcaagtgaaacttgctgcatgtccagcataatattttatgtgttggttctcaaccatccaacagaaaacttaaaggcagaagggttaaatatgtgtaccagggtctctggcccacctaggtaagtgatacagagccggcttaattctcatataatatccccactttttaaatttttttcttgtggggtgaagtgttgtttgacaaattttcactatgtaactttggctggcctggaatttactttgtagaccagggtggcttggactcaattgccatccttctgtctcggcttcctaaatgctgggattaaagacatatgccaccaggatagcacctacagtctttattattttttaaacttaattaattagttaatttgttcccttgtttatttgagatggtctcactataagccttgactaacctgtaactcactatgtagacaaggctagcttcaaactcacagagatatgtctgtctcagcctctgtctcttgagtgctgggattaaaagtgtgtgccactatgcctggccaatacccatagcactttttaaagtgtactttctatattatcaggaataataaaacgtggccatggagtctcatattgatgaagaatcaggctttgagaacacacatgagctcacagctaggatctatggagttcccaagagaaggccatctatgtcctctatggcctgcagtggtcatgctgagttgccagccttccccatggaaagtctccaaatctagttaggattctgtcagtttctacatccctaactttgttgctctggagagcttcaagtcatctcttggccatcagagggtctctaggaatgacatatctataattaatttaatataataaatactactgttaaattgagtccaacagtatgcaggatattgaaggtgcactgtcagtttatctccacaatagtccttcatgggaaatgtgaagttcttttgaggtatgtgttttgttgttttttgtgctgggagtggatccttgtccatggcaggtaagctgtctacactaaagttatattctttgttctctttgtctgtactagaacttggggagtgttccaagttaaataatagttacaaggtttaatactactaataaatgccaataaaactcaatccaaatccagtcttaatgttagactcaaaacaccccatcattcgctcttttttttaaattaaatttatttatttattttatgtgaatgagctttctgtctgcatatatgtctatgcaccatgtatgtctgatgtgcccagggaggccagaagagggtgtagacctcttagagctggacttacagatggttgtgagcctccacgtttaagcgctgggaattgaacctaggtcctctggaagaacaaaacccactgagcctctcttcatccactccttctccattactgtggttctgggcttccctcagctcacctcctaccccatgcacttgttattgtttgatgtcctttctggtatgggcatctggcttttgtctggctgccctgcctcatactgaacattttaaagaagacctatagcctctacctgctcttggccccagactgtagcccgagtgctttggacaggcagcaaaggattgggttgccaagtgatagctgtgactcatcagctatggatggtctgtgctgtaccaccatagcaaagacacatccctaggcctggctcttgacagactctacagtcaaacatatctgggtttcaacactacctcctcattttgtgtctgtagaatcctgaacaagtagattcaccttagtgacctctacttccttatctgtagatgttaattttaaaataagagctcagcacctgctgtaaatagtagccatcttcattggcatcagaaggaagttggtgaccagatgcagttccatccagttcctgtatcacagcctattctctaggttgagtgagctagtaggtagaggcggcacaggccaagaacactggggagccagtgatgtgctcatgggtgagcagtgtaaaacaggcaccagaggcttcttaaatggctttctcagtgttccttcatcactttggtttataaatgatgaaaatcagatggctgccatatctgcacaactttaaactagacccttactggggtaataaggaaatgagtaagagacagacagacattttaaaacaaaacaaaacagctgggatggggtgggccatgcactctaatggggctctgatagagctatactagcagcagcccagaaatccagtgttcgttttatccatcaggcatgggtttattgtatatagctggcggaagagtcaggtttagttaatcttagtaggagggctctactgtgtgctgtctcacactgaacatccaggagcacagagctatggacagtactttgtgcacatgaactaaaagaagaattgagatccttggtatggccatgctcagtggcagcagtacattccctaaggatgtcatccattcctcacagctgccaccagaggtgaagggacttcagggctcacaccttatataactaaataagtgccagttctgaggctgagatagagcgtagcactagagaacttacctaggccaagtgaggcctgccattccgtactcagcgccacaaaagagaagacactgccaatagtcaaacttactttctagtcatcaggatggctcatcaggtgcatgtacctgccatgcagatgtggcaatctgaggtccacccttggagcccacatcaaggtgaaggagaaaatcgactccacaagatagtactctgacacacacacatacaaaggaggagggtgattttttttcaatgttgaaaagtttttgcaattaaaaaaacttgttttatttatgtatgtgcactcgggtgtgtgtatgtgtaccatgtgcatagaggagcctgtggaggtcagaagaggcttgggttccctggagctggagttacaggccaccactcggatgctgggaaccacacccaggtcttccaagagagaagcaagtctttttaaccacagggccatctttccagccccaccaccaccccaaattttaaattaaaatacaattacatcatttctctcctttttcttccaacccctcctttgcaaattcatggcctctttttttttttaaattattgttatacatatatatgtaatgtatacataacaatatgatttcaaagctgaccatttaatactggataaccaagtaggagacacctccctggagaagaccagctctccttccctcaccggcggtttcccatgtccctttttctaggcttggatctctccctttcatgttaccatgcccattggtgttgatagtgttcagatcttaattaggcagccatactgttgaggtatcctgagtgtagcttccctgtcatttctaggagacacactttcaaggttgacttcttggtctactgcctcttaaagtctttctacatcctcttccacagtgtatcctaggtcttagatgtgtgtgtgtgtggggggggttgtttttcagatgtatctgttaaggctgtgtatcctagtggtcagttctccacattttcaccagctatggctttctgtaatggtttccatctgctgcaaagagaagtttctgtgatgaggggtgttatcctgtggtatgctggtgggtaaaggataactagagtgaagttagggactatactgatctagtaaagtggagacagtgggttcttctctaagattcatgagttcattggctccaggtagaatcttttcttctaacatgaaacctcagtctctttccttacatcccaccactcccttgagggaagcaaaattcccacagaagggtcctagggcttcagaacgagagtgagagctcttctgatgtaaggatgtaagtaaagccacctcaccgagatgatgatgctagaacacaggaaagccatgtctcctgaccaagaagtccttaacacaagccagagtactacccagccccggctggcctgagattggccttcagcttctggtcttctgtgattccaggtgctggggtcactcctggccagaacttttaaattgttggggtttgttcatttgtttctctgtgtgtggaggtgttgtttttgttgttgtgcccctcctccaaaaagactaaaagtcgcccttaagtgccagtggtttgttaaaaaaaaaaaaaaacaacaactgtcactgggcagtagtggcgcacacctttaatcccagcacttgggaggaagaggcagacggatttctgtgtttgaggacagccagggctatacagagaaaccctgtctcaaaaaaccaaaaaaagaaaaaaaagaaaagcagtttgggattttttttccccaaatgaatcactgagcaattgtgcatattctctctctcctctgtgtgtgttgttttcttaataaggataatatattagaaaaagaagaaagcttcagtggggaccttggtaaaaggaagattctaatctctgaaatctatagaggtccccaaagccagatcatacttgccctactcttgacaggccttcaaaaaactcgggcttccctgaaccagctgcatctagtgagcactaacggaaagcccttgtattttctttcatgcaaccaagcatggagatgtaggtcaggcactgctggcctggcagttacagcaattctggctttgccctgcacctgcagccatgttctcagagacccatcgggtagggaagggataggatcttcaagagcttgtgggtggagctggctggatcaagcagagggtcctcagaaaagaccatctggaatgtggggcctgagaagatggctctgcccaggcgtgtctgtggcttctgttcagcttagtgtcatcatcattgatggaggagactggggaggtcccattctcctgctgagctcagctgggtccccagacctgcacctgaaccttcctccgcttggctggtgtttacagagctgaagctgctgccctttgggacccagcctgttttcatttctgctctcagctgtctgatctccatggacctcacctacacgtttgtgcgtgcccgtcccccacgatgctgcttcactaggcccctcaagcctggcacactctggtctttgttctctatagaactgccaactctgtgcctggcactgggatagcttttctggctctgttactcgcctagccacaccttccccaagaccacttctttctttagctgcattctgggggcaatgcttggccttgaactcacagaaatccacttacctctgcctaggtactaggattaaattcatgtgccaccacaactggctctgctagtgattatttatttatttatttatttatatgagtatactgtagctgtcttcagatacacaccagaagatagcattggaccccattacagatggttgttagtcaaccatgtggttgctgggacttgaactcaggacctctggaagaacagtcagtgctcttaaccactgagccatctctccagccccacctctagttatcttaaagcccatgcacaatcttggttcaacatcttccctgtggagatctgttagacctaggcagaggatgctcagggctcaggcccagagaacgttgactagcccactgctttgtccccagctcatcagtgctcaccacctgatacagtacagattggataaaagaaagcccagagataaacaggaccacttgtctgaaccttcctgctcctaactccaggcagcctagcttacaaagagggcctgtacagatggcggatgggtggtgagtaggcaggttgaaacacaacactcaatatatccttcctttactgtctcttgagacgtggagggaaccagagggcatatggtatctcttcctcaaaatcatctccaacttccaagcctaagagcatcgggtgtggaaaagggcagcaaaaggaagaacttactgcgtgcttgttcactgagcacttgaggcagagggaatagaatcattggagttcaaggcctgcttacaaaatgagttcaactccaacctggtttatatcacaagactttcctgggatgggtcctagctgttataaataaagctaaaactaacagactgtgggaagtgccacgcatctttagctggaatcaaaatatttattgggcatatactgtgggccatttgattctgctgccatgcctgtggaatgggtgcagctgttcctgtaccctagaacatcaggcttagcagtctttgccccaggagtcaggaggcctaagaccaggctttgacttatagctggtggtcgttgggcaagtacctggatttcagtgtctatctattgagccacacattatgacactgagatttctgaggagtccatatacctgagcagatagttagctgttctagacttcgtggtaatgatgtgtattatcagttgcttggatagcacacctttgggtggcactcccctgagtgtctgcagcctgtagctctgcacggtgaagggctgaggagcctgggttgtggatgtggcccacaaagacctctaaggtttcagatatttggagggtggggtgcattcatgcgtagcagagggggaagagcagagggaagggcattctggagatttgtacccattgcataatcctccagattgcttgccttcagccagtggaattccaaacatttctaatcagataaaggtggctgaaaatacccaggacttgtccggactagttggaggcagtgctagggtgaagaggttgaggctatagtgcttgagaaagtctgaccacttggaagcttgccctggctcatagatgaaccactgtcctcttctccttaattccccaggatggggagccagagccattgggcttttagctagaggagggacaggcccttttgcagcaacacatcctcctggaatgttgggtctctaccttctcacatggggtacttaaccttttgagtgcccctaaaaggatccacatgagttcctttcttcctcttcccagtagcccttcctttcagaatccctgtgatggggtctctttcacttgtttgtttgaggtttgtttgtttgtttgtttgtttgttttaaatgtacgagtgtcttccatgcatataggtctgtgcattctctatgtatgtgtatggtacccttggcggtcagaggaggacactggatttggagttatggattgctgtgaaccaacatgtgggtgctgggagctgagccatctctctagcccctccttcactttataggtagggaaacaccagacaggggagtggacttatctcaagctaactaactagcaatggagctgagaagaaaaacccatcctgcccagcattgagagaggctgagtatgactgaggggaaggaggcaggagaggctgctgtggaccccatttgttccaacacagtgcagaagatgccatttattaatattattattgcatgtgtttatctggtggggcacaggtgctacagcatatttatggaagttggctctctcccattgtgtaggttctggggttcaaactcaagttatcagatatgggcaacaacacctttacctgcaaagccatctcactggcccccaaagtgtcgttgtggatctgtgtgcttgtgtgctttcttgcttgttttgagacaggggtcttactatacatattggctggcctggaactcagtatatagactgggctggcctctagctcaaggatctcctgcttctgcctcccaagttctagggctgatggtgtgtactcagagaagatgccttttctagtactttcccatatgcttcccagccttctgcgtgagcctctgaggacctggtgtctggagagtaccaggttcctgcctagttgcttgatattgcaaggccttcttgtggtattgccaagatagatgagaatgaagagggaaccaattctcctggcctctattcttttgggcaccagcctaggcccagagaccagaagttatggttaaatggaaaaagtaagcagatggcttccttgaagatggtccctatgagcctaagagtaggagaaagctgggctgaaagaccagtaatgccaaagaacctgaggaagaaaatatgacaggtgaggagagaagcagcctggccctggttgagaataaggacacacacacacacacacattcgtcatgggagactcaaactgtgccttggctaataatgaatctaacactagttgttcctaacatttcctcagagttgactgtgtgtcatgatttgcatatgtggtggtgaatccttgtagtaatctgaattgaggtcatttttttttatcccattcatagataagatgttcagaattaaacatcttagtcttcttgccaaacctgctggctacgtgggtactctgctctgacagcctagcttggtggaaagtaagtcagccttattcttatccaggaaggacctccagttcacatgtgaagaaacactcagacaggaaactagcctaggctaaggaagcctggcagagctgcttctgtccatagctaccttccttggcagctggaacagcaaagatgagaacagatccagatctttggataagtagaagtgctcgctccctaaaagaatggttttccagccaaatgtacagtgttctacacagaaagaagagactgccatggaatgactgtaacctcctgctgatgtagatcatatacatgggacaaactctgtgtgatcatggcagtctatctcttactccatcagagagatggtaatgttggaggacctcatgcaaaggtggatagaaatgttaattaattctaagggtggagtgatggatggctcagaggaccagtgttctgttcttagcacctagatcaggctgctcacagccgcctgtaactcaagatccagagagccagtgcccttttccttccttagcagacaactgcatgtgtgcacacatagtcacacacaggtcactctcgagtctgagtgtccttctggcctggaacacgaggagactagaacactgttatcatctacttgagattggttagaaagtcaccatgtttgagatgagaggactgagttgagaaaagaggcctcacaaagcatgctgcactgcccagagcaatgatttgctgagctctaaaaccaggctacgaggattcaccatcacctgagatgtgtaacatgaccttggggacatcatgcttctttagtcctgtgttgtctgtgacatgaagagtaagaacagcatttactcttcaggattttgtttggtttcgttgttgagaatgtcatatgtagtactggctggcctggagctcactatataaaccatgctgtcctcagactcatggcagccctgactcagggttgatgctgggattacagcatgccttgcactcctcgtggctgttgtgaggcctaggtgatttcttaaactcaagacactggtctagtgcatactggttgtcatgtcacctgccctctgggagtaggtggttgcaaactctattgagcaggtctgccccagagaatgcttgtgatgctctcctggtgcccagctgagtagcctgtttcaaagctggccagatggaaggcctcccttgctctgccggatgcttctccattccccagcgaggtgttatctcctccctgcacagccgcttcctgttctgagaaatgagcacatctgtcaggctcctcttcttagaactaatggtgggggaaggggaaggagaaaagaggttgacagatgaccaatagagttagaggaagatgtgaaaatgtccccaaagattccctgaagctcacatagcctcagccacatagaccctcagccaggaagccatcaaaagatcaccttgtttcactgagcatttgcaacccctaatggcaacattgcccctggctgcctctgctcccaccccactgatgtgcctgtctagagcacccgcatccaggtctctgttcctcggggtagaggagagattatttccctcacatcacacaagtcaacagctcccctgggagtgccaggggaagtggattccagccacaagcctcactccttctgagctgctgcctgcactcctgtggagagagataaggactctgtgtgccaccccttcccccactgcctcccagggatcttctaactaggtctcatttgtctactcagctgggagaaactgaggctaggagcaggtgactctgcaagtgactcacaatctatccacacgagaccgtgccaaggccagggacaggcacactgccaccgtttcttgcgaggtgtcactttgaggagccccttcctcttctccacccacatctttcctgaaataactgatcaggaaggaagcagtgggcacaggcctagtggctttccagagtcacccaggaggaaggaagcactgtctggcacaggggcttgcttgttcctcactgaaggatgaggtttcactttccctggttctcgtcatgtcctctccctggggctcctctcaactgactggatgggactctttcatttggctgatagctttagaccaccatactctctttgaaggacccggaccctgaccatggcctagaatttgggttttgttgcctgacactttgggcttaaactaccctacccactttggcaaggtctctgagccacagcttacttacctctttccttcgaagaggtacacgagcatggctcattatcagggcagcagaaggtctattgtttggaaattgagaagagcccagcctaattgttgcttcagatatgtaggcctcaagtgggcaacagtggtactcagtggcagtatgtggggacagctgatgagctgacctatagaaagggcggatcagcacctcacaagaggacatcagaatgaataaaaaccccaaacccatcaccacttatataaggatcttgagtgacctagagcttccacattcacatttgcaagggttattaaaaatgccctgaacattaaaagaagctttcattcatttatctacagtagggtcctttataagacctgccgcattccaaatgcagtgccaggctctagagataacaggtaagaagcaatgggggagacaggacaaagaatcatctttcaagtgaatgggagcatagatggttggggaatatgggctaccagaggtaaagtgctcagactggcacatacacgataaagggccagaaccggtgacacaggtctgtaattccagccatttggaaggctgaggcagaagcatctcaagcttctgggtagcctttgctgcaggtaaagttcaaggccaacctgggcaacagtcagaccccgtctcttaaacagaaaataaacagagtactgaggatgtgcgggtctgtggatagcacttgtgtagcgtgcgtcaggctctgggttcagtcctgagtactgcagccagctgtcacatagggctttattcttacttcttaacaaacgacgacactagaaaccagagagatgagtaactttgctcataatcacacttgggaagaaggaagcgtgaatacaggtgagagagaaaagggaagagagctgcattcaggttgggactatacgcagcctctggtgagcccctgccctcccagacatcatgtcaccatgacgtctttggtgtcgtagttagttgaggagggaagttgagtcattcagttagctgcctttgggcagaaatctgtctaaaagtcagtctacacctgattaggtgagctaggtttcaaggtctggcttaggcttggtcctgcttgcattctgtcccaagactgataggggagaccagcacaaagataggagcttcccttttctatcctgccaagatctttgtgcctttagaatttctggtggaacctgattttttttttccttagtgctacccataaaattgaagacatttaagtatgccaagcaagtgctctgtcactgagtaacatccaagaccctgggagcatgctcttttgcacctaaggcattttacccctcccctggctggcactggtccatcatcggggcctcctcaactttcctgatgactctacccatagcaggtactcctactcactcttgcttctaagccccatggtctatgaaatgaccttactgttttttgtgatactctcttttcctttttcttacttttttatattacttcatttgtatgggtgttttgcttgaattatgtttgtgtaccacacgtatgtagtaccagcagagaccagagagcacatcagatcctctggaactagagtcaccttatatatggctatacggcactgtatggctgctaaaaaggctaaagccaggtcctctggaagggcagtcggtgctctcaaccaccaagtccctcgccagcctccactccaccactttcccttgtctttcaaaccttccctcaagaatctcttgagtctggaaagatagctcagcagttaaaagtactgactactcttccaggggtcctgagttcaattcccagcaaccacagggtgcctcacaaccatctgtaatgggatctgatgccctctcttggtgtatctgaagacagtgacagtgtactcacatacataaaataaatacataaataaatcttggaaattaaaaaagaaaaaagaaaaaaagaagccgggcgtgatggcgcacgcctttaatcccagcgcttgggaggcagaggcaggtggatttctgagtttgaggacagcttggtctacaaagtgagttccaggagagagagagagagagagagagagagagagagagagggagagagagagagagagagagagagagagagagagagagagaggagagagagagagagagagagagagagagagagagagagagagagagagagagagagagaggggagagagagagagagagagagagagagagagagagaggagagagagagagaaagttagttagttttgaagagggagtggagactagactgtcaggcccctcagtgtatatggccatgacaactggaaaccctgtaatgttggagggaaagacctttagatgggtcctagactggacttctcctggagtgaaggttaggaaaactggagtctgactgagcctgggctctactccaaacctgctgtgggttggccttgtgaatttgttgtgcttggtgggagtctatgactattgggtaggtcattaacattgtgtccccagccacactgtactccatacacaggcagcaggcaacgccacgggatttctctctcttcactttagcccatgctgagtccatcggaccttgggcctggggttcctgggagtatttatgacttcagtcccctgtccacttggtagtaaaatcagtgggagccctgaggagcagtggaggcttatctttgcttttccagacctaagagcgcaacagtcctgtttatttacccagagcagccgcccgctgagaaaatggctgtttgtttccaagtatgtcgtgtgaacctgggctaaatatacccacaccacagcttctccagcccccgccccgggaacagcacgccccattctgctccgttctctgcaaaagccactaccaggatccacgcccttgaaagccctactgccgtcaggagaaagaactctgagcaagagcaccctggccaagaatgcagcttaggaacagagacaggaatggtcggtgccttgttctttgtgtcccctcctccctggaatgactgttcctggacagtgaacgctttgtgccttcgtggggacaaggcctgtttactccagcccagccccagagccgaaaatttcctgtggctgtcagccctctacttcaggaaagttccagggcgggagccaggctctgtgttttggcaaccaccccagtgtccctgattccttgtggccccttgagataaccaagtcttctttctttagctgtggcctcttttcttcccacagcccaggactctattcattctttttgttgctttacctgggcctacttaactggctggcctcaaactcctgcatggacctgaggatgaccctgaacttctgaacttcttgcctccatctccctcatgctggagttataggcatgcaccaccataccaattatatgtagggtatcaggaacctaaggcgtcatgcgggatagccagacactctaccaactgtgctacatcctcagtctttataagttttcttgtttgacaaggcgaatagggactgaccaggatggacgaaacagaaaggcacagccagccactgctttctgcccagggcttggctctgctgcctttgccttaaaaccctatggtactgtgaaaggtctctcatttccaacagatggaaactggaacagtgggcactctgatttactaaagatggacctcagggcctcacacatgccacgtattgtgtaggacacagcagccctgtcctgtgaaggcaggccatccctgcagactggcgccgttctactacctgttagttaatgtgttccaagccttaagcaccagacgtcttacctcggttgggaaatgagactctcacctacctctgagggccctacgggaagatggagcaatacctggggcttagcagacgtgcagtgtatttgttttcctcgtatgcagtcatgtgttgctcaacttcccagggatgaactcaaaaatatgtcaccaggccactttgttgtgaagatcagagtgtacttaacaaacctagagaatatgatgcagcaaagagagatggcaaaaccaggaggggttgaatgttagcaccagcctaacttaccatttgtgtgtagtgagctttctctgccagacccttttctaagtacaagacaggatctcagctctcaactagacatatctagtacaggaggcaaattgtagcaaaatataatgtatgctgtggtcatgagaagtgctgaggagttgggtgtggctacctgtaaccttagtgctgaggcaggaggattgagaattctgggtcctgtctctggaaaaggagtggaagaggagaggagaaagaaaagaagatagtatgctgagaaaaagacctatagcaaggttggggtgggcacaagtgtggatgctctagacagtgtggtcacaaacacaccatatagccagcgtagggggcagagagtgttaggatatttgaacctttttctagttagtgtggctcagcccttggcacacacctttaatccctctcactggagtacagacacacccttatttcacacctttaataccaaacagcgaaaggaaaattagtttgtagaaggaagcacccgtgtttgaaagtgatgtctagttgagtggcagacacagtgacaaatcaggtaaagatttgacagaataagatatgcctaactctcacaaggtgaaagggaagggaagctactaagggagagacagtacaggaaaagagagttcctgcagagcaggacagtagagttgagagggacgaggctgctagagttagtttgaggccaggtagagcaattcagaggccaagagagaagccagattgaatcagtcagctgggagaggaatctgagccagaacagctgagttgaaccagccagccagagttcaggaagaacaagaaagggtgagcttattcggcagcaaatctcagaggttgaaaacattataggcctagatttcatggtatggagactagaatcttccaggacaaggcttaggttaacagacggaggcagtaagcctcccagaaaacaattacaacaggccaataaaagttacttttacaagagagactcactggtctacagctatggggagggaggcagacagctctggtgtgaggacaccttgggaggacgaagagtttggagagtcggatgcgttgtgagcagaaaggacttaccatctgcttgctgcttctggttctctaagtggatgaggaggagcttgccataagggctcatggctcactgctgcttcctcaaaagcatcataaatactgatctttttgagtcagtctgctcagagcttgtgccatcctactgctaggtaccaggatgcaaagatgccccactcaatactgaggaagccgctagagtggggactgtgttcagtgtgcagtaacctggctagtcgacagtgacctggtcagtgtttttaagcagttttctctgcagtgcatggtggtggggtgggatatcagaagataagaaatggaccaggctgcatcctgaatgagcacactgggaggtgggtcccagagcccctggagatggaaatcttatcagggagcctccacctagccaactgagaccagatggagactgacagacctccatagaagcaatagcatgggctctaacgtcaacatttaattccacagacatatggtgaacacttatttctaggggccaagtaccaagttttcttgcttctcaaaagtcccagctgcctgagaaagaggcttgctggcctcaaggctatcgtgtccacgtgctggctgtcccactgagtcatgtactcttctgatgactaagcttcgtggcagagagcattcctccttggttcaagactgacagccctggggtggggacaggaatggcctctctatgtccacgttaaatgttctgctatgtttcccccacctactagccagctctggctgaggccctctttacaggggggaagaatctcctgtctgaacgtcccaaaaccactaactgagtgccccagtgaaactgctctgagaacctcacctccctgtagtctagtaatggacacctgacagtcgtcttggtgtccactcagcctctagtgctatgtgatgacatcctgtgtgccacctcctgcatgcccctgtctcctagtagtccctgctggtgttcgctccaagctgtctgttgctttttaaggcataacacactctgcacctgtgttctcagcagtaagccgggttggtcttccccagctgggcttcagaaggtcagcctttaaccttttctctaaccatggtgggcactagtgctgtgacatagagatgccccattctgcccattttgctcaaagattcacacagtatctatctttccttctctgtccctataggacacttttgtggatctctacgggaacaatgcagcagccgagagccggaaaggccaggagcgcttcaaccgctggttcctgacgggcatgactgtggctggtgtggttctgctgggctcactcttcagtcggaagtgaccagacactgaccgtccactcacctctcacctcccaccctgcccccaccacaactctctcttcagccaccattgctaccaggagaaccactacatgcaactcacgccccttgccctatcacagggttgggcctagacggagtcccctgcaattagctttctaggatctaccacacttctgtgaaagccaccttccccccacatctcagttctcttggcctcaaaactcacaaggttttcccctaaaccagctccttggaggctggcaggagcagagaggggtgtgtgagggaggagagcctgtcttgttggtgggaccctaattacccctgagcctctcgggaatgcttttccagcagggagctcttcccctgaaggagactagcttgccttggttttgatgtgtgtggcctcagacgtgatcatttcccatcccgctgtgtctctgggtctccctcctccccatctccaccccccaagagccattgagtgaggtgcttttagcccttttgactaattagaaattcaggctgcttgggataatgagacaaggaccagaacctcctccccacctgtggcctggccaaaacccccacttgtggtctgaatgttctcctgaggcctctggctagagtctagccccacccagggggaggggcttagctgctgaaagtccaccttgctagagctagggtggctcttgcagcttagcaccccccaagatccttgtccacccctcccctggctcccatgaccatgactgagggaccaatgggcccaagataggtgccccagagctgttaatgacttcagctgcctcacttcctgcaagattggcctgtggcatctttgccttgggtgttggccacagggtcaagggactctggcctcagcccagaagtgaggggaagctatacagagcagctgtgggaaccccaggggcttccctacctcaggcaggaagggcaggaagaagagcctggagcccaggcgagggggacggcaagggcctgtctttgtgctctgccccacctagcctgggcagcagggctgccaaggtcagaatggcctggctaggagcccttcaggcctctctctcctctgtccacccttggcctgtctcatccctgtgggtcccagctcagctctggccaccccgggctctctgctgtacatattcgagactagtttttattccttgtgaagatgatatactatttttgttaagcgtgtctgtatttatgtgtgaggagctgctggcttgctgtgcgcgtgcccgtggagagctggtgcccagagactgacagcctgatgctccctccctgcccttgcctggggaagcccaccaggggttctggcttctgaggggcacctgtccctcctctcccctcaccctacacttgttccagctctttgaaatagtttgtgtgaaggtgaaagtgcagttcagtaataaatggtgtctgtgactctgtgaaccacagccttggctctgcgccgcatgagtaagggggaaactgctgggctctggctctgctgcctgggatggggtggctcaccaagttccttcagccccagacttctttctggtctccacatttctgtacactactgggagaagtggtgttaattgaacatgctaagagctgacattctggtgagcccaacagtcacagttgttggacaagagtttcctgagtcctgttgtagcataggtctaccattttaagactagcggagaagataggtgtagtctgtggtgctggttggcttagggctttcatgagaaatccagtatcttctggcaagacgtgatgacagacttgagggtaaactgaccaaatctgaggtaacgttattaagataggtctcaagagtttcacatgaattagagatggttctagagaaaagatgacgcttagggctggagcagtggctcagaggttgaatgtttgctgcacagacctgaggaccagaatttagattaataagctgaggattccccaaatacatggaattccagtaccaagggatgtgataccctctctgaactctgcctgtatgcaagcatatgtgccctcacacatgtacatatctattcagacataagccaggcatagaggcacacttctttaatccccagcacttgggaggcagaagtagatggattgctgtgaacttgaggacaacctaatctacatagtgagttccaagacagccagagttacacagagaaaccctgtctcaaaataagtaaaagaggtagtgaccttttggagttagtgaagaatcatgaataaaaagcaagcagggggctctgtgtgggaagcacacctttgatcccagcactgtgggggggggggggtggaggcagctggatctctgagtttaaggccagtctggtctgcatagagttccaggccgttttggactacatagtgaaatctgtctagaagacaagcactgttcagagtccccacaactcaagaggcttccaggaaatctgaggtttgagcaatgaggaagagttaactaagagtcaggtctttctttggactgaacgagaaaactaccatgtctggctctgagcagccttgtgtttagaagccagattggctcttggtgggggatatgaacttggccctggtcaggaaacatatgagctcctaaatctctctagatgctatgagaaccttctagaagggagctgtggaaaaccccagagaccagtaagaggccattggctattattactctgaacttaggggtgtgtgctctgggacaccataggccttatgacactgcctaccgctcctgaatgacagcattcctcttggagaaatgggcatatggtagggtccctcacactatttggtcacaattgaatgggatgacctcagcatcaggcagccaatcctccaaggctactttcaaggaagtgctactttcaagtttgatgttgctatggctggaggtagaagctgcccctccccccccccattagatggtttgttttctgagcaggcttaactgcctccagtgacttcataatgggacctgaaagccaccccaacccatagggcttttgctcagtgccagagacttgtaactcaggcaggacagctttgcccagtgtcctcccaccccgctctgatcactaaaggacttctgcatctcccatcactggggtatgaagctacccgactctcctgggcctctcagcattctcccagggaagcctcctgccgcccactcacctctccctctcacagcagcacctgtggtggctgctccctccccgactccccagtcaccgctccctaccttagccactcaaggaccctctccagactctccatgtgcttccagagcatctttcagatagacaagtatacatgcgtaaaacatgctttgatcctacagccttttggggggcattttttgtctaccttattcctgagctaggacctcactatgtagcccaggttatccttgaacagattctcttccccaagtgccgggattacaagcaaatgctacaaatggtgagcataagtagccttctgtcttcttctgtataactagtcaaagacgcaatagccacatgtaaatgccaatgcactcactggcaactccaaagcaaatcagaacatacttcatcctctttgggtttttggtttttggttttttttttttttggttttttgagacagggtttctctgtgtagccctggctgtcctggaactcactctgtagaccaggctggcctcgaactcagaaatccacctgcccctgcctcccaagtgctgggataaaggtgtgcaccaccagtgcccgactcatctttttttttttttttttaagatttatttatttattatatgtaagttctccagaaaagggcgtcagatctcattacgggtggttgtgagccaccatgtggttgctgggatttgaactcaggacctttggaaaagcagtcagtgctcttaactgctgagccatctctccatcaccaccaccaccacccctttttaaagctatataatattccacaaaagttttgggggggtgtccacaatttgggaggttgagatattgtctggctctgtctccttagctggcctggaattccctgttgcctctgtcttgcaagtactgagatttatacatgtgagccacctcatttggctttcacaaaacttttacccagatcaaatcccaatggtagacatgccatcacactattggaggaactggctgaaggaccctgggctcccctttaaaaggaggcagagacaacttgtgttggttctgtagttggaacttcttaaaaagatttaggggctggagagatggctcaggacatgggttcgattcccactacctacatggcaggtcacatccatctataattcatccccaggggatccaacaccctcttctggtcttcatgggtatcagatatgcatgtggtatgtacaaagcccttcacattcagtcctcagcactacgcaaactgggggtagtggcacagacctataatcccagcactcaggaagcagagaccaagggggttggaaattcaaggtggacttggctatgtagcaagtgtgagaccagtgagattctgtcttaaaaacaatatcaacaagaaccaaacaaaacacaataatggtttttggttttgagcctgtctcaccatgtatccctggctcgcctggaccaggctgaccagaaaatcacagtgattggctttgcctctgcctcttgagtactaggattaattaaaggtatgtaaagccagctagagctacatagtaagatcctgtttcaaaataaaaggcttttgggagttgagggggagggggtgatgctaaagatcaagtccagagccttacgtgtgctaggctgacattctatcaactgagagctacctcctagccattaactgtaatatttaatacccgatgtcctcaatgaagtaattgcagtataaacccaaagttgctctctgttaaattgtgccctattcacatgtgaataactgcttataactacagttccaggggatctgacacctccttctggcctttgagggcaccaggcacatacatggtgcacataaatatatacaagcagaacactcacactctaagacagtgtctcttatatcccagcatgtcctgtagaagcaagaatcacctcctacctgcacctccccagtgctggcattacagttacgagctgccacacccagctccaaattgacttttcaatggcatttgagaaacagtgaagcacacatacaaagagcaaacccacatctctctcatggttccccaagccccaggtccctgatttgggggcttattctgatcagaatggctagctacctgaatgtctcttggtagctgtgcctgcagctctgtgctagagtcctccctctttccctcctccctgctttgactggatgagaacccatgaaggatggtactcctccacgagcatctgttcccacagctcccatggaatcagtagtacagtacgcccacagcattcctgcaccaccacacagagctgggaccaaaagcctatgtactgtttctctacttaactagattcttcattttctgctgtcctcataacccagcccagcacctggactgtgctaggtgatgcttagccataccttccctctaaacctaggttgctctggaattcactgtgtcattcaggctagcctctaacttgtggcaaccctcttgtctcagtgtcctgagtgctgggattaaaagtgtgagctgctgtggccaactactcaaacagattttcaaaattagcaagccatgtaaacccagcagctggtgatcagcttcagtatgcaggccagcaaaatggttctgcgaataaagatgctcgttgccaaggctggaagatgcttgttgccatggctggcaacctgaggccactccccaggaccacatatggtggaaggaggggaacccgaggtctaagccagtaggcctctgagtgttacatgttatggtacacacacccttgaaaaagaataattttttttctaattataaaacattttgctttggacttttctgtctctatcatcacagctgtgtcatgaggtgaaaaacaagaactttcccttcatatgaagaaaaaagaaatgagggctgggactggaagtataaccagtgggtaatgcttgcctagcaagtacaaacatctgatttcaaatcctggtgccacactgttagcggtgagtgtctgcctatgatcccggtactcaggagctaaaggcaggaggaccagaagttgagggtcatcctcccctacatattgaggtctaggccagcttgctacatgagagcagggaaaggcatcttcagtaacgttctattgctgtgaagagacaccatgaccaaggcaactcttatttaaacaaacaaacaacaaaaaccccaacttctttaaaatttattttgtgcgtataagtgttttgcttgcatgcacatatgtgcaccacataccacatgcatgtctgatgccagaggaagtggtaagcctccacgtgggtgctgggactcaaaacctgggtcctttgagagaacaaggtctcttaaccactaagccaactctactgtcccctcccccccccaaaagcattttattgggagcttgcttacggttttagagggttagtccattatctcatattggggagcagacaggcatggtgctggagcagtaactgagaactttccagatatcctgattcccaggtggcaggcagagggacagacactggactttgcatatgctttcgaaactcagagctcacctccagtgacacaccacctccgacaaggccacgcctcctaatctttcccaaatagttcatcaactggggagcaagccttcatacagatgagcccgtgggggccgttcttgtccaccacaaaaggaacagaaaaatggctgggatgtaaggcataactccactgcattgttttccagacaggggcccactatggtagcctggaactcactatgtagaccaggctggccttgaactcacagaggcctgcctgcctctacctcccaagtgctggaattaaaggtgtgcaccattaccaccctatgtatgctcaatgcctccacaaaaagaaagaaatgaaggtatgtgaactaaattatgtgctctttgatttttttcacttagtatccacacattgatgtttgagagctgagcacataaagtatttattctcagcatctaagccatctcattccagtaagcttacatatgagtaatttcaacataaaggtccttgtgaattcttaaggaatttaaagagtcatattataaaattttagccagatgatcttacaaattgaaaatgcctcttttgagacagggtgtagccctggatgtcctagaacttgctttatagacgaggctaccctctaactcaaagctccacctgcctctgcctcctgagtgccaggattaaagctgaaaggtgtgtgatgccaccaaccacccagttgaaaacaccattcttaaaatactcagaaaataagaacgaggccagcctggtctacaaagtgagttccaggacaaccagagctatacagagaaaccctgtctcaaaacaaaaacaaaaacaaaaaccaaaaaaaaaaacaaaaaagaaaaaacaaaacaaaacaaaaagaatgtagatataaagaaagaatagtgtttgctggaaataaatagtaatataaacttaacagcagcctgtcaattgcagggtttttgcacttgcagctcagaaagaagtgaccctcctcaggaagtcccaggtcaggctcacgttgaacaaatacaaaagcaaacagccccatccccaaaagcgcttacagctgcattgcaataatatctagcatcagatgcaaataacagtggggaggagtaacaagatggctcatggagtgaggaagcgcgctgccatgctaaggatctgagttcagtggagggagagaacacacttgtgcaacactgtcctctgacctctgcactgtgggtctatggcatttgcacactcgcacacatgcatgcatacagaaatacatagatataataaaatattattaagaaataactaggtagtggagatctggggaaaagactctggtggtgggttgggacgtttgctgtgcatgcatgaggaaccgaggttaaatctctagtactaacatgaacatggttaattgaataattacccaccataatgtcctcttctggcctcagcacaagtccacacagaaataaatacaccttacaaacacacatgagagttttacagggtttctctgtgcagcctctggctagcctggaactctctgtagaccaggctggcctcaaactcagaaatccacctgcctctgcctccccagtgctgggctgtgtgcagtggctgaagggaccagaagagggtgtgagatcccctgggactggaattagagatgattgtgaagtatatgggcattggggtttgaacctgagtcctctgtaagaacagtcagtgctcttaaccactgagtcatctctgtggcctaggcagaggtcacttttaccctagactttgtgccaggccacctcaagacaaactataaagaacgagtggtcctcactgatagtggtcttcactgatggccacgctgcacagctaaccactgaaggcatggccataagagatgggtttcccacctccggctatgctcacctcataggtggagcagagcagctaagcccaaggacagagaacagtatagtatttgggagcaagactgcaacagacggcctggggtaagtaagtcactctaagtgccaggctttctttacctgataagtagggggtggggcatctggcatggtagtatattctgtaaccccagcacttgggagaatgaagcaagaggtttacaaatttgtggaggtggagatagaactcgatagagttctttctagcatgtgcaaggccctgggttcatccccaggacagtgacaaccaaagtggttacaccagggtcacacccaccatggtggtggtatcccatgtaatgcttataaaatgctcaagaattctcctggcaagttaccactacatcagaattgtcagggtaacctatctctaccttaatgtgtatctccccaaagcaggctaagtggtaagagaaaggagcttcagttgaagaaatgcctccatgagatccaactgtaaggcattttctcaattagtgatcaagggggaaaggccccttgtgggtgggaccatctctgggctggtagtcttggttctataagagagcaagctgagcaagccaggggaggcaagccagtaaaggacatccctccatggcctctgcatcagctcctgcttcctgacctgcttgagttccagtcctgacttccttcagtgatgaacagcaatgtgggaagtgtaagctgaataaaccttttcctccccaacttgcttcttggtcatgacgtttgtgcaggaatagaaaccctgactaagacaatgaggcaggatttatcagatgtccctagatctttggggtgtggcctcaagggggattatggaattcctcagctcccctctgttgttgattttatttgttttgtcttgctgagagagtctcaagtagcctccaacttcctttgtacttctaaagatgaccttgaacttctggtttctcttgcctcagccccctaagtgctgtgattgaaagagtgtagatttaagatcactgggtgtggtgatgcacatctttaatcccagaacttgggaggcagagtcaagaggatctctatgagtttgaagccagcctggtacataaagtaagtccaggatagcctctgttacaaaggataaccctgtctcaaaagacacccccccaaaaaaaaaaagtcctttggacctaacccacagcttcatgcatgctggacaggaaggaactctaccacctgagttgcatctgggttgcatctgggctcctattccttcttttgtgcttcttggctgaggaggtgagcgggttactctgttttgttttgacgtagggtctcactgtgtagctctgtctggcatagaacttgctgtgtagtccaggctggcctcaaactctgcatcctgagtgttgcaattaaaagcgtgtgccaccgcatgtggctaaccgtgcacttgatgtagagagctgaggacacatgaggtggagacaaaggctgaaccactgtgtcggtctcctttgctgtctgcccagagagtcggactctgcccagctctgatgtggacacaattggtcatttaagaaaatgttttccccaagactgtaatgcaaggttaacttgacctgctgctgtgctcactggagcgagggcaggtcttctagcctgctcttggtaaccttgggctttcttggcatctaggcggctacagttagttcctccgccttatcacaaggctcagagcagaacctcagattcctaactgtagccatccatcggaggggctggacagttcctgagttaagtcaccacctgttagtccaacaagaaaaaggccacaattcttttatttttattactattttgtatatatgggtatacttcctgaatgtctctgtacactatgtgtgtccctggtacctgcagaggcctgaagcgggcatcagagctcctgggaccggagttacagatggttgtgagctgcaacataggtgcttagaattgaacccagcttttctagaaaagcagccaatgctcttaactgctgagccatctctccatccccaaggccagaattcttgatcacaagaacaacaacatctttagaaattacatcaggctttgttggacaattatcccatttttgtgtaatctcagaagtcaagccaaagtgtcctgctacctccatggagggtacctctgtgaatagaatcccttctgctcccagtaaaacaggtttgccagcttcgtgtgtgtgtgtgtgtgtgtgtgtgtgtgtgtgtgtgtgtgtaacatatacgacatatacaaggccctgatccatcttcagcagtacataaaaataagtaaataaataatacaaaaagaagcattgagtagctttacctgccgtactcatgagtgaaccttgccttatgtctactgttttcatgccacagatcctactgtgtgtgtatttgcctttaaacccagcacttgggaggaagaggcaggtgggtctctgtgagttcaaggccagcctagtctaaagaacaagttccaggacaaccagatctacacacagagaaaccctgtcttgaaaacccaaaagggggccggagagatgaagggctggagagatagctcagcagttaagagcactggctgctcttccagaggacccaggttcaattcc

SEQ ID NO: 739 - DNA, 1472 bp, Mus musculus
atcactcactcactcactcactctaaggcaactctcgttttcaccgtcattatcacaatgtcaggatttttttttccaaagcactagagattacattgtttgtgtattttcctagttgggtgtctccacccgtaaggtataagtcttcataaaaacagagacattgccttgccttgtgtcttcaacaaaccaaactaagggctttctattcttcaggcttttcaagtagtacctgatacacagtcaatgaaaggtcaatattgctgtctatttttaaagtgaggggggaaatacacaagttgagaaacctgttcgatgttggacaccgacatcgaaaggaaaaagcactttttctgtagtatacaaagggacagatggatgaaggaactagattgaaggaatgtgaaccataaacgttccacgcgcctgagactcctcaaatcgctcgccaggggtcgctgctctcccatgtctcgatgccagtccctttctggcgcgcactccttttgcgtctcgggctcgcgcgcgctgccgcggcaccggaagtggctgcgcttgcaagttcccccggtctcttcaggggaaactgaggccggcttctccgggagattcagcacgagcagtcagccagaaccttatcttggctttggatcctggaagagaatcgctaaacacagagcagacccaagcaaccgggagctggtggtcgactttctctcctacaagctttcccagaaaggatacagctggagtcagtttagtgatgtcgaagagaataggactgaggccccagaagaaactgaagcagagagggagacccccagtgccatcaatggcaacccatcctggcacctggcggatagcccggccgtgaatggagccactggccacagcagcagtttggatgcgcgggaggtgattcccatggcagcagtgaagcaagcgctgagagaggcaggcgatgagtttgaactgcggtaccggagagcgttcagtgatctaacatcccagcttcacataaccccagggaccgcgtatcagagctttgagcaggtagtgaatgaactctttcgggatggagtaaactggggtcgcatcgtggcctttttctcctttggcggggcactgtgcgtggaaagcgtagacaaggagatgcaggtattggtgagtcggattgcaagttggatggccacctatctgaatgaccacctagagccttggatccaggagaacggcggctgggacacttttgtggatctctacgggaacaatgcagcagccgagagccggaaaggccaggagcgcttcaaccgctggttcctgacgggcatgactgtggctggtgtggttctgctgggctcactcttcagggcacctgtccctcctctcccctcaccctacacttgttccagctctttgaaatagtttgtgtgaaggtgaaagtgcagttcagtaataaatggtgtctgtga

SEQ ID NO: 740 - protein, 340 aa, Mus musculus
RNVNHKRSTRLRLLKSLRRCSPMSRCQSLSGAHSFCVSGSRALPRHRKWLRLQVPPVSSGETEAGFSGRFSTSSQPEPYLGFGSWKRIAKHRADPSNRELVVDFLSYKLSQKGYSWSQFSDVEENRTEAPEETEAERETPSAINGNPSWHLADSPAVNGATGHSSSLDAREVIPMAAVKQALREAGDEFELRYRRAFSDLTSQLHITPGTAYQSFEQVVNELFRDGVNWGRIVAFFSFGGALCVESVDKEMQVLVSRIASWMATYLNDHLEPWIQENGGWDTFVDLYGNNAAAESRKGQERFNRWFLTGMTVAGVVLLGSLFRAPVPPLPSPYTCSSSLK

SEQ ID NO: 741 - DNA, 79544 bp, Homo sapiens
gccaggaggccaggatgtatgcaagagcttcccaattccttccaaatgaacaggaggtaagcctggtccaagagtttcctctcctatcattttacctgcttatgttaggctgagcttcaagttctcgttctctgtgaatgggagactatgtggtctgaatcactgaagcagaatttcagggctggaaagaaggatagacacatctggtccactctgttcacaatttcagttatcatcgagggaagggaacaagagtggaaataaggaaatcaattagtagttcattgcaatgtagttgtaagaaattggaaaccacctaaattttcacaaatcgaggaatatttcaatcaactgcctacagaatggaacactaagcagcagtttaaaaaagttccatggatctggactgacaggagaggatctttgagatatatttttgagttaaaaaaaatgaattgcatggctgggcgcggtggctcatgcatgtaatcccagcaccttgggaggctgaggcaggtggatcacctgaggtcaagagtttgggaccagcctggccaacatggtgaaacccggtgtctactaaaaatacaaaattagccaggcgtggtggtgggcgcctgtaatcccaccactcaggaggctgaggcaggagaatcacttcaacccgggaggcggaggttgcagtgagctgagatcgcgccactgcactccagcctgggcaacaagagtgaaactccgtctcaaaaaaatgaattgctgattgacataaattcattatgacatcattatgtttttaaaatactcaaaataatgttccacttttcccatgggtgtgtataagtaaccattagtacttaccacatgctaaccactattagaagtattttacacatattaactcatatatcctaacaataaccctatgagatagttaatgttaccacacccattttatagattgtagaaattgaggcttaaaaagattagacaatttatctgagatcatacagcttttgtggtgacaaaatcaagatttgagcccaggaaggcctactccagagaccaatcccctaaccattgccttggactgcctctcctatgtggatatatatatagagagaaagttatggaaaaattcataacaaactaacaagaatgggaaattcagaggggagaagttaaactggatttatacagagaaaggatagataatttgagtctttaattaaaaaaaaaaagaatgttagctgggtgcggtggctcacgcttgtaatcccagcactttaggaggctgaggtgggtggatcacctgaggtcaggagttcgagaccagcctggccaacatgacgaaaccccatctctactaaaaataaaaaacttagccaggtggtggtgggcgcctgtagttccagctactcgggaggctgaggcaggagaattgctcgaatccgggaggcagaggttgaggtgagctgagattgcgccattgtactccagcctgggcaacaagagtgaaactccatctcaaaaaataatgataaaaataaataaattcaaatcacccaaataatacacagcaacactcttttttatttatgtaattattttattttatttatttttgagatggagtctcactctgtcgcccaggctggtgtgcagtggtgccatctcggctactgcaacctccgcctcccgagttaaagcgattctcctgcctcagcctcccgagtagctgggattacaggcatgcaccaccacgcccggctaattttctatttttagtagagacggggtttctccatgttggtcaggctggtctcgaactcccaacctcaggtgatccgcctgcctcggcctcccaaaatgctgggattacaggcatgagccaccacacccagactttttttttttttttgtaatagtaaaactgcaaaggagagagaaggaggagccagtgaggtagaaagttatttaagctctcaaactctgttttgaaaaagtgagagattaactgggtgtggtggcacatgcctatagtcctacctactctggatgctgagatgagagggttgcttgagcccaggaggttgaggctgcagtgtgctgtgatgatgccacctcactccagcttgggtgagagaatgagaccctgtctcgaaaaataataaataatgagcgagaaagaaagaaccagcctctactgctgcccctaacaaatctgatcctccactctgtgtctcttagtccctccaccatctaactagtggtcactaggccagaaatctggacctgccttccagcttcatggaggcttcctactccattggctccgggtgatgacttaacttccagacacctccaaacgaggtgacttcgatcacccaaagacactcctctggagaaggttgcaggtataaataattgatgacagctgtcaaaaggatccccaggatcgcttggacccgggaggtcaaggctgcagtgagctatgattacactgctgcactctagcctgggcaacagagtcataccctgtctcggaaaacaaacaaaaaaaaggttccccagaaaagtcagcactgtggcactgttttttttttgttttttttttttattcttccagtcttccatccaaccaagtgttggggctcagaaaatgatgctccaaaatatggtgctttggcatgctgggtgctttgaacaaaggagattgaaaggcctcagaaataagcctcagaaacaaggtctccctctgaccttctgctccctgtccccatcattcccttccaaagagcaggagggagcagttgcggaagttctttcccttatatgactgagggaagttcttccaattgtattaaatgcaattgtcttaaactctcttcctagaaatctcatcaaacaaccagggaagattagtcaccagagaggagattaaaagtaaccaccacatccagacaggctattgcctattcttccagagactgttccaaaacaactttttttttttttttgagacggagtctcgctctgtcgcccaggctggagtgcagtggtgcaatcttggctcactgcaagctccgcctgccgggttcatgccattctcctgcctcagcctcctgagtagctgggactacagtcacccgccaccacgcccagctaattttttgtatttttagtagggacggggtttcactgtgttagccaggatggtctcgatctcctgacctcgtgatccacctgcctcagcctctcaaagtgctgagattacaggcataagtcaccgcgcccgcccctttttttttttcttaaaggcagagtctcgctctgtccaccaagctggagtacagtggcgcaatcttggctcactgcaatctccgcctcccaggttcaagcgattctcctgcctcagcctcctgagtagctgggattataagcatgcaccaccacactggctaatttttgtatttttagtagagacagggtttcaccatgttggccaggctggtcttgaactcctgacctcaggtgatctgcccgcctcggcctcccaaagtgctgagattacaggcgtgagccaccgcgcccagccgcagggggttattttcagtaagcacatgtaagattggtggtagcagtttgagaccagcctacgcaacatagtgagtccccgtctctataaaaattaaaaaaaaaaaaattgctgggtgtggtggtgcacacctgcagtcccagcaactcaggaggctgaagtgggaggatcatttgagcctgggagtttgaggctgcagtgaactatgattgtgccaccatactccagcctgggcaacagagggagaccctatctcaatttaaaaaaaaaaaaaaagaatgattcgaagactttttaatgcaaatacagatacctcatatatctatatctatccacacacgcatttttatatattcatataatgtctgtgtgtgttcatatgtttttcaaatttctcatttaaaaagtaaagtttttttttttttttttgagacaaagtctcttctgtcacccaggctagagtgtaatcttggctcactgcaacctctgcctcccaggttcaagtgattctcctgcctcagcctcctgagtagctgtgattacaagcgcccgctagcacacccagctaattttttgtatttttagtaaagacagggtttcaccatattggccaggctggttttgaacccctgacctcaagtgatctgcccacctcgaccttccaaagtgctaggattacaggcatgagccaccatgccaggccaaaagtaatgctttcttattttaatatttggaaaatacacggaaggtaagggattaaaaatcacctattgattacagtgtacactctttatgtgatgggcacattaaaagtccagacttcaccaactatataattcatctactatgtaacccaaaaccacttgtacccctaaagctatatgttatatatatgaaaaaatactgaaaataataaagaataaagaaaaataactataacgtagcctttagtggcactatctctactattagcattttagtatatttcctcttgtcttttaaacattgattttattaacagagtagatacaaatacatatatgcaatgtatgaaaggtataaagaataatgaggcaaaaaaagtctctgtacatatgtacaattcaacaagaaaaccattttcattgtcttttctttctactttgtttcttttttttttgagacggagtcttgcactgtcgctcaggctggagtgcaatggcgcgatcttggctcactgcaacctccacctcccaggttcaagcgactctcctgcctcagcttccggagtagctgagattacaggcacccgccaccatgcccagctaattttttgtatttttaatagagacgggggtttcactatgttggccaggctggtctcgaactcctgactttatgatcaatctgccttggcctcccaaagtgctgggattacaggtgtaagccaccacacccggccttgttcctttttatttaaattgtttactactattctgtttcagacagagatcattatttttgaagcttccaatttcatcttgttccctaggttaatccaataccctctcgtgttaatgtccaatagctatcatgacttttttttttttttttgaaagagagtccctctctgttgcccaagctggagggcagtggcaggatctcagctccctgcaacctctgcctcctggatgcaagcaattctcacgcttcagcctccagagtatctgggactacatgtgcacaccaccacacccagcaaatttttagtagaaatggcgttttgccatgttggccagagtggtctcaaactcctggcctcaagtgatctgcccgccttggcctccagaagtgctgggattacaggcatgagccactgcacccagcctatcatgacttttgtgtttgttattctcttaccacgtaggtatataaggtatatatatatatatgttatctactattggagagcaaattacccccaaacttagcagcttaaaatcacaataatgtattatttcatacaatttctgagcatcaggaatccagcttaatggagtggttctggttcagggtctctaataaggttgtcatcacctgaaggcttgactggggcaggaggaccctcacatgactgtcggcctctccatagggctgctcccaacatggcagctggcttcccccagagtgagagagagaccacaaacacaaagacggaagccacaatcttttgggggtttttgttttgttttttgtttttttttgagatggagtctccctctgtcacccaggctggagtgcagtggtgggatctcggcctactgcaagctccacctcccgagttcatgccattctcctgcctcagcctcctgagtagctgggactacaggcgcccaccaccacgcccagctaattttgttttttttatttttagtagagatggggttataccatgttagccaggatggtctcaatctcctgacctcatgatccacccgcctcggcctcccaaagtgctgagattacaggtatgagccaccgcgcccagctgaagccacaatctttcgtaacaaagtcttgaaagtgacataaccccagcttgggcaatatggcgaaacaccgtctctacaaaaaaatacaaaaattagctgggtgtggtggcacatgcctgtggtcccagctactagggagactgaggtgggaggattgcttgggcctgggaggtcaaggctgcagtgagccgtgattgtgtcactgcactacagcctgggcaacagcgagaccctgtcaagaaaagaaagaaagaaagagagagagagagagaagaagggagggaaagaaacattccatcgctgtaatttgtcattagtcacacagaacaactgtggttcagtgtgggagggaaacacacaaaggcatgaatacgaagaggcagggatatttaggtgccatcttggaggaagctagatgctacaaactctaaattgtatattgcctatttctaaactgtatataagtagaatcttcctacattattcttttgccattttttccattcaatatgtttctgagattccctttttttttttttttgagagggtgtcttactctgtcacccaggctggagtacagtggtatgatcacagctcactgtagccttgacctcccaggcttaagcgattcttttgcctcaatctactcagttgctagggacaacaggtgtatgccaccaggcctggctaattgttctttttctgtttttgtttttgttttattttgtagagagggggtctcactatattgcctaggctggtattgaactcctgggctcaagcatctttccgccttggactcccaaagtggtgggattacaggtgtgagccaccatggctggtctgtttctgggattcttcttttttttttgaggcagagtctcactctgttgcccaggctggagtgtggtggcatgctctcagctcattgcaaactctgtctcctgggttcaagtgattctcctgcctcagcctcctgagtagctgggattacaggcacctgccaccatgcctagctaatttttgtatttgtagtagagacggactttcaccatgttggccaggctggtcttgaacccctgacctcgtgatccacccgccttggcctcccaaagtgttggtactacagacgtgagccactgtgcccggccaaagttagcatgtttttagatagtgttatataattaaaaataatagctggacgcaatggctcacgcctgtaatcccagcactttgagaggccgaggccggcggatcacaaagtcaggagttcgagaccagcctgaccaacatggtgagacaggagaatcacttgaagccgggaggcacaggttgcagtaagccgaggttgtgccactgcactccggccttggcgatagaacaagactctgtatcaaaaaaaaaaaaaaaaaaaagagggaggctgaggccagagaatcgcttgaacccaggaggcagaggttgcagtgagccaagatcatgccactgcactccagcctgggcaacagagcaagactccatctcaaaaaaaaaaaaaaaagaaaaagaaaaaagaaaaaaaatacaaagttatgtgtagacaacatagagaagtataaaaaagaaaacttattttctttagatttaaatgtaacttattttctttaaattagattccagtcaaagatcatttgagagccattttcaagacttgcaaaattctttttccaaaatatgtatccatctttccaaaatataaatttcttcatgttctttctggtttaaaaaaatctttgctggctcctctggtgctatttgatgtgctgctcgcatggatacacatttatattccatcccctctccaccactcccctcagccatcccaatttatttccaggacaccatgggctctcacgctgggctgccaggccttcgctcaagcaatatcttctgcttaaaatgctcctacatcctttctcacccaagcaaaattctattcttttgagggccagttcagtaaagcccctatctgtggacagagtttatctgccctctgctgggctcccaaagcacactgaggcttccataatgatagttttcacattgagataattgtggcaccataggttcaaaaatgtaaatcagaccgggcgcgctggctcacacctgtaatcccagcactttgggaggccaaggtgggcggatcacgaggtcaggagttcgagactagcctgaccaactggtgaaaccccgtctctactaaaaatacaaaaattagccgggcgtggtggcaggtgcctgtaatcccagctactcaggaggctgaggcaggagaatcacttgaacccaggaggcgaaggctgcagtgagccgagatcgcaccaccgcactccagcttgggtgacagagcaagactccatctcgaaaaacagcaaaaaaaatgtaaatcagagccaggtgtggtggctaatgcctgtaattccaggactttgggaggccgacatagacagatcacttgagcccaggagtttgagaccagcctgggcaacatggggaaactccattctctacaaaaaatacaaaaattagctgggtgtggaggtgcgagcctgtattcacaactactggggaggctgaggtgggaggatcacctgggatggggaggtcgaggctgctgtgagctgagatcacaccattgcactgcaggctgggtgacataccctgtctcaaaaaaaaaaaaaaaaaaaaggccgggcacggtggctcatgtctgtaatcccagcactttgggaggctgaggcagtcggatcacctgaggtcagcagtttgagaccagcctggccaaaatggtgaaaccctgtctctactaaaaatacaaaaattagccgggcgtggtggtgtgtacctgtagtcccagatactagggaggctgaggcaggacaatcacttgaacctggcgggcagagtttacagtgagccaagatagcaccactgcactccagcctgtgcaacagagcaagactccatctcgaacaaacaacaataacaaaaaaaaaaaaaaaaatgaggaaagagttcaacagaaagaccacctgaaaaaggggtaaacaatatgaagaaaattcaccaatacaagatccaccaccctccaaagaaagactaaaaaatatgacaaattgctcaacttcattcataataaaaaaagaaatatgaaagtgccttcggtttttacccatctaattggcaaggataaaacatttgataacacactgtgtggttcagggtgtaaggaaattggcggggcgcggtggctcacgcctgtaaacgattctcctgtaagcgagtctgctgcctcagcctcccgagtagctgggattacaggcatgcgccaccacgcccagctaattttttgtatttttagtagagacggggtttcaccacattggccacgctggtcttgaactcctaacctcaggtgatccgcccgcctcggcctcccaaagtgctgggattacgggcgtgagccaccgcgcccggcctgtcctatggagtttacaattaataactctcttaatcatcacaatagctcaacgagagaggttggtactattacccattttacaattgaggacattgaagcacagagcagttgagaaacttgcctaactagcagagttagaatccagacaaagtgcttaaccacaaggcgatgcttcttctatatataaactgacggacggatgaaataggctgattgactgatgagtgactgactgactgactgaatgaataaatggaaatgtgattataaatgttgattttttgcgcctcccgattccccagatctaccgcgagggggcgatctctccccggtcctgatgccagtcactcaaggcgcgcactccctttgcgtctcgggctcgcgcgcgttgccgcggcaccggaagtgactgagcttgcaagttcccctgtctcttcaggggaaactgaggccggcttgttcgggagagacggcgcgagcagtcagccaggtaggccggcagccaggtaggccggcccgggtccgcggcgcggaactcggccgcgaagagctcttgcgtctggaagctaccgggccgatgaagggggatgtggccccccacggctcgcggggctcgcaggtgagagcgccgcctcccctgtgcgtgacagccgttgcgcccaataggagccttcgccgtcccgcttccgtgccggctgggctcgctgattggctgcgctggggcggaccgccgggggcgaggcccctcctctcaggaaggtctagggggcgcccccgggggagggcggttgcctagcaacggggcggtggctcggcgggtacccggcctagtgagctcgagaagccgctaggccgcagccggcccaccctgggctccggagaggtgcagcccccggccccggagccctcccgggggcgccagaaagccactttgggcctgtccccaggaaaacgtggtctcagctgtggggccgtcgagcaggcctcgacccctcttcctgacctgaggagaggcccagcgcctcaccctcacccagtctttgtgcagggcgccggcggccattgtgtccgggcggggaatggaggacccggcaatccccaactgccacgttctgggcctttggggaattcagagcaaaccagcggcatttgttgggggtctccggccttcaacatcacagacaggcctgggggtggccttcccaaagtcagattgcagatctgaggcagtttccccctccctgcgtccctcactgaaaccttgaaccccattgagaagtccctttagggtttcggacgcctccacctcaccctgggctggtgcttaaatagaaaaaagaaaaacaaaaaccaactaaatccataccagccacctccgggagagtactcctggctcccagtaggaggcggagagccaaggggcgtgcaagagagagggggctgggctcccgggtggcaggaggccgcggctgcggagcggccgccctcgatccgggcgatggaggaggaagcaagcgagggggctggttcctgagcttcgcaattcctgtgtcgccttctgggctcccagcctgccgggtcgcatgatccctccggccggagctggtttttttgccagccaccgcgaggccggctgagttaccggcatccccgcagccacctcctctcccgacctgtgatacaaaagatcttccgggggctgcacctgcctgcctttgcctaaggcggatttgaatgtaggtggtgcgggggagcgggagtggggcgggggggactgcccagggagtgactttccgaggaaggcatttcggagaagacgggggtagaaaaggctggtgggagattcagagtccactggtgctttcgatttgacttaagtgaagtatcttggaacctagacccagaccttcgtaagacccacaaagaaaccagttctggtacctggagggggaatggaatttttagggtaaatggcatgcatattaattatttttttttcctgaagctctttctctcccttcagaatcttatcttggctttggatcttagaagagaatcactaaccagagacgagactcagtgagtgagcaggtgttttggacaatggactggttgagcccatccctattataaaaatgtctcagagcaaccgggagctggtggttgactttctctcctacaagctttcccagaaaggatacagctggagtcagtttagtgatgtggaagagaacaggactgaggccccagaagggactgaatcggagatggagacccccagtgccatcaatggcaacccatcctggcacctggcagacagccccgcggtgaatggagccactggccacagcagcagtttggatgcccgggaggtgatccccatggcagcagtaaagcaagcgctgagggaggcaggcgacgagtttgaactgcggtaccggcgggcattcagtgacctgacatcccagctccacatcaccccagggacagcatatcagagctttgaacaggtagtgaatgaactcttccgggatggggtaaactggggtcgcattgtggcctttttctccttcggcggggcactgtgcgtggaaagcgtagacaaggagatgcaggtattggtgagtcggatcgcagcttggatggccacttacctgaatgaccacctagagccttggatccaggagaacggcggctgggtaagaaccaagccccttgtgtgtcccttttctttggcctctggtcagagatccccaacagcccttcttctgtatctctttctgttgtgttgggtgattgttggagacgttgatagttgaggaaacctgactggcctcatttcaccacaagaggttaactccttggaaatacaaatgaccctgtgcttcagagatcaggcatctttcaccctggtcacccccatgactccactattccatacttgtgttccagtttctcagcaaagaaaactgtagcctatgtgttcattaagtcccaaacctgtgagggtaggaagttagttcggtgtttcccttaccttatacaatggttcacacacaaaggggtgatgagtataatgcctggagaagatgatgagcatcaatgacccacagacctctccatctgttccccccaaggggtctcagtcctatcctgggcttctctcccccaaatcaagttccctttatttcaaagtttgcgtgtatggcactctcctctcagactagggcatggccataggcaggagttcccactgggttgaatggctgagaattgtcagattttggggcagtgtaggctgtgcagattgtgtttgcactgcgccccctaagttcatttcccccaaagtgtgcgactttctgcatggttgccttgtttgtggagcacttgctgtgtcacacattaagccaggggactttgcacctcattgcctggggtcggttggggagctccagctgctctgcctgttactttccggccagagcccaggggcctcttcaagcactgtttgctggcaaagcaagaacctagtctttggggctctgtgggacattgagatttagtaacagacttcacatgcaggtataagttccagttctgtcatgtaactagctgtgtgaccttggacaggctgggttactttcttgaggcttagtttctttcactaaaaaatgtggcaagctctccttgccttacagtgtattgtaaatcttggcgataatgtgagcacagtgactgacaccagcaaattccctttccagggagggagagttctcctgcccatcactgagccaggatgagatggtggtgaaagcttctttaccagtggtcactgtaggcaagttttgctcttcagtgaattcagtcctgttttcttgcttatctccctacctagcggaggtgcaggttttatgagagatgttctatcccctcagagtatgcagaaaagcatcaagctgtggaaaataagtcatccattgaaggagctgaggtggaaggggacatgcaccatggactcaggaatgtcaagaatgcaactgtctataggctgggcctagggtgtggcaggcacttcactttaccactgagcaagagacctcctgagtttgccctggaaccccaccccctctctcattttgcatttctttgcaatttcaactcgtctgtgccagctcttgtaaaaggcaagggggtcaagtcaatagaggtcagataactggggtggggtcaggggaggtaaaggtggtgggttctcttgagctagctgactagacttgaaagccattctgtaaatgaactctctagggggataaatgattaaatagttcctgttggtttgtgcagtgacctctcctgttccctcctgctttgattctcttttggggcaaatatttgttcagctgattacaggagggacaggattccagtactgcagacacaccctctgaggcatctccaagtagggattgaggctgcttgcccactttgcctgactattgtctttggccagtggtcctaataccaggtgggttgttgccagctataaacaaaaggcagtctgggagaggtgcctggtctgctagccagcctctgcagaaggctacccctaccagagaattgccagctgcccagtggtgcatatgaaagaggtcttagacacagcaactctgggtaagtttattagatctccatggggttgaaattccatcttccatctctttgcttaagaatcatcagagcctgttggacaacataccacatgtcacttcctcttggtgaacagaggggatgtgtgtggaagagccagttatatcagaaccatttctgagcacacattctctccctaaggccagggagtaaagaacatttgactcaggatcctttgagcctgggtagaaggtacccgcccccttcctctcaggtattatcctgttccaagctgcaccgactggctactgtggtggcatcgggtaattatcctggagactgcggctgggagatccttaagggtaggagttatgggctattctactcagggctatgttctaaatttagcatccctacaggaaaggggaaggaaattagtctttattgagtacctgttaagtactaggcactgtgttaggtcctctacttatgcaaccagtgtttcttgagcatctactgtgaagctagcagtgtactaggtgctggccataagccacgcatggtaccttccttcatggaaacggcatgctgtttcatatattctacagtaaccttccaaggaaggtgagtttattcccagtttacacatgaaggtctttgtgcctaagtgactgaccccaggtgtccctcagccagttaagtgtctgaatgagaatttacaccaaggttggcataattctaaagccaacacttttcatcctatcaagttgtccagggagtaataaagtgacctagacatgctggcccagaaagccagagatgctgttgggccaagcaaaccatgcctgtgaaggtgctcactctggactgataactggctttgttcaggtagctatgggaaggatagttggcagtagcaggttcccagaggcgtgttggtagcctcagattctggcactggtaaaactcagacatggcaggtttcaagtgggcatcagggttttgcccagagtgagctgcttattaattttttctttttttttttttttttgagacggagtctcgctcttgttgcctaggctggagtgcagtggcgcgatctcagctcactgcagcctctgcctcccgggttcaagtgattctcctgcctcagcctcccaagtagctgggattacaggcatgcgccaccacacctggctaattttgtatttttagtagagatggggtttctccatgttggtcaagctggtttcaaactcccaacctcaggtgatccgcctgcctcagcctcccaaaatgctgggattacaggcatgaaccaccgtgcctggccccggccaattttttcattgttaaaaccctctcaggccctgccaatagatgacagtggtgtgcgtgtggggagaaggtggcctgccccaggtatctctacttagtggtggagtgatgcttcaaggactgaaagtgtagacccttagccagattactgcctgcctggagtcacctgatgaaatgctgaacctgttcggctgtcttgtccatctgtctctcccgcctgtaaaatggaataatgatagccagctgccatagcttgactcgagtaaaggatctagcacaaaagcccttctcctgccataattgtagggtggaaaccctttaatgaatgggcagcttccctcagagaactgactcttccccctagagtttctccttgagaaacaaagtccctgtgatactttcctggaatgttgtatacatgaccttccccgaagggacacaagtgtttctggtgctttccaatgggaatgtgggaagggacccaggtgggccttgccactttgggattgctgtccctgaagaaatcccttagcctgatagaaacgtaattgttgggagcaatgaactgtgttgggggagaaaacataacttggcctttcttaagctgtatggctcagtggtctgagtttctgtagatctcttattgcctaatgtggcttcttcagatggatgtatgcttagttgaagcacctcagctccctttgcagatagtggcagttctgtggttttcttagggaaaccccattagaaaccccaaatgtggaaatttttagtaatctcattcgggtcccaaaattaagtagaagtgtctcaggggctcccccttgaaacacctacttcttctgagtgtacatttgaggttgctcttaaaattctgttaccatcacagggttttccagacttcctaggaataatttccccagtagccccacagagccctttagcttctgtcgaaaattacccgggtattttttcagggggctccaatggaacctggagggttttcttgacttttgtatgggtgtccccagatttgtttgggctgcatgaaacagcagttgttatctctgtcccttcccccagcagatatctgtcctgaggccagtgggcttgagcgtcctcctctgtgtccagtctccctggttttgccagtgccctcagccttccatcatggggctttcttgaagcaactgtggttttgcctgagtttaatgtggatagacataggggtaattcccagtgtactgcttttctacggaagtataatctcctactgccttaattaagcagaggccctgtccccacccaacctccaacctaattccacagagtcctccctaaggactccctcttttttctttgaaggagtcactctactcctggatcctcttctcttctgcccctctatccgacagtctgtcttccttgttcccagttggcagacctgagtcaggcaatcccactgggtctttttgtttagcctggggaagagaagacccaggagaatatcaccagcttcagatatctgaaggaagagggactgagtctttttttattggtgtggtacctggcaaaacttggataaatgaaaagaagttaacagttggtagagcttaaattatgtgcagagaagacatttctaacagatttactctgtcctagatttaggagctcctcagggtggaggccacatcttgtccatgcttgtttcctcagcactgagcagaggccttgggcatagcagatacctaattgaagagaaacccactaaatttctgaagaaacagacccttgtcaagccagaataacaataatgggagtggctatttacctaataattcattcgttgagtcaaacaatgtttattgagctcctactgtgtaccatactgggagtatggcagtaaacaaaagtaagcaaaactaagtttctgtcctcatggagctcacattccaatgaggagtgacaggcaataaatatataattacatgtttatatcagatgattgtacatgctatgaagaaaataaagcaggttggggcatagggcatgtctagcaagggagggtggggctgcagttttaaaagagtgatcaaagaaggtgtaagggagaaaaaaatggctttcctctacccttctaggtcctttggctgggctgagaattaaattgacatagacagattaactggaggaaaaataattaattacatagttgtacacaggaatcctacaaaatatgaggctcaaagaagggtcagataattgaagcttatatagcatcctgagctacagaaaagaatatggggcttgggacttctgttaggggcttgagtggcagcaacccaagttatggcagggtgagggaaagaattggtggtggcgtgtgtctgtggtcccagatactgttgagggggtgtactgaggtgggaggatcacttgagcctgggaggtggaggttgcagtgagccgagatcaagccactgcactccaacctgggtgacagagcaagaccctgtctcaaaaaataaaaataaaaagtctctctggtaataaaatttgtctggagcagccctcttcctaatacagatacctttactagtgtagatttcctttttagatgtgaatttcttttacaaaaggacagcttttcagagctactcttatgtctgcagtttctcagaataaccagttcaaaatatgccaaagaagtatatttttggggtggcatattgttttcctacagtcatattttgggatggtatgtcctgagtcccaacaaaagtattacctaaatttatttgagccaagcgctaaatgaggtaaggaggtggatgatgtaggtaccctacagcaaagggtgtttaaagcagagggaatggactcaggagggagcatgcttgacattttcaaggatgagcaagaaggtcaatgtggctggagaagaaacagcaaaggggaaaagggtagaaggtggggagggaatggttgaggaggaggatggagaagtaggtgggggccagatcgcatacagcattacagaccatgatgaggatttggctttggtggaatggtctgtattccttttttttttttttttgagacagagtctttctctgtctcccagactggagtgcagtggcacgatctctgctcactgcaagctgcacctcctgggttcacgccattctcctgcctcagcctcccaagtagctgggactgcaggtgcccgccaccacacccggctaatttttggtatttttagtagacggggtttcaccatgttagtcaggatggtctcgatctcctgacctcgtgatccgcccgcctcagcctcctaaagtgctggaattacaggcgtgagccaccgtgccaggcctggtctgtattcttaagggtggcaacagggagcccagtgaagaggctggtgcaattgccaggtgaaaaagaatagtggcttggacctagaggtggaggtgtagtgagacggggactggagaataagaccaggcttgcacatggtatattgatgggtccagccatcctggaaaccatatttttcaactacttggaggtcctagaatcaaagttaagtaagatagatgttctttgggaatagttctctccaaatgtgatattctgatgaatggtcctcttccactccaacagtatttctgtctgagtaaatgaaatttgtctgagttcagttcccaactcatccgtgtctacctatgcaagctccttttacctctctgaatcttgggacaaataataatacctgcctcacagggggcgatggtaaagacacagtgaggtatacctgagatgcataaagactggagccatgttggtatcattattcttattatctttccacagaacgcatgtcagagacccattcacggaatcttgagcatccactctcctttttctaaataccatagtgacccatcagcacatctcagagcaggcccttgcagcatttctgttgtagtaggagctccacagtgtttgtgtgcaatggtggtgtaagcactggtcttggagttggaatcccagttctactctcagtctcaccttggccaagtcacttcacccccagtccccagtttccctttatgcaagatggagggtttgaagtaggcaataaaggaatgctggttctctctatccttaggccttgtggcggattccaccattacagcatatttcacattagttatattttaaaatggctctctcctgttgacagatatgtcagcaccttaactaaacccagtgtcaaggcaggctagtttatcactgagcccacaatagtgctaccctatatttatgtaacaccttacagcttccaaagcactttcagatccaccttgcctttttgatccttataaccacccagagaggtgagcaggaaggatgacatctccgtttcaaaggagagaaatcaggtgagaaagatgaattgacttgcccaaggttacatcaggaggaagaggcagtttttggactttcaaattggaacttgactactagcttgctgtgtgaccttgggcaagtcttttaacttgtaaatggctatagtaatgccacctttttctgaagattgggtgaattaattcattcttttaaggctttcatatcatcctagggctcttcactcacatcatctggcttctctttttttacatattgatttttgaaattgtggttttgtataaagaaactgcctttgggaccgtctgctatttggtttcatccctgatgagactctcgggccaagcttgagccttacagtgaactctgagccacacagctttttgggcagcctccagtgctcccctcggaactggaggtttttctccagctcttcaggaaatgccattgcgatgacttccatggactgcttcctgtcccagccctgccggcaagagtgtggaaactggaaagcaatgtccctagaggtccgccccccaaaaactactttttttggacgtgtccctgcctttcctcttgtccattactttctttgctccctaccctttcctccttcacctggcttctgcctccagctgtgatcatcccttcaagatttagaaaatgcctttctacttggttctgccaggccattaccccctaccctaggctaggctgtgagggaggtcagttagaattcctgggttctctccttggctccatcacgcattagcagtttcagtcctggacttcccctggagatgcattaaacctgttgcttgcggtgccctgtgtcatccattaaccctgagttcccctaggagattccaccccacccctgcataggatgggattcttaagagataacttgaggtttggcacatataaatcctgcctcttggaaattgatgataaagggtggagtgaaacagagcctgccttcccctcccccagtcacctttgaggaggaagctagaaggttgaaaaccttgttggacaatcatctgaggaatgggagctggcctgggaggggattggaacgcactcaactatgcctcagatcctttgttcctctcttgaaagggaaacattcccctccctcctccctggccacacacacatacacacgtgcctttgttcccccgagtcaggcagggataggaacatagtgtcccttccaaggagcctgactcgcttccctagagactggcctcctggtcagtgggactgggatatttgctcaggagcccccagcctcgtgtcctttccatagagtcttcgaggctaaaaacttgcctacaaacagctgctgagacttctctgtaattatttcatgggacacccatgtcccaggataaacagtccctccctcttactccagttggtgattaatattattgttaacattactattaatagtatctaacacttattgagtgcttactctatgccagccattgttcaaagtgctttacatgtattaatagatttcattctcacagcagcactctgaagtaggttcttttatccctgtttcacacatgaggaaactgaggtacagagaggttaagcaatttatgcaaagtagcacagttagtaagaggcaaagcctgggagggtagcttccaacctcccccttttaaacgctccactgtgttccctcgtccagtgcgctattgtctaggtgactgctggcattaatccagtgctcactatgtgacagcctttagtgacgctgtttttgttactatcccaacaaccttatcgttataggcactgagatttgggagggcttatagttagccagaggcagagtcagcatttgaaaccaggtctctcttactctgaagcctgtcctttttatctccagtccttaaaaatcttgcaaagtaggtgttgttaccttcattttatggttgagaaaattgaggctcagagaaaagtgatatacccagagcttcacaggctagtaccaagaagagctgggattcacactctactgtcttagtagtctgtattgtcatgattattctttttatgtgcatgataatactttcaatttaccaaactccttttataagttatttcccagtgaagtaggagaggtgggtatgttcagccctgtttccagaggggaaactaagataaggggtcttgtcccacagtaaatggcagcatcagacttagaattcatgttctggcttttaacacagtattatcaatactgtctgcctctcctaaagctggatgtgtggcttggagctgtccttggagtttcatttcttttgttaaatcagcaaatattgacaaatgctttgtaatgtgctaaatgctagtgatactgtggatattgtggtaactgagactgagtcccatccctcaatggtctgtttccatactccacaccttgggtcttgctggtgtccctctgccatctgaatcagtctacatgtgccatccatccttctcctcagctgccagacacaccaggcaagattcattatagttgatatgtattaatcaccttcaacacatacacagacaaaactctggcctcacatttgagacagcttgactccttgctggtggcataacacaaagcaaatcagcttcaaattctcatccataagcctgagagaataatgccaagccaccagagtaagtgaggcatgaatgagaaagtgaaatgtaagtgtgttttttggtaataataacagatactatgggttgagtagttacttgctctgtgccaggtgctgtgtttatcccctcaatataatcatcttacttggttctcacaaatgctctcctgtgaagatggagaatctagggttcagagaggctccctaatgtgtccacagtaacagatcttctaagaggcagagctgggtcttatactcagatgtgtctgatgcaaaagcctataagcgtcattgcttcttacaagcccagactggcttattttaccctgactacctggctcagggcccgcggttgggtgaggactcagccagggcctgctcaatgaacatgaagggttattattagatacaggttaggctacaaaaaaagtttctgcccctaaggaagcaaactcatttgaagcagtaggaatagacctcaaacacttggtgaatggcttgaggcaaactgtgccaaacctgtagagtaaacaccaaaagtggaagaagttgagcccacctgactgcattgctgggccctgggcctctgccaaatgggccagcttccaccatcagctacccagttgattactgggcccagaggcctccaccctcagcctgtatcatcaacctgcaccctttccctagccaactgcattgccaatccagactgtcttctgcatcaacagtggaaagggttaggaaggagagaggtcactgacagcttaaataatcatagctttctcagcaccgtagctttgtacaatttccactgaggcctcagtttcccggtctgtaaatggagataatactaatctcttaatgaagatgatagtaatctcttccttataggcttgctgtttttcctctgcctgtatcactcatcctatggatctgatcagggctctctctcttcttatcattcaggtatcaactcagatatcacctccctagaggtcgccatgtttacatgtttaccatctgtctcctgtagtaaaacataagctctcggagtacacgggctttatcctgtctttcatccccagcatctagcagagtgcttggtacataggaggcacttagcaaatatttgttgaataagtgactgtgtagaccacctcacacggtgtctgatatactcagtcaatgttaggcattgttatgtcttaggaagatgtggaccatgatgggtttaaataggtgaaaagaatgtaacaagagcaggctgtggctgggcgtggtggctcacacctgtaacctcagcactttgggagactgaggcaggtggatcacttgagatcaggagttcgaggctggcctggccaatatgacaaaaccttgtctcttcttttttttttttttttttttttttttgagatggagtcttgctcttgctcagttgcccaggctggagtgcagtggcacgatctcggctcactgcaagctccgcctcccaggttgacgccattctcctgcctcagcctcccgggtagctgggactacaggtgcccgccaccaggcccggctaattttttttgtatttttagtagagacggggtttcaccgtgttagccaggatggtctcgatctcctgacctcgtgatccacccgcctcagcctcccaaagcactgggattacaggcatgagccaccgcacccggctcgtctcttctaaaaatacaaaaattagcagggtgtggtggcgggcgcctgtaatcccagctacttgggaggctgagtcaggagaatcacttgaggccgggaaatggaggttgcagtgagctgaaatcatgccattgcactccagcttgggcgacagagggagactctgccacacacacacacaccaaaaagatcaggctagttacacacgcgtgcacgcgcgcacacacacacacgagcaggccagacgggtaagaaccacccagacagaactggagggtggagtatgtatgaagcatttgagagatcatgaggaggcagactggctagagccaaagatggtctgtgtcagcaataaagttggtcagggaagaaaccaggtggctgatgacagaggcctctggacagagggatggttgatggtagaggtgggcctaatggggagaggcccagagcacctgtgggatgcagttaggtctcagtaacccctaagaaaaagaatctcttgccagccagggctcagcaggcagagctgcagggagagaaaagccagaggcacctgcaacctgcagatcaggtaagctgccctggttgttattttgggactcagggccaggtgcagattcaaaggattgattgaagccttttggcaactctggcctcagcagggtaaacatcacctgtctcctgccacctgcagtgacaatgccaggaagggtaccctaggtaggcccaaaggggcctaactttcttgctgccctggtggagcaagaaatatcttctaggagaggccaatccttccctgccccacagctccttctctgcaaagctcaggtggcaatcaggtacctcctgcccaagaggcccccatggttctggcctaaggaaggcagggcggggcattgggagccgttgacagctgggctcagctggggggaggggtcagtttgggagcaggtgcagatttcagggagggtggggcctaaagggaagtagggatcttggtaggctgcaaaattttcctccccatcccccagccacagctggcttctccaggaacctgatgacctagttacaatgcttagaaattgtcagcttagcttgcagttcagggctttgccagtctctcctctctgaggcttcttgggtccaaaaggtaccttggcatttccccaagggggttccatgtgaatgacatacactgtatcacatgtacaggcttcttgcccaggggaggaaagagccagtaaggctgctgcttcttcccttgtgtgtgccccccaaccccagggagaaaatactcccatgcccttgcccccttctgtttctctctagagggttggtgagtgacaaatgggaagtcacaaacttcttcccttgagggtcaacaaagagggccagacccttgttgccctaaggatagattgagcacacctaaccattctttccttacctccccatctcagtgtgatgttaaaacctgatggaaagaggttaggaagactcttctgggggctctggaggccccccactctctcaggcagcagctgctcctggtattcctggtgtctgccttgcctccttgggagaaattccatcgttgttaagagtcaggtacgaaatttgacaaaccgttgttgagttggtgagtctcacttgcttaatagttatccttggcaaatacttaatctttcccagccttagtttcctcatgtatggaaaagaggtaacaatatacagtgcttttcttttttccttttttttttttttttttgagacagagtttcgctcttgttgcccaggctggagtgcaatggtgccacctcggctcaccacaaccttcgcctcccaggttcaagtgattctcctgcctcagcctcccgagtagctgggattacaggcatgcgccaccacgcccagctaattttgtttttttagtagagacggggtttctccatgttgatcaggctggtctcgaactcctgacctcaggtgatctgtccgcctcagcctcccaaactgctaggattacaggtgtgagccaccatgcccggcctacagcgcttttcttgaaacactcttgagagcatgaaaatagttgaaaagatacatggagcacttaccaaggagcccagcatatagtaattacttagtataacaagctactattattactgttattgtcacattgcaatcactggtaaacaaattgttgtcattgctattggatctactctccaggagtgaactttcaggctgacagaatatgtggatatctttggaccaagagtttagagattttaaggtacctgaagcttggggccttggctcacaaccttgtcccctacctcctctacaaggcccaagtcataccttgtacacagtagaggtttggccagtgttgttgactaggcgtttggcaatggggcatattttgttttatcttcccagggtcctccttgtttgttgactgagtggaagacttaatgagttaagtatttaaagtgggtaggagcatgcctggcacacagtaggtgcttgacatgggtttgaatgattaaacatggcattgtgggaactctggagtttttccaggatggccccactcactccttgtttgctctgtggcctcaagcctcttgcccaagctctgcctgttgcctcatatgttgaagaaagataacacccgccttgcctccctcatgggctagcagggaggcccaaagagatgatagatgaaaaagcactttgagaactataaatatttggtcttgttgctactccttgactaaagtcacagccatagctgtgtcattcattcattcattcagtcaacaagcattttttgagtagaagcaatatcttatcacttaactggcttcatgaatttggacaagttacttccctctgtaaacctgaagatctataaagtggaagtaatactcatttcagagggttgttgggagaaagactaaacgaggtgctctgagcttactgaggataaaaactatgtcttattcactcttaacagctactgctgggcctagtacttggtggctgagtgtttagtgactggattaacaaacattcctaataattaatggtacatgtaaagtgcacttacacattgcctagtgcagagtaaaagctcagcaaatgctgagtctttcccttttctctatgaggcttgaggtgccttgatttagccatgggttgccttctgcagtcaaagtaccaggcaaggccagactctgaatatgactcagatgggaagtagaagtgagtattaatgcctggctccaggttgtccttacctgcctacgctggacttcagtgcgggagttctgaactatcgaggatcagtgctgcttaaacataaaatccagtgtactatggttctcaccccatgcttatctctgatccagaacaactgcctcttgttctacccactctccatctgctactcagaagaatttccccttgctcacagcacccatgttcagttggagccctaggggttaccatgtcagggaagtcccagggagtcactcagaaatagcctttggggcaaggtccagagaaggagcccaattctaaggctcagtgtctcctgggactgggtcaagcagcaggtgcatacatgagacccagggctggtggctgagtgatgaaactgagagatgtgtagggccagacaagaagtcaacctagaggaaactgcctgcttgttcatgcaggtgtttggacacctgggggaactttctgggtctgatttagtggtgctagtgtaggttccatattagtatcccaagccccagtgagggaaacctttgggactcccaagcaaagcctgtagttggcacccagcacctttaaacccttctcagatccctttagggtgaaagagaggccccctcctctgggttctacagcatctacagctggaaactccagggacaatgacataataaccatagctccctttataaagtctctgctgtgtgttaggcactgtgctggggctctttatgaaaaggggatcattttgttaattggaagtatgggctctggaatcagacagagttgagtttgaatctggtctctattacatatcagctgttagattttgggtgcattcctttccatttctgagcctcagtccccctatctgaaaaatggggataataataatacttcatagggtttttgtaaggatttaagagccttttgtaagaatgtatgtaagatcatatggtgcaggtattaaggtaattttagtaatatttaacaatgagcacttgcacttaagtgttttatatgagatagttcattgaattctcaaaatagtaccactcaggtaggttctcttattattcctatagagaagttaagaaagttgttcaaagatgcacagcgagtaagtggtaaaaccatgatttgaacccaggtagtctggctccaaagccaacttgtcctacctggataaggaaggccctagtaaatgttgctgttataactattgtatccagcattgtagttgtctgtagtttttggtctatccactgaattctgagctcagtgaagactagaaacccatttaatcaccttgcacccccagagaccaacataatactcataaaactcattaatatttgcttaatggctgagaatattctctttctttagtaatcaatcagtaactctttatcgaccagttcctgtaggctagctttgaactaaatcctaggaggaatgcaaagtacagctatgcctgtgtaaacggaagattgggtgtgtgcgttgggggggtgcattccagagagcactgtgtcattggcagaaacttccacacaggaggcagaaacaatacaggtggtttgaggatgttttccaagatgggattcccacccctccctgagggagtcacttcctccatctcctgcagaacaaggtgacacagattccctactccggccaagggcaaggaaccactctaagctcttcagtcactctaatccagaaactgtgtctttatggctcaggcaaccagttcatggcagcctagaatgacagggaaaaagctgggaagggaccttagaaaatcactcttgcccaatactccagccaaagtggtcttttaaaaaccaagttcaggctgggcgcggtggctcatgcctgtaatctcagcactttgggaggccgaggtgggtggatcatcaggtcgggagttcaagaccagcctggctaaggtggtggaaaccccgtctctgctaaaaatacaaaaattagccgggtgtggtgcacgcctgtaatcccagctactcaggaggctgaggcagaagaatcgcttgaacctgggaggcataggttgcagtgagctgagatcgcgccactgcactccagcctaggtgacagggagagactccgtctcaaaaaaaaaaaaaaaaaggtttagggccgggtgcagtggctcatgcctgtaatcccagcactttgggaggccaagccgagtggatcaactaaggtcaggagttcgataccagcctgaccaatatggcgaaaccccgtctctactaaaattacaaaaattagccaggtgtggtggcgtgggcctatagtcccggctacttgggaggctgaggcaggagaatcgcttgaacctgggaggcagaggttgcaatgagccaagatcgcaccactgcactccagcctgggtgacagagcaatactcgtctcaaaaaaaaaaaaaaaacaagttcagggctgggctcagtggctcatgcctataatcccagcactttgggaggccaagacaggcgaatcacctgagatcaggagttccagaccagcctggccaacacagtgaaaccccatctctactgaaaataaaaaaattagccgggtgtggtggtgcatgactgtattctcagctactcgggaggctgaggcaggagaatcacttgaacccaggaggcggaggttgcagtgagccgagattgcaccactgcacgccagcctgggcaacagagtgagactcttgtctcaaaaaaaaaaaaaaacaaccaccaagtttaggccaggcatggtggctcacacctgtaatcccagcattttgggaggccaaagcaggtggatcacctgaggtcaggagttcgagaccagcctggccaacatgatgcaaccccgtctctactaaaaatacaaaaaattagccaggagcagtggctcacatctgtaatcccagcacattgggacaccaaggcgggtgatcacctgaggtaatgagttcgagaccagcctgaccaacgtggtaaaaccccatctctactaaaaatacaaaattagccgggcatggtggctcatgcctgtgatgccagctacctgggaggctgaggcaggagaatcacttgaacccaggaggtggaggttgcagtgagccaagattgcaccattgcactccagcctgggcaacaagagcaaaactctgtctcaaaaaatttaataaaataaaaaccaagttcagatcttattgcatttttgtttacaaccctccaagtggtcttccactgtagttagaataaaacccagacttttttttttttttttgagatggagtcttgccctgtcgcccaggctggagtgcagtaagtgtcatttcggctcactgcaacctccgcctcccgggttcaagcggttctcctgcctcaaactcctgagtagctgggattaaaggtgcccactggccgggcacgatggctcacccctgtaatcccagcactttgggaggctgaggcgggtggatcacctgaggttgggggttcgagaccagcctgaccaacatggagaaacccgtctctactaaaaatacaaaattagccaggcttggtggcacatgcctgtaatctcagctactcaggaggctgaggcaggagaatcacttgaacctgggaggcggaggttgtgttgagccaagatcgcaccattgcactccaccctgggcaacaagagcaaaactccatctcaaaaaataaaaataaaaaaataaaggcacctgccatcacgcccagctaatttttgtatttttagtagagatggggtttcaccatgatgtccaggctggtctcgaactcctgacctcgtgatctgcccacctcagcctcccaaagtgctgggattacaggtgtgatccactgcacccagcaaaacccagacttcttaccaacctctgaggcctgtgtgatctggtcctggctgcccctccatcattctgtctctcccttactccactcaagccgcatgggttccttgctgcttctggatcctggcataacttcttcctgcccaagggcctttgtagttgctcttttctctgcctgaaatgttctgcccctagtatttcctttctgaggcctacatttggttcagcttgctggtcacctcctctgagagactttccttgaccttcagtttaaagtagccatgctatttctaaatccctctccagtcttcttgtagttttgtcatagcaacagcctctacctggaattttctttttgtttgtgtacttgtttttgtctgtctcttctattagaatataagccccatgattatagggcgtttggtttgttcatcattgtatctccagtgtctgcagctgttctttgcaggtagtaaacattcagtgaatactttttgaataaattattaaacaaatgaacaaaacctaagacatgaaaaaactgaggcccagagaagagaagctaatgagaattaatagtgttctttcatcctacttttgaatgctcattaagtgccaagcactgtattcagtgatttacatgcattatttttgccacttattcttaattgttataatgagttgtttggaacatcattttttatatataccactgtaccacttaaaagaaaactggaccaatcttattttttattggaaccttgctctgttttacaaagagttggaagcaacttaggaaaattcatacaaccaaaaggataatgtagctaagggagtcgggtgaaaggaaaatatgggtaagaagacgagccaaaagtaaaattagttcacacaaatgtatgttacaaaagtcctttgaactgagcagtttttatgccattctttataactaaatattgcccagattcatttaaaatgatggttttttaaaaatctaactacaggccgggcgtggtggctcacgcctgtaatcccagcactttgggagggcaaggtgggcagatcatgaggtcaggagatcaagaccgtcttggccaacatggtgaaaccctgtctctgctaaaatacaaaaaattagccaggtgtggtggcgcgtgcctgtaatcccagctactcaggaggctgaggcaggagaatcgcttgaacccaggaggcggaggttgcagtgagctgagatcacaccactgcactccggcctggcgacagagcaagactccgtctccaaaaaaaaaaaatctaattacatagatgaccttgggattgtcccagactgcacctaatagtctaggatttgctggctcccttcctgcctcatcagctgggctcctggattgaggcaacacgatctcctctttttgccaaaggggctggtccagcagggaggagcctagacccctctccagtcctctctggacctagctaactttgtttcaaggagtcttttctgtagaaggtttattaattgagatattgccattggaaacccagttctgctctcaagatacttccagttgaattagagagaaaagacataatatacatgaaaggagatcttgtaaaagccaacaataaatgctaaatgccaaatgagggaaggacttcacagaagaggtgaggtttacaccgagccttaccacaaagcggagaaaagaggggctgtagctcccagtaggagagtcaatgtgggttaagatttgcaggctgagaccaactctcaagaagagacccgtgggcagtggcagtcaaattttaggcatatgtggaggggtctctttcattaggtaataaagccaaaaaggtcagctagaaccaggtttgtaggatcttcaagtgccagggggaggattccaaggccctccttggcagccctggtatcccaatagataggtcgtgcccagggactaatgcccatgctggccactggttgggctgctgattcccaggtggcaatggcagcttctgaaatgggagccagagccttcaactaatagtgaggggaggagttaagtgtggggccattgtcagtttagcttttggccatcccaggtgctattcatttggcgattcggcaaatgtttattgagcaccaactatgtgccaggccctgtgctacatgctgaagatgctaagataaacaagataaggtcaaggacattgctcttgtagaactcttactttaatgggagagacagctagcccgagaaacaaacaagattatttcagggattgggttaaatgctgtacagaaaatgaaactgagtaatggaatatctaggaagcaactatatgcatgggccaactcagttactcagctttgacactgttgggtctagttggtacctttgtttccttttgtgttatagatggaggtgatctttcaaatctcctctgcagagatccaatgggataatggttgactaccatttattgagcacctagcccatgtcaggtactctacatgcattttctcatttaattccctcacctagactgtgtgctaaatggtccattagccctactttcttttccagtaaagaaactaaggtttggataagtgaagttgcatgccagggtcctgcagctttacgtggtgaatcctggatttggacctagattgggctggctctaaagccaggcttctttcccctgctccactcttggaataaatgaaggattgttggttcaggatatgcagaaagctgcttagcaaaaggagagttggagaagcatcttggtttgagggtcttgaaggacacctactgtactcccagctgagaggactctttctcctcatcttcaggaggatgcctccagagcctggggttactgtaggcctttgccagaggcatgttcggacttagccagctgagtatcccctgtttcctgcttttaccatctcagctgctggtcaggaggtttgggaaggtgacatcatctagctgaatcagctgctgcttctagatacattactggaactgaaagtcattaccccttccttcctgctctgcaagtctcttcagaatgaggctggagtatgggtgttccacctgtctgcagggtcatgactggaatggtacttgctgcttttaaagagctaaaaggtttttaaaagcttgttcatggaaaaagctttcctcaaggcttctcaagctaagggaacagagcgtccttgagaggcaggaggattcacaggaaggccctccccgactccctcttgtccacctacatttagccatatgacccttctgatctcctttgcctaagtccgaggcttaggcctagcactgtaggatgggtaaacaaaacgttatttgtggactttttgaccttaagacttttagagtctggtcaaggggacaaaaaaaaactgcttacatttcagagcagaccagccaccacactattggagatatattggagatctccccttgactcactaattgaaaagcaaaaaagggcaggtgtggtggctcatgcctgtaatctgagcactttaggaggctgaggcaggcagattgcttgagcttaggagtttgagaccagcctgggcaacatggcgaaactctgtctctacaaaaaaatacaaaaattagccgggtgtggtgtttcgcacctgtattcccagctactcgggaggctgagatgggagaaacacttgagtccaggaggtcaaggttgcagtgagccatgttcacaccactataccccagcctaggtgacaaagcgagaccgtctccaaaaaaaaaaagaaggaaaatcgactgggtccagtagctcatgcctgtaatcccaaaactttgggagtctgaggtgggaggatcacttgagcccaggaattcaacatcagcctgagcagtacagtgagacctccatctctacaaaaaatttgtcaggcatggtggcacatgccaataatcttggctactcaggaggctaaggtgggaggatcacttgagcctgggagttcatggctgcagtgagctatgaacacatctcacagaactccaacctgggcgacagagcaaaatcctgtctcagaaaaaagagtcattggagggttttgaaccaagaaatgacagtccgacatacatttttaaaggatcaccaggctgggcacgatggttcacgcctgtcatcccagcactttgggaggccgaggcaggcagatcacttgaggtcagaagtttaagactagcctggccaacatggtgaaaccccatctctactaaaaatacaaaaattagccaggcatgatggcgtgtgcctatcatcccagttactcaggaggctgaggcaggaaaactgcttgagcccgggaggtggagattgcagtgagctgagattgtgccactgcactccagcctgggcaacaaagcgagactccgtctcaaaaaaaaaaaaacagcaacagcacatgctgaggattctgttcagtggtttccacttatcagtatagcacctcattaatcctcccaacagttttatgaggtatgctctagtggtatccacattctacagagaagaaaactgagactttgagaggtaaagtcacctgttaggccgggcacagtggctcacgcctgtaatcccagcactttgggaggatgaggtgggcagatcatgaggtcaggagtttgagaccatcctggctaacacggtgaaaccccgtctctactaaaaatacaaaaaattagccgggcgtggtggcgggcacctgcagtcccagctacttgggaggctaaggcaggagaatggcatgaacccgggaggtggaggttgcagtgagtcaagatcgtgccactgcactccagcctgggtgacagagcgagactccgtctaaaaaaaaaaaaaagaaagtcacctgttaaagattacacagcaaactgccagcatccaaagcctgtcctcttccctcttccatttgaataggctccttccagccaacattcatgtatattctatccaggctccaaagtccagtaccaagccagtcttttccaggaagccttccccaagcttatctaatggcctgtccctctattgagagctgatctacagagctaccatccattgagcactccatgggtgctaagtatactgctgaatgatttaaatatgttatctcatgtaatattccaaggagccatatgccctgtgacatccattttacatgtgaaaatagtgaagctaaaatataggcacatgccatcatgcctagctaattttttttttttttttttttttgagatagagtcttgctctgttgcccaggctggagtggcttgatctcggctcactgcagcctccgcctcctggattcaagtgattctcctgcctcagcctcccgagtagctgggattacagtcacccaccaccatgcccagctaatttttgtatttttggtagagacagagtttgaccacgttggccaggctcgtctcgaactcctgacctcagatgatccacccgcctcggcttcccaaagtgctaggattacaggtgtgagccaccacacccggccgactagcttatttttaaatttttagtagagacaaggtctcactgtgttgtccagactggtctctaactcctgggctcaagcagtcctcccaccttgacgtcccaaagtgctgcgattacaggcgttagccagcagtgtctggcctctaatgacactttattcatgagaataaatgccaaaatgtatacagtgcatgggcatatgactgggagaccttggtacgccagcagtggcaaggacagtcacctagaagtaagtgccctagagtacaccgaacctgggtttcaactgcccaggcttactccttctcaaaaccagcccttttccagctttgtgtccctgtgtgtttgcatgggtgcaggcacaagtagatgacacagtggtgatgctatgcacccaggacatttcataatagggaaggacgttgaccgctgccatggggtaccaaaggtcatcagggctgtgaaagccaaggacactcaggcagccttactcccctttgagtctgagtcatttcctgagggatattggtcattcattcatttgttcattaacaagtatttattgcattcctgtcatatatcagggactgagctaaaggttggacatacagtctgaacgaaccaaagtccctattctcacccagtggacattccaaggtgggtgacagattttaagtaaattaacatgtcagggctaggcatggtggctctcgcctttaattctagcactttgggaagctgaagtgggagtattgcttgagcccaggagttcgagaccaacctgggcaacatagtgacaacccacctctaaaaaataaataacatgtgaggtagtatttagtgatatagggaaaaataaagcagagaaaagggattagggatgggaaaaggaagggtagggtagttaggaaggcctctctgataaagtgacattggatctgaatgcagtgagggcatgagctgtgcggatatatgggggaatagtgttgtaggcatagagaacagcaagccgtaaaacaaaaaaaagccagatgcagtggctcacgcctataatcccaacactttgggaggccaaggcaggaggatcacttgatgctgagagtttgagatcagccagagcgacaaagccagagtttagttgggcatagtggtgcatgtctgtagtcctagctagctactcgggacactgaggcaggaagatggcttaaatccaggagtttgaggctgcagtgagctatgatcctgtccctccactctagtctggctgacagagcaagaccttgtttcaaaaaaattaaaaaataaagcaagtacaaaaaaagactctccaacatatttaaagtacagcaagttggccagtatggccagagtagagtaagccagtggtaggaatcaggtctgagacgtcaccaggggccaggtcttgtagggccacatgggaccttgctttaagggcagtggaaaggcatggaggatttttaagcaaagaagtgacaggttttagaaggatctctctgatgtggagaacaaactctatgggtaagagcgggagcaggagaccagtgagaagccaggtgggtgataacagcagtttataccagggtggatgggtggtggaagtggcgagcagtggtcagagcttcaatacaatttgaaggttggaccaactggatttgctgatgtttgctggataagaggtgagagagaaaggagtccaggtttttggcttaagaaactggaaagtccttactgccatttaataaggggaagatgccttggctgatagtgatttcctgctagggctgtggagttgaactgcctgcattcaagtcctagtttgcttactgttttgtttttgttgttgttttgagatgaggtctcactatgttgcctgtgcttgtctcgaactcctgggctcaagtgatcctcccgcctctatcttcctgggattataggtacgccaccaggccctgcttactgtttgactttgagcaagtgtttgactttgccaagccttagtttccttcaatgtaagcctactgtctagatgataggcagttgggtgctgtgaaaactaaatgagggtaatttgtatgaagggcttaggacaatgcctggcatatggtaaaccttcagtaagagttagctctaatccttattactattgttggaagacaagaagtcccagggcctcaaggtcctctggaaagcaggcagcaggtcacactccacctccaccaccccctcaaggagcccgccctccaagaggcagctcagacaccatctgtccagcagagaaaagccacagggagacagctttcggggagcattagatagatgagcccttcccaagaaacctaatctcattctcagcaggtgctaatcccaccaccctcccttggtatctgagcccagcccacccacttccttccccacccccatcctgtgtcctagaccctcttccccttctcaccagctccaagctgccaccagcaaacttccttaccagatggaggggctctgacagaagcccaccacccatctgactgggcccagcctctcacatgtatcaggtcaccaagggctacaggtgccacctgtccagaagccccccctacaggtgccagttcctgggcgtggtgcttgatccaggctggagccagctggagccaggaactcccactgtgccccagctgctgcctgccctcccacccacaggcagagaaacaggcttaacccttcggacactgcatatgttgagttagttgttacagttctggctcagagtattgcactgtttcagtacactttttttttttaaagaaatttatcataaatacaacagagaatatctaatgcatatgtacaattttaaaaataggaaaatcatcacttgtaaactcatcacccagattaattaataatcaaacatatgtttgccttgcatgatggcttatgcctgtaatcccagcacttgggaggctgaggtaggaggaatgcttgaggccagaagtttgagactagcctgggcaacatagtgagaccaccatctctacaaaaactaaaattaaaaaatagctgggcgtggtggtgcacgcctataactccagctactcagaaggttgagtcggggatcacctgagcccaggagtttaaggctgcagtaagctatgatcgcgccactgttctccagtgtgggcaacagagggagaccttgtctctaaaaacaaacaaaaataaacgtgagtaccttagagccccctgtgtaccccctccccaatcacagctaccccaccatccatactcctgagttctgtgttttcttttgtgatatcttaccatgtcaaccaggctagagtgcagtggcatgatcatacctcacttcagcctcaaacctctgggctcaagtgatcctcctgcctcagcctgccaagtagctaattttttaattattattattattttttttagagatgggatctcactatgttgcctgggctggtctagaactcctggcttcaagcgatcctcctacctcagcttctcaaagcactgggattacaggtgtgagccaccacacctggctacctttttttttttttttttttaagttttactatatatatataggtatatattcctaaacaatataggatattcttctacatgcttttttttgtttttgtttttgttttttttttttgagacggtcccactttctcgcccaggctggagtgctatggtgcgacctcagctcactgcaacctccgcctcctgggttcaagcggttcttctgcctcagtctcccgagtagctggactacaggcgcacgccaccacacctgactaattttttttttttaagaccgagtctcactctgtcgcccaggctgtagtgcagtgtggtgcgatcttggcttactgcaacctctgccacccgggttaaagtgattctcttgcctcagactccctagtagatgggattacaggcacctgccactgcgcctggctaatttttgtagttttagtagagatggggtttcaccatcttggccaggctggtcttgaactcctgacctcgtgatccaccagcctcggcctcccaaagtgctgagattacagctgtgagccacggcgcccagccctaagttttgtattattagtagagatggggtttcaccacattggccaggctggtctcaaactcctgacctcgtgatctgcctgcctcagcctcccaaagtgctgggattacaggcgtgagccactgcgcccagcctgtgcattcttttaaacttcatttaggtattatgctgtgtttatcatctgcagtttccttttttcattcaaggttgagatccatccatgttacttgcatagcataatttgttcattttcgtatccatttatatgatcatgtctcaagctgtgtatccattctgctgtcagtggttatttgggttgtccccttgtttttgctgtttcagacaatgctgttatgaaaactgtttgtgtctcctgcacatgcacatgttcaagagtttctcccaggcagtggttcccaaactttagctgcccatcagaatcacctggaaggtttgttaaacctcagattgctgggctccacccccaaagtgtttgattgtgtatgtcagggttggggccctcagaatttgcacttctaacaacttctcagctgatgctgccactcttggtcctgggacctcactgagaatcattgttgtagggtttacacagaagtggaattgcttgatcagaaggtaatggcagattgttttcctgtgtttgtgtgaatttacacagccaccaacagcatatgggttttccattactttacctctttgttaatacttgatatggtcagacttaaatttttatggagctggtgggtgtgagatggtatcttgcggttttaatttgcatttctcagattacaagtggggctgtgaatcttttcttacatctgttggccattcatgtttcctctttgtaaaatgttcaagtccttgctccatttccttttgatttgactttttcttatgggtttgtaggcttttaaaatgtattttgaatactaatactttgtctatgcatgttacaaatatagtctttcagttcttctgcctcagcctcttgagtagctgggattaatttgttcgccgggcgccaccacacccagcctgtttattttattttattttattttattttattttattttattttattttttattttgagatagagtctcgctctgtcgcccaggctggagtacagtggcacggtcttggctcattgcaacctccgcctcccaggttcaaatgattctcctgcctcagcctttcaagaagctggaattacaggcatgcactaccacacccagctaatttttgtatttttagtagagacggagtttcaacatgttggccaggctggtctccaactcctgacctcaagtgagcctccatgcctggcctccatagggtgttaaaggctgtaaatttgaattatttatgacttaagttatacctagagcttattgtatatactgtattaatatttcttttttttttttttttttttttttttttttttttttgagacagagtctcgccctgttgcccaggctggagtgcaatggcatgatctcggctcactgcaacctctgcctcccgggttcaagcgattctcctgcctcagcctcccaagttagctgggattacaggcatatgtcaccatgcctggctaattttttttatatttttagtagagacggggtttcaccatgttggccaggctggtctcaaatgcctgacctcaggtgagccacccacctcggcctcccaaagtgctgggattacaggcctgagccaccgtgcctggcctactgtattaatatctcataatgaacaaaggtaccctctttgggaaaaagttggggctttttttccttttttcttttttaacttttcaattgattctcaaagccagcatgtgggagagagtttatcaaaacagccaggcatcatggcgcacgcctgtaatcccagctccttgggaagctgagacatgagaattgcttgaacccaggagacggaggttgcagtgagctgagatcatgccattgcattccagcctgggcaacagagtgagactctgtctgcaaaaaaaaaaaaaatacatactgacctgtgtgtgggatttgcttcaaaatactactggagtgagagatagtggttggggaacagatgaaatcagattggcaccaagttggtacttgttgaagttgaatgatgggttcgttttattctgtctacttttgtacatgattaaatattatcataagaataagtttaaaattggccaggtgcagtgactcacacctgtaatcccagcagtttgggaggctgaggtggaaggatggcttgagcccaggagttggagaccagcctggacaacatagtgagaccctgtgtctctcaaaaaaaaaaaattagtcatttgcagtggtacacacctgtagtcctagcttcctagctacttgggaagctaaaataggagaatctcttcagtccgggaggttgaagctgcactgagtcatgattatgccactgcactccagcctggatgagagtgagaccctgtcacagggggaaaaaaaaagttaaaaatatccaaggactatttccagggctacttgtgaggtagcacatcttttctttttttcttttttgagacagagtttcgctcttgttgcccaggctggagtgcaatagcgcgatctccagctcaccgcaacctccgcctcctgggttcaagcaattctcctgcctcagcctcccgagcagctgggattacaggcatgtgccaccacacccagctaattttttgtatttttagcagagacaggatttctccatgttggtcagggtggtcttgaactcccaacctcaagtgatccgcccgcctcagcctcccaaagtgctgggattacaggcgtgcgccaccgcgcctggcagaacatcttttcttaacgttttgttagccatttgtattcttcagagccaatttagtctccatctactttcaggagttcctgataaagtggtcttagcaggcatggaagagactgattttaaagaaaacaggagagggagtggtaaggaaagactggggaggggattttcaggcggttgccagcccttctcctagagcctgactactactgcctctaggattaagtttcctaccttcccttgtttcttccaggaccaccatgggataatttttattttctttctttctttttttttttcttttttttgtagagacgggatctcactatgtctcccaggctggtttcgaactcctggtctcaagcaatccacccgcctcagcctcctgaagtgttagtaggattacaggcataagccactgcacccagctgtctttcttccttccctcccctcccctgccctccccctccccttccctccctttcccttcccctttcttcctttccttttcttctttaattatagagacagggtcttgccacgttgcccaggctagtcctgaactcctggcctcaagcagtcctcctgcctcggcttcccaaagtgctgagattacaggcatgagccactgtgtccagccaatttttattttaatggtattcttctttccctattattttacctggacagacttaacccagaggatagaggaacctcatcatggatcctggtccgcttttagcttaacagcatccaaagacaaagggtcagagatggtagcaaccctagtgtggttgattacacagtagtggtgttattttgttgtcataggatgcaaatatcaaagttgtatctcttaagatctttctgtgtcagtacataaaagctttctcagtctttttaatgctgcatagtattctacacagggcactattctatactttaaccagttcccattggtagacacatttttttccagtcttttgcagttataatagtgacactcaatgaatagccctgtatatttgtcatttggcccatatatgaatacagtatatctgggggggatgaatccctaaaagtggaattactggggccaagggtatgtgtacttgggattttaatagggttagttagcctgggcccacagcagtgggtaccagtttacaggagaatcttttttcttaacacccttccacccaagtggagagtttggttcagcacatttctttttctttttctttcttttcttttcttttctttttcttttctttcttttttttttttttttggagacagagtcttgctctgtcacccaggctggaatgcagtggcacgatcttggctcactgcaacctccacctcctgggtttaagcagttcttctgcctcagcctcccaagtagctgggactacaggtgcccaccaccttgctgggctaatttttgtatttttagtagagacagggttttgctatgttcgccaggctggtctcaaactccagacttcaggtgatccacccacctcagcctatcaaattgctgggatttacaggtgtgagccaccgcgccggccatcagcacatttcttgagtgccttcctgtacctggccctggatataagataaacactttcatgtatcaagtgaaattgttactatttgccaggcaccagcacattatctgataatcctcataactactcaaagaggaaggcttttagatgagataagtgaagctcagaagggttaaatagggtgccatggtcatggtccagctattaagtggcagagctaggattaagcccaggtttcaatcctctgatgcctgtgctcttacagtacacctttacctgcctctcaggaggaagaacatatggtcttattgtctaatacagataaggaatcaggctcagagagggtaactggccacaaaacagccagcctggaagctatgaggaacccacatatgtctgatcagaggtctctggtctacactgagctgcctgcctccctcccggggaaagagtttgagaattttcttttttttttttttttttttgagacagagtctctttctgtcgccaagctggaggagtggagtggcaatcttggctcactgcaacctccgactcccgggttcaagcgattctcctgcctcagcctcctgagtagctgggattacaggcgcgtgccaccacacccggctatttttttttgtatttttagtagagaaggggtttcaccgtgtttgccagaatggtctcgatctcctgacctcgttatcctcctgcgttatcctccttcctttgggaggccgacgcctcccaaagtgctgggattacaggcgtgagccaccgcgcccgaccgagaattttctccgttcagagcttcacttgctatagagagcctcaagtcactggttctcagtgtgcatctattggccatcagagggtcctttagggatgacccatctgtgcttaatttactaatgacagtatagttgctgctatttattgagtgcctgccatgtgcaagatgctgtaaggtacagtgtagtttgttttgttttgttttgtttttgtagagatggaggtcttgttgtcttgaccaggttggtctcaaactcctgacttcatatgatcctccctcctggacctcccaaagttctgggattacaggtgtgagccaccagactcggccagtgtagtatttttaatcttcacaataatccttcttgggaaacatgttattgtcctcattgtccagattagaaaactgagtgtaaagtaagttaaattatagtcctaaggttgaatgctaataaagacagaatacaagtccaatatattggactcaaaagccctcacttaactatggtctccatgggcttcccttggctctctctgcctttttttattttttcttattgcttgaggccctttctggaaggtaagtctggattatctacttcacactgttttagagaagacttgtggtttccatttaccccttactccctccgctccatggcctttcagggagaacactgtgggtatcatgctgggtggcctggagggtccaagtaacaggaatctagaaggatggaccagatgtgaacaaaagaaagcctgagtaggacacaaaacagagaagtggggctgtaacatctctaagatattacagcttgctacttccactctctttgcaaatgtggtgaaacccaggctggagtcataaaataatagcataggatcattaactaaagtttgtctagtgcttccttgtgttcacacattatctcattgaacctctgacgatgctaggaggaggtaaatagggttttcctcttaccttgggtgaactgaggtcttctgactaagtctcaggtcctttctaccatttgtgctgcatccacatctctactgggaagaacacaggctctgcagtcagacacacctgggtttgaaccacctccattttgtgtgtgttggatcttgagcaagtgaattcacctttgtgaccatccatgtcttcataaaataagaattttaaacacacatgagggcctggcatatacaaaacattgaataaatagcagtgatctttttattgacatcagaagggggttggggacccagaggctatttgggctcctatggcatagctcttggaacgtgttaattttcaaggacaggggtttgcaagtcagagcaatgtcaagtaaagaacaggttctttgggaggccaggatatgctaatgggtgaacaatgtaagggaggcataataataatgccaaaggcctcctagagtacctgttcactgcacttttgggtctttggtttatatatgaagaaaatgaggtgcccccagaggggaagtgggttgccattgttacacagtaagttaataaatggcattgctgagattagaactcagtcttttgtctgccaagaaagcttacttttcccttacactccactgctcccttgaggggaaaaaaaaagggcccggagataggatcttagtgctttggaactggagagaaagccttagagatcatctgatccatcctccacacttttcagatgagaaaagtgaggcccgtggtgcttaattgacaggaccatagccaaatagagccaccacaaagcaggagtaagctcacgtttcttgaacctgaccatgtggaactttcaaattgccttttttctgtgcggaactagagcctcactgaaaataccagtggtttacaataagaacagctgtttagtttggggaacatttttccaaatagaatcttctttttctctctttctcaattctttttttttttttgagatggagtcttgctctgtcactcaggctggagtgcagtggcacgatctcagctcactgcaagctccgcctcctgggttcacgccattctcctgcctaagcctcccgagtaggtgggactacagacacccgccaccacgcctggctaattttttgtatttttagtagacggggtttcaccgtgttagccaggatggtcttgatctcctgacttcgtgatccacccacctcggcttcccaaagtgctgggattacaggcgtgagccaccacgcctggctgtctttctcaattcttaataaaaatatactagaagaagaaaaagctttaatggaggaccttggtagaaagcaggtaaaaattatatagagtctctaaaatctagggaggtccccagagccagtaaatttagaggccagccttctcgcctatcccagcaagcttatcacttgtcttgccctattcacaacaggccttcagaaggcccagccttcccttggcagctgcatgtggtgaacaccaacggaaatccctggtatttttctttgtatgcaaccaaccgtggagatgtaggtcaggcattgctggcttggcagttacaacatctctagcttcacccctgcacctgtagccgtgttcactaagcccctcaaagatgggaaatggatggtcccttcttaatagggtttggatccccgagggctcatatgggtggagtgggtttgggaggagacagaccatccggaatgtggagatgagaagggtagatctggctcttccctccttaatgtctgatgtctggtgttactatagctggattggtggtgcttctgctcagctcaccttagagtaatcatcactgacggaggagactggggaggtcccatccttcccctgggctcagctgggtccccagacctacacctgaaccccacgcctgtctggtgtttacggattgaagctgccaccctttgggacctatcctgttttcatttctgctctcagctctctggtctctgtggacctcacttacaggtttgtacgtgcctgtcacccacggtgcagccccatgaggctctcccagcctggcacactcatgcctctttggcctttgttctcttcaggaaaactgctagctctatgccttgctagggagggcttttctggcccctcagataggttcttttggtccaacctagctatacctttcctgagattcagtctctttgtccacaccctgggggacagggctgtggttccaaggcatgttggggggtacctgtgggccattctggactggcttccggtcagctggctgactctgccctgggtctcaaatatctcctctgtaaaggtgttagaccaggatcttcaaggtaacttagaggtgatatgcagatggacattttctgttttaatagtcagtgtattttatgttgatttccatctggggcaaatgatactctttataggaagaataataagttgccttttcattgcatttatttatttagcaaatatttgctaagtgtctactatctgtcaaccactattctagctactggggatacctgccttcatgaagttcacattcttttttttttttttttttttttttttttttttttgaaaaggagtttcactcttgttgcccaggctggagtgcagtggcgcagcctcggctcactgcaacctctgactcccgggttcaagcgattcttttgcctcagcctcttgagtagctgggattacaggtgcccgccaccacacccagctaatttttgtatttttagtagagacggggtttcactgtgttggccaggctggtcttgaactcctgatctcaggtgatccacctgcctcgttctcccagagtgctgggattacaggcgtgagccactgcgccgggccatcatgaagtttacattctaagaggacagagagtgattaggtggccggtggtaggcagcttttggtatgtgtttgcctttttaataaaggataattaaggaaggcctctgaggagcaggcatatgagcagagatctgcatgatctgtctgagggaggaaaccatgtaacagtctatggaaaaaacattccagacataaggaacaagtgcagaggccaaagggtgggaatggtgtgcctggcatgtttgaggaagagcacgggagatcagtgtggctagaacagagtaagcagaggagaagtgattggaaaggaaagtttgtgtgagcagtggtgagacattttggttcttcctctgggtgagatgggaaggcagtggagggttttgagcagacaggaaactgactttgctgacccctctggctgccatgtggtgaaggaaccatggagtcgataagaagctgggagaccagtaaggaggctgttaggacaatacaggcaagaaatgatactggcttggaccaaataatagcagtggaggtggtgggaaatggtgggactctagataaatttggaatacagattcatcaggatatattgacagatgagtgttagaggggatttaaggatgagaaagatgcagaaagaacaggtttagggaataaattgagaattttcagtacatgtatttaaatttataaaaagtaagtaaattgatagaataatgttaagtaggccaggcacagtggctcacagctataatcccagcactttggggggccaaggcgagagaatagcttgagctcagtagttcaggaccagactgggcaacatagtgagaccttatctctacaaaaaaagaaaaagaaaaaaaaattagccaggcatggtgatgcacacctgtagtcccacctagtcgggaggctgaggcaggaggattgcttgagcctgggaggttgaggcctcagtgagccttgatcacacgattgcactctagcctgggcaacagagtgagaccctgtcttgaaaagaaaaatgttaagtaaataataacagaatcacatataaggtcaaagcagtgatggctgaaattgtggatagagtggaccaaatgtgtctgtgctgccttccagctctaaaatcctgcttcagtgattcagaccacatagtctcccattcacagagaacaagaacttgaagctcagcctagaataagcagataaagtgacaggagagcaatcctttggaccaggcctacctcctgttaatttggaaggacttgggaagttcttgcacatatactggccttctggcattaccttatttatttattcattcattcactcagtcagtcagtcagtcactgagcaccttctgcctagtaggccctggacaacggcagctctgatgcttcttctctcctaatataaagcaagctaccctgacccccgctcccactggagcctgtctactctgtggcctggcatatgcctggcggtaatgtgtgtgctgaaagtggaatagccacagcctaggcagagccctgccctccctttgctgcactgtctctgtccatctctgccttcctcatcttattgccatccacactttgaggcctggtgagcaaatgattttgcttccatgagagcagcagaaatagttgctttatctctttcttcatataggtcctcatagttatcaaactggaaagaaatccccaagggcctcttctctcgccttttatagatgggaaacagagggccaagagggcaggcaactcccacagtccacatctaattcatcagcaaatcctttcagctctacttttattgattgattgattgattaagaacagtatcttgctgtgtcttccaggctgaagtgcagtggcgcagtcatggctcactgcagcctcagcctcctgggctccagcagtcctcccacctcagcctccggaatagctggaacatgccatcacgcctggctactttgtgtcatttttttgtaaaaataggattttcccatgttgcccagactggtctgaaacttttggactcaagcagtcctctcacctcggcctcccaagtgctgggattgtagacatgagccgctacacctggcccagccttactttaaaaaataaattctgaaactgactgcttctcaccaacttccctggcaccattgtggctaagccactgtcatattttcctgattatctcaccagacccctggagatctccacccagcagccagacggacgctatttaacaccaaggtcaggtcatgtccttcccctgctcaaaaccctacagtgctttcccaggacaagcccaagtctttaaatggcctaccaggccccacacaatcgggcccttggctacctccagatctcatcaccaccagtctcctcacattcactggacttcagccacactggcatttttcctgttcctggagcacctcaagcgtgttcctgcctctgggcctttgcacttgttcccacagccttttctcagatctttgcagtgcctgtttcctcatttcattcaggtctctgatcaaattcacctccttaagaagttgtccctgaccatggattctaatcttaccttcttccatgtttctctgtaccccctttctcacatttattctttcttaatgcatcaccgtctgacatgtttattgcctgtctcttcccatttgattataaactcatacaggtacgaattttcattctatttagtcactgctttatccccagcgcttagtacagtgcctgactcttagtgggcacttaatgaagatttgttgaatgactgagtgtccaaagctagggaaggcagcctgtctgggccttcctacaactccataggtcagcctggcttacaaataggtcatgtcccatcttagaaaactcatctaatagcttcaccaaagctacgtggcatcacttttgtttccaagataaagatcagacagagggaggaactctctctgcaagtactgtccttgcagatctggcttaggggaaagtgggttcatcactgagtagcctcagcacactcttccctttctcacccctcaaggcacccagggaaccaggggggaatgctacttccatgtacttaaagtcatctctgacttcgaaggcctaagaatagcagattctcagtaaatattgggtaggtgaaagggtgaaggaaagaaggtcttagtaaaatctcttcatgtatcctgttgcactggtaaatttaacatgctgtgaagttgaatgccctcactagtaaccaggggcctcaggcaaagtctcatcacttcgctgaattttagtttcctcattggtaaaatgggaacagcacctacttgcaagattttgagaattcaaacagtaaatattagttcagcaaatactagctgttactttttgtttgtttatagctacaaataagagagacactatgagaagcacaaatggagccactgattttttagctataaaaaaacaggctgggtgcagtggctcatgcctataatcccagcactttgggaggctgaggcaggcagatcacttgaggccaggagtacgagaccagcctggccaacatagcgaaaccccatttccactaaaaatacaaaaattagcctgcaaaaatacaaaaattagtgtggtggcacatgcctataatcccagctactcaggaggctgaggcacaagaatcgcttgaacccaggaggcagaggttgcagtgagcagagatcacaccactgcactccagcctgggcgacagagacagagtgagacttcgtctcaattaataacgataataataacaacagcagcagcagcagctaacatttacagaacgcttaccatggaccattgaactctgctgctaggcctgtgaagtaagtacagctgttttcattttgcagccggaacaccaggcttggagggggaaagtgtcttgctccaggtcctgcaaccaggtagtcacagaactagggttggaagccacactgtctcactccagggtagggaggcctgagaccaggctgtgctctgtccctgtatgaagccttggaggtatcccttcacttcctctgggcctcagtttcttacctgctcaggatcgaaccacacatctctgtgacgctctgaaatttctggtggtccacaggccacatcaagtgggacagtgagttgcttccaggcctcctggtggtggtgctctgggtattgactgtgaacagcacacctctgggtgccccctccctcgacatcaggcaaagtaccctagccctcttctcaccatctcaggcatcttactgttctgcaccttaaaggggtaatggactggggcagaaatgaatagggtagaaaacaagaaggaacccactcccttgtctggtgcagatcaatgttggatgctgcagagaagagtatgaggctgacagtcagtggatgtgggttttgtttcccagttccatcacatcacagaatagaaggaaatgcaacaccgtgggtgccttcagccctgagtttttggttacatggggtgtgagcattcatctgtacagtggggagagaagggtgttgcagggatttgctcccttccccaaatcctccagagctgttgccttctgctgtggaattccaaacatttctgatcagataaaggtggctgaaaatacttgggacttgtctggactagttggaggcggtgctggggtgaagaggtcgaggccacaggagctagagcgtggaaagatctagccttgcccaggagtctgcctggtcatagatgtgcctattgctctcttcccctggaatcctgcaggttcagagcaatgcccagcgggctttgaggtggagaaggatcagactcctttgtggcaacaagttctcctacttcagaatgttgcttctcaatttacacactaattactggatcttttggatacccctgagagagagaaccctggtagtcactcatctgtctgcatgagttactttcattctccttatgctgtagccctagacggagccctttgagatgattcccacttcatttgacagttggggaaaggcccatactttcccagagtctcaggcaggggaaaggactcacctgcaaatcagcgatggaactgggaaacaaaatccacatccactgactgtcagcccagtactctcttccccacagcatccagcactgatctgcatcagacaagggagtcgccatagctttgggtggagaggaggaaggagaagctgctttggactatggagcacttggggtcaaagacctcagaaagaagtcctagtttttggagattgctaccccattcctgcctgttgcctcagcacagtgcaaaagatgccttttctagaactttcccataagcttcctgtcccctttccttatcctgagagaaagtgtctggagaatactggacaccttgcataatcacctgctatattggggcctctttctagttttgccaggcagtgaggaaagggatgaagagagtgggaactggcctttcttctcttccctcctctctgtccaacactcagccagactcttcagcaccttctctggacccagcactgggcaaggcctaggggacagagcccatggtcagatgggggaagaagtgagcagctaggctccttgagaaagtgacctgtggattaagacctcagagataagtgggacagagcttggtagaagcaccagtgtgggcaaaggtcctgagtctgaacagaacatggcatgtgaggaatgaagcagcctggccctaggtgaagctgagaaaaccctgcaggcccttgtaagccatagagaaggctccgagacacaagctgagccatggtctactagtaagaacaataaaccagacatttactcaaagttaactatgtgccatgcacaattctaagacctttacatgtattaatttgaatcctcatggtattcttttgaaataaggacattttgggccagatgcagtggctgacgcctgtaatctcagcactttggggggccgaggtgggtggatcatttgaggtcaggagtttgagaccagcctgaccaacatggtgaaatccagtctctactaaaaatacaaaaaaattagccaggcatggtggtgcatgcctgtagtcccaattacttgggaggctgaggcagaagaatcacttgaacgtgggaggcagaggttgcagtgagccaagattgtgccactgcactccagcctgggcgacagagtgagactctgtctcaaaaaaaaaaaaaaaaattaaataaggatttttttaatccgcattttacagatgaggtcaaaagcaaaatatcttaatctagtttgcaagacttattggttctctgcctgctctgtgctctggcagcccagcttggtagagaagtagaaattaattgcctttatccagatagcacttccatttcacaaatgagacaactgatacttggaggagagcaggagagcagcagcggagagagagcagaactaagaccagccagtcaagggagacagagggagacgagcatcagctccctgacagggaagagttttccaacggggctgtccgaagatgaaatgtcccacccaggaaggagggagctctccataagtgcataaggagagaatgccctcgagatgactaccaactcccatgggtgtggaccatcagaatgaaacagacccactgtgggacttcagcactccacccttctgaaccctgtctgtgaaatgggggtgttcgtggtgagcttgagtattacatggaaggttggatgggcatgctgtaaggtccctggagtctccgactctgttccaagggtgagtattggtttttctcaccctggacactgggagaagaatggagggctgtggccatctacttacgaaagaatagggagtcaccagggttgaaatgagagagttgagatgacgggaggcatcggaatcccaggggatgagcctatatgagcacatagcagccacccaggaacagttaaatgtttggactctggagacagactgcctgtattcaaatcccaactctaccacttgtggcctctgtgaccttgggagggtgatttatcctctctgcctctgtttcctcatctgtaagctggagagtaataacagcatgtactcggtgggattattgtgaggattaagcaaattctttacacacgaagcacttagcaccatgcctggtacttagtaaacatcagctgttttatctccatcggttccagggaaggaggttatgagcccccaaatgagcatctctgcccccagtaaatgcttttctgaattctctctctttgcccccaagcccatcaccctggttctgagccagagagatggagagcccacactcgcactgctaggcctgatagctttctcgattccccagcggaggtgttatctcctcccggcacaaccgcttccttttctgagaaatgcaagtgcatctgtcaggcacagcttcttagaactaatggtgggggaggaggtggaggaggagaggctggcagctgaattgaacaggtcagagttggaggaagataaacatgaagtttgttgtgaggataccaccaaatattccctatagcccagatggcttgagccctctatgacaccccctgatctcaccactactgctagggaggtcaaggcaggagaaactgaggctcagaagccaaaaggcttgctgtggcacccacccatacctgggccggctggactgaggtgttgaccccaacacagtcttgccacccctctctttgccctgcctccactgagctgcttctccaagttgcccacctccaggcctatgtttccgtgggggagaggagaaaggccatgttcttctcacatctcgggagccaacagctcccctgggaaaaccagaggaagtggattccaaccacaaacctcacttcttccgagtctccgcctgcaactccctgccaaaagagtgataaggcctctccgtttgccctacccccttcctaccatctcccagcgatcttctagcaaggccatgtttgtctattcagcacacatttatcagcctctccctcagggaaactgaggccaggagcataaggtgactctgcaggtgactcacagcctgccaatgcagggatgtgagaaggacagaacaaggtacagttctggtgtccctggcacttttcctggctgctagtagcctcttcctcttctccacctacctctttcctgaaataaccaagcaggaaggaagcaatgggcctgggccctccagagtcacccaagaggaaggaagggttcgtctggcacaggcatgcttgttcctcactgaagccaggacggaagggtttcactttccctcctggtcttcgtcacatccttttcctgtggcaccagttcccctcagctggcaggagccagtgcttattcattcagctgatggcctcaggctactttaccctccttgacagacccagggccatggccctggctcagaatatggggtttgctgccaaacatactggggcttaaaaatggcttccctttttttttttttttttttgagacggggtctcattctgtcgccctggctggagtgcagtggtgctgtcacagctcactgcagtttcaacctcccagcctcaagcaattctcccacttcagtctcctgagtagctgggactataggtgcatgccaacacactcagctaaatttctaagatttttcttatagagatgggggtcccaccatattgccctggctggtctcgaactcctgagctcaaacagtctgcccaccttgaactctcaaagatgctgggattacaggtgtgagccatcacagctagctgccacttatccactttagctaggtctcagtatctctgagcctcaggttacctggacttagaatgaaggccttcctcagccacagaagtacatggacctggcccatgattgtcctttagaaactgagcagagtactgcatcaacgttaggagtaaaggcactgaaccagattgctggtgtaggcatcccagttaggtcaccagctcactacatggccttgagcaattcacagatcatctgtgggccacatatccatcagctatatgggttaatggtagtacccactgacagagtgtagagacaactaatgaactaatctacaaaaaaaccaagaagagtaccttacagagtatgtgctcaggaagtgtgcgctgctgctgaagtcactaaggaagtcaggttttctgtgggtagagatagcagggtctaagatggcaagattggacatcagaatgagtgtgaatgaagtactatcttggatagattaaaagaaaaagaatggtgtgaggccagaactcagacagatcctactcttgccacttcctagatagggatcttgggtaaattctggagcctccattttcacatatgtaaaatggggctattgataaatgttatgaggatcaaatgaaagcattcatttgttcttctaaaatagatttatttagaatggcatctgctgtgttccaagtatagcacaccaggttctagagatacaggtgacagagccacacacagtcaagtgggggagacaggacaaaaaataatctctcaagtgaatatgatgattgtacatgtaattgggaaatatggcctagtgtgcatagactgctttatagctcagtgcccagcacaggtgaaacactgaaatgtttggtaatggtcagctgtcataataatagttttttgtttctttgcttttatcttttgtttttttgagacagggtctcactctgttgcccaggctggagtacagtggccccaaacatgattcaatgcagccctgacctcccaggctcaaagatcctcctcagcatcctgagttgctgagaccatagatgcataccaccacacccagctaattttttttttttttttaatttttttgtagagacagggtcctcctgtgttgcccaggctggtctcagactcctgggctcaagcaatcctcctgcctcagctcctaaagtattttattactgttaacaagtaagggctgggtgcggtggctcatgtctttaatcctagcactttgggaggccaaggaaggtggatcacctgaggtcaggagttccagaccagcctggccaacatagtggaaccccacctctactaaaattacaaaaaattagccaggtgtggtggcgggtgcctgtaatcccaggcaacttgggagactaaggcagaagaattgcttgaacctgggaggctgaggttgcagtgagccaagatcatgccactgcactccagcctgggcaacagagtgagaggctatctcaaaaaaaaaaaaaaaaaaaaagcaaggacaccatggaccagagaggtgaagtaacctgctcaaagtcacactacttggaagaagtgggaagggtgggcacagttgctcatgcctataatcccagtactttggaagaccaaggtaggaggatgaggccaggagtttgaaaccaccctgggcaatgtagtgagactccatctctccaaaaatttacaagaaaaaaaaaaagaaggaaatgtgggcagtgaagccaggatgggaactaaaagatcagattcaagtagggactatacttcagcctctggctggtcctctggcacttgggcccctttcctcagggcatcatgccaaccttttcacctgacttctacagggtcacaggcacctacaaggtgacctgcatcgttcagttggctgcctctgggcagagatctagctgaagtcagtctgtgcctgtctgagtaggtcctgggccagacttggtccctgcctgcactgagcccccagactgttgggggaaaccaggcacacagaggccatcaacccaggaacacccctcctctccctcccacctcagggcctttgcacttattacctctgctaaaacaggcttttttttttttttgagacagggttttgctcttgttgcccagactggagtacaataatgtgatcttggctcactgcaacctccatctcctgggttcaagcagtcctcctgcctcagcctcccaggtagctgggattacagatgcctgccaccacacccagctaattttgtatttttggtagagacagggtttcaccatgttggtcaggctggtcttgaactcctgacctcaggtgatctgcctgcctcggcctcccaaagtgctgggattacaggtatgagtcattgtgcccggctcccccagatattctctgtcacctccccaggacttaaaaccctatcatctctaaaattatcttttttttttcttgttatcctctctgcttcccagtaagacagggtttctcaaccttttttttttatcatccacccctgcaaggagtctttttcagatttttttgtcctaattgccctcccatgaaatttgaatacctcagctatactatactatatatagtatatatagatatagatatgtataatatataatatatagtatatgtaaagtatatatatagtatatacagtactatatatactacatattgtgtgtatatatatggtatatatagtatagtatagctgaggtattcaaatttcatgggagggcaatacctatatactatatatactatatactctatatctccttatgtgctgtggccctgtggagagccacaaatcactgtaatgtctaagaatgcttcacttcacgccattggaggtgatcttaccaccattgagaatggactagaacataagctccatggaagccttgctcacggctgagtctccaatgccagcctcagtgcatacccctggtataaacagaagtccaaggagtctgggaacagaaaggagacattcatcccagaggttggggagggatgagcagggaagaggggactccaaaatggagtcctataggcttagtaggggttggttaactgaggaagatatggagtgaccagttaaaggacagtgttggcaaaggcaccagggcctgaagcactcaggagtatgtagtgtggggccattccaagtgggtggccaggactgttgaagcctcttgaagtattggaagaaggaccttgaaagtgatactagcctgggcatctcctaggggccaagtcaggagacccagttttctagtgtaggctctactacaaaccagcagtggaaacgtagaatgggcaggtgggttggccttgctgacttcatgggcctacctggctaggaatccatgactctcctgtggaggtcattagccattgcctgtcgccagtggccctacaaacccccacatggaagtcagctaccccactttcctcttaactcaagcagaggatgcagacaggcccttgggcctgggtctcctagaaacctttgtgacatcagagacctccctacaacccactcttaaacctcatcccctgcctaccatgccagcctggttaaaaccagtgggagccacccaaggtgcagtaggggcttatctctgcttttccagaccagggctgctctgcaatcctgtttatttatccagagcagccgcctgctgagaaaatggctctgtttatttccaagtgtgtcgtgtgaaccatgggctaaatatacccacgccaccgcctctccagcacccgccctggaacagcacgccccattttgctcatgctgtctccgcaaaagcaatccttagaatccacaccccttggaaatactactccccttccccaggaaaagaagctgaaatggaaatgaaggttgtcatgaccaggaacacatgagtggaagctggggcaggtgaaatgagaatgtttctatggcactgaaatgagaatgttccctccacccaggaatgactgtttctggacagtgaatgctttgtgcccttgtggggacagcgcctgtttactccaacccagccccagagctgaaaatttcctgtggctgccagccgtctacttcaggaaagttcccatcaagggagccaggcctctcccattttggctgcaaccccagtgtccctggtttcttgagagacatttggcctcttgggataaccagggccttctcctatgctcttcatagtgtggaactctcccccatcacagataagcctattttgtgactccacctgggtgtacttgggagcaacaaaatcaaacctcctgtaagaatatttttgtctgccaagacccgcagaggctagctaggatggagagggagacagggaagcatagccacggccctagtgccctcctttccccagatcctccacctcaaccctgctcccacattccttctcctggaaatccatcctttcagcactactgacaggacaggtccctccagcctccaacttcagggaagtgtcctgacatagcagccctccctttgaagctaggcagtcttgcagtttgatcccgactctgctatctgtttgctgagtgttccctgctttaaatatcaggcatcttatttgtgaaatgtggctcaaatctacatctcaggattctgatgaagatgaaatgggataccaatgcctgacatgtagtagacatgcaatacatttgttaactcatgtattctcatgtatttacagagcaagacactgttctgagcactgggtgtataggaacgagacaggacctctgccctcatcaagacacatctagtataggccgagggcagtggctcacgcctataatcccagcactttggggctgaagagggcagatcacttgaggtcaggagtttgagaccagcctggttaacatggtgaaaccccatctctactaaaaatacaaaaattagctaggcgtggtggcaggcgctactcggggggctgaggcaggagaatggcttgaacccgggaggcggaggttgcagtgagccaagattgcaccactgcactccagcctaggtgacagagcaagtcttcgtctaaaaaaaaaaaaagacacatctagtatggaagacacatcacaacaaaaacaaagtacagaatctagttatgagaagtacagcttaatgggggaaaaatgtggtgaggtggtgaggccgggcatggtggctcacgcctgtaatctcagcacttgggaggctgaggcagaaggatcccttgagcccaggagtttgagaccagcctaggcaacaaagtgagaccctgtctctacaaaaaatttagaaatattagccaggcatggtggtgtgtgcctgtagtgtggcagctactcaggaggctggggcaggaggatcatctgagcccaggaggtcaaggctgcagtgagccatgattgcgccactacagtctaacctgagtaacagagtgagacactgtcacaaaaatttaaaaattaaaaaataaagcactgagaagaaaagctggcatggtggtcattctgtgtagtgtagttcctgtaatcaggaggctgaggcaggaagattgcttgagtccaggagttcaaagtcagtctgggcacatcttttaaaaacaagaaaaaaaaaatggtggctgggcatggtggctcatgcctgtaatcccagcactttgggaggccgaggtgagcagatcacctgaggtcaggagtttgaaaccagcctgacccaacgtggagaaaccccgtctctactaaaaatacaaaattagccaggtgtggtggcacgcgcctgtaatcccagctacttgggaggctgaggcaggagaatcgcttgaacctgggaggcggaggttgcagtgagctgagatcgcgccattgtactccagcctgggcaacaagggtaaaactctgtctccaaaaaaaaaaaaaaaaaggccagatatggtggctcgtgcctgtaatcccagcactttgggaggccgtgggcggatcacttgaggtcaggagtttgagaccagcctggccaatatggcaaaaccttatctctactaaaaatataaaaattagctgggcatggtggcacatgtctgtaatcccagctactcaggagaatcgcttgtacccaggaagcaaaggttgctgtgagcccagtttgtgccactgcactccagcctgggggacagaataaaactgtgtctcaaaaaaaaaaaaaactgagaagaaaaatcaaggaaggtaaggggacaggcagagagagacgggggtggtgtactgttttagacaaggcagtcagggaaggcctcccctaggaggtgacatttgaggggagtcatggttgtgaaatgagggagtgaggcaggcgacgacctggggtcaggtgctccaggcaagcaggaacagcagactcctgcggcaggagacgttggaggaacagcaaggaggccagtgggactggagtgaagttcaggggacaggggtggggaggaggccagaaagtgttggagccagatcccactagaccttgctggccagagtaaggagtggggactttatttcaggtgtgatggaagccctgggaaggttgagaacttggagtgactgaatggagtgtgcttctgcaagggctgagattcatgggtcactgctctctactgccttaatgttgaggattccttcagtcaaattagcagctcagtgcacatggcattttgctaggtaccagggatacaaaaataaatgatgctgcccttctaagtgcaggagaatgctgctggagggcttccagtgttcttagaaagctctgtgtggagcatggactgagggggttgtcaagactggaagtgggccacggcaggggtcacaagtgagcaaattgataggtgagacctgaggccaactggagatggcatgcctgtcttgagggagcagccactcggccatttgggactggttggaaatgtaggcccagtgtggcagaggtcttggtagagaggcaagaaccagccagtaactcattcattttacacacacacacacacacacacacacacacggtactatggtacttccttttttttttttgaacggagtctctgtcacccagactggagtgctgtggtgcgatttctgctcactgcaacctccgtctcccgggttcaaacaattctcgtgcctcagcctcctgagtaactgggattacaggtgcgtgccaccacacccggctaatttttgtatttttagtagagacagggtttcaccatgttggccaggctggtctcgaactcctgacctcaggcaatccacccacctcagcctcccaaagtgctgggattataggcatgagccaccgcacccagcctggaacttacttctttcttacatatttctaggtgccagatgccagttttagattctggctccaccactgacacagctgggtgaccttgatccagtccctggaccctcagaggcacagcttcttggcctgtaaatggggagagacagcctgcattgcagaattgttgggaggattaaaggacaaattgggtactacgcttactcataaaagttatgttctaagcgtccttctccctgccccacaggctgctgcaccctgggctgggtaatttagcccacagctcctccttccccctgtcatgtgcttcccttctgacttagattcagggcagagggctgttgatcacaacctcctgggcccagagtcacaccccctgcagtggaggatgtccgggacaaggcctcacagaccccgtgatggaggcctgtcagtcctgcatcattgttaccctctctcctctgccctgctcttcttgtcaccaacctgcccaccagaggctccctccagagggaggagcctctggctgaagtcccaggacccattctacccctgaattggcctcaaatgaccctggggatttagccctgggcttccttatccctccctctggtgcagcagtagaaaatctgaggcctagtggctccacactccacactaccctcagactcaactctaggctccttgcggcttccaggccacgtatggtctggctcttgctcacccctgcaccatcatctcccccatgccctcctctcctgcactctgctccagccacctggcttccatcagttccctgaccctgcccatctcgttcccaccttggattctggagtaagtgctacttcttgacttacctcagacagggcactttcctcctctctacctgtttctcagcagtaacatggtttgattatcaccaatggagggtcaagaaagaggaccacccttagccctttacctggcccagagtgggcacagatggctacagtttttcacatcaccaaggccatagcatgcagatggcccctttccccacccacctacatcactctctgaggactaaaactgcaccttccttctctctccctgcaggatacttttgtggaactctatgggaacaatgcagcagccgagagccgaaagggccaggaacgcttcaaccgctggttcctgacgggcatgactgtggccggcgtggttctgctgggctcactcttcagtcggaaatgaccagacactgaccatccactctaccctcccacccccttctctgctccaccacatcctccgtccagccgccattgccaccaggagaaccactacatgcagcccatgcccacctgcccatcacagggttgggcccagatctggtcccttgcagctagttttctagaatttatcacacttctgtgagacccccacacctcagttcccttggcctcagaattcacaaaatttccacaaaatctgtccaaaggaggctggcaggtatggaagggtttgtggctgggggcaggagggccctacctgattggtgcaacccttaccccttagcctccctgaaaatgtttttctgccagggagcttgaaagttttcagaacctcttccccagaaaggagactagattgcctttgttttgatgtttgtggcctcagaattgatcattttccccccactctccccacactaacctgggttccctttccttccatccctaccccctaagagccatttaggggccacttttgactagggattcaggctgcttgggataaagatgcaaggaccaggactccctcctcacctctggactggctagagtcctcactcccagtccaaatgtcctccagaagcctctggctagaggccagccccacccaggagggagggggctatagctacaggaagcaccccatgccaaagctagggtggcccttgcagttcagcaccaccctagtcccttcccctccctggctcccatgaccatactgagggaccaactgggcccaagacagatgccccagagctgtttatggcctcagctgcctcacttcctacaagagcagcctgtggcatctttgccttgggctgctcctcatggtgggttcaggggactcagccctgaggtgaaagggagctatcaggaacagctatgggagccccagggtcttccctacctcaggcaggaagggcaggaaggagagcctgctgcatggggtggggtagggctgactagaagggccagtcctgcctggccaggcagatctgtgccccatgcctgtccagcctgggcagccaggctgccaaggccagagtggcctggccaggagctcttcaggcctccctctctcttctgctccacccttggcctgtctcatccccaggggtcccagccaccccgggctctctgctgtacatatttgagactagtttttattccttgtgaagatgatatactatttttgttaagcgtgtctgtatttatgtgtgaggagctgctggcttgcagtgcgcgtgcacgtggagagctggtgcccggagattggacggcctgatgctccctcccctgccctggtccagggaagctggccgagggtcctggctcctgaggggcatctgcccctcccccaacccccaccccacacttgttccagctctttgaaatagtctgtgtgaaggtgaaagtgcagttcagtaataaactgtgtttactcagtgaacaaagagcctgggctcttgtgtgctccgggatggggaaaggaggggccgctggagagctgggtactggtcctggctctgctgccctcaggggagggccttggacaagtccttccttccttctgggcctgaatttatccacctgtacggtgacagggttttactgggtacatgctgtgtgctgggcactggggctgcatgtgaacaggacagacacagtctctgccctcaggagctgacattctagtgggagacacagccacttggcaagtgtttactgagctctgctctacacagacatagtcctgggcactggggacttcttcaaacaaaacctttgcctttacaagcattcattctagtggaagagacagacataagcacggctctagctgctgtagggtgtgggggaaaggtgtgatgcctttcctcacccatcagaaggttctgtgactgacattcctataacaaaagaaaaacaaagtggcagttcacaccctgtaatctcaatactttgcgggtgggggatgggttgcttaaggtcaggagttcaagatcagcctgggcaacaaagtgagaccctgtctctacaaaaaaatttttaaattagccaacccagcaaggccagtccagattcttcttggcctctgtgtagcattccttcctctcctgtacaggagacaagacataggtcagagtatttatttgttttttaagagggtcttgccccgtcacccaggctggaatgcagtagtgtgatagataactgcagcttcaaattcctgggctcaagtgatcctcctgcctcagtctcttgagcagctgaaattacatgtgagtgccaccaagcctggctaattttcaaatttttttttgtagagatggggatcttgttatgttgcccaggctggtctcgaacacctagcctccagtgatccccatgcccagccgagaatttgtggccagcttctacacagtagagcagaggaaggttacagtaatatttctgtgttttagcggatcacgaggtcaggagatcaagaccatcctggcaaacacagtgaaaccccgtctctactaaaaatacaaaaaaaaattagccgggcgtggtggtgggcgcctgtagtcccagctactcgggaggctgaggcaggagaatggcgtgaacccgggaggcggagcttgcagtgagccgaaatcgcgccactgcactccagcctgggcgacagagcaagactccgtctcaaaaaaaaaatatatatatatatatatgtgtgtgtgtgtatatatatatatatgtgtgtgtgtgtgtgtgtgtgtgtatgtgtgtgtatatatatgtgtatatatatgtgtatatatatgtatatatgtgtatatatatgtatatatatgtgtgtgtgtatatatatatatatatttctgtgttttatgagttgctttggggagaggagttctagtttctatgacccaccttggggaagaggaatgaatgctagtttctgttacttgcttcaggggagaaagagaaatgggagacagcaaggcaggagaaagtcagagatcttgtttctgaggcctttcagcctcctttagttcaaagtattcggtatgccaaagtgccatactttggggtattgttttctaagccccagtaagggcaaaggaggaaaaagcaacgaccatgaggaagcggtttggtcttctaccaagacatgaaggacttagtagagaaggaggtaagaaggggtcagacttcagatttttaaggcacatcccacaggatttcagatggagtagagatagcttcagagagactcaaggatgacagatttttagaatagtgatgccattatagatacaaaaatgaagtgcatgtttgaagccagtgcaacccaagagactcatagtaagtgcgatctgagctcgtctgggaatcaggagtcagggagggctccctggaggaattgacatgagagccagggcctgaagagtgcatcacggttaacttaaaattaagtggggaggcaggagagtgggcctggggaagaagcagtaaatgcaccagatgagcaggcattgtcttcaggctgaaaagctggtgtgtccagagctaagagagagggcgctgctgggtttaagatgatgacagagggtggggtgagaggactgaacttgatcctgagggcagtgacagccagagaaaggtggtaagttagggagtgatacagcccgagagcccccaaaactctggctgatgggtggagaaggttccggagggggaagcagagtggaaacaaggagatcagtgaggaagccatggtttcatgaatgctccggttttgaggatggacagccagatttgtgtcccgggtcgtcatttctcgagccgtggcttccagtgagtgagttacctactctctctgtgccccagctttcccctctacaaaatgggtgtgatgggcaattgaatgagataacctagaagcagtggaggaggactggatgttgagggtgaccgcggggatggactcggcattcccccgggctctccaggagaagagaggaggtgctgcactctcggagtcccgcgtggccgcgtccagcggtccaggaggggtctgggaaaagcggtcaggagctccagctggagggcaggcctggaggtgggacatgccccaggcgccccgccccgccccgccccgcccgcttttcggagtgggcttcactgccccctggtggccacaggatgcgacctgagagccagccccagctcaagctgctcccgctcagtgcacacgacctctctcgccggggggccactttccccaatgtcctccatcctctaccctactcaccagaaaaacagctacacttccaacccttaggtactggattcagagcttgtatgggctctctggagcttagaatcgccatcttgtttggttcaagaccaaagcctccagcctcccactcacgccttcccccacgatgtgtcctcagctcctgcccctagccatagccgttcaagtcccttcctcacattctccatgtgcttccagaaatgtcttcactcgctcttttatttatttatttatttattttttattttttgagagagggtctcactctgttgcccaggctggagtgcagtggcctgatcatagctcactgcagcctcgacttcctgggctcaggtgatcctcccacctcagcctcccactgtgactacaggagcacgccaccatacccggctaatttttttgtatttttgcagagacagggttttgccatgttgcccaggctggtctcgaactcctggtctcaagccatcacttggccccggcctcccaaagtgctgggattacaggcgtgagccactgtgcccagcccagaaacattttttcacatattggcacagatatatattttgatcctccactaattttttacacaaatagtaacatactaaacacactttcccttgctttttccacctgcatactgtatcttgtagaggttttttttttttctttgagacagagtctccttctgtcgcccaagccgaaagtgcagtggcatgatctcggctcactgcaacctccaccttcccggttcgagaattgcaatctccaccttctgggtacaagcaattctcctatctcagcctcccaagtagctgtgactacaggcgcacaacaccacgcccagctaatttttgtgtttacccgacctcaggtgatccatccaccttggcctcccaaagtgctgggattacaggcttgagccacctagcccagccttgtagaagtttccatattcacacatgaatccccatgtactcaccaggcagtttcaacaattaccaactgatgtcaactttattctttttttctagctgtgtggtattccacaagtttttaaccagaccgctcagtgattcccaactttatatattgccatggaacatgcttggaattgcacaaagggaaagctggagggggtttgggactctctatgtggttcttggtgaaaaactcattcaatttccatatattacatatttatgatgaaagaaatgaaatatatttcatagagaaaatatgaagttttatctttgattaaaacatctaaatacataaaatattttaaaattttttctttaaaaacttgactttggtcctgtaaatgcaactttttatatgaggttttattattgaaatggctcggccgggcacggtagctcacgcctgtaatcccagcactttgggaggctgaggttggcggatcatgaggtcaggagttcgagaccagagcctggccagcatggtgaaaccccatctctactgaaaaaaaaaaaaacagaaaaaattagccaggaatggtggcgtggtggcgtgtgcctgtaatcccagctactctggaggctgaggcaggagaattgcttgaacccaggaggcggaggttgcagtgagccgaggttgtgtcactgcactccagcctgggtgacagagcgcaactccgtctcaaaaaaaaaaaaaaaaaaaaaaagagaaagaaagaaagaaatggctcacgcagggctcagcatggtggcttatgcctgtaatcccagcactttgggatgccgaggtgggaggatcgcttgggcccaggagttggagaccaacctggcaacatggtgagatcacttgaacccgggtgaaaccccatctctactaaaaatacaaaaattagctgggcgtggtggcccacatctgtagtcccagctactcgagaggctgaggcaggagaaatgcttgaaacagggaagcagaggttgcagtgagctgagattgtgccactgcactccagcctgggccacagagcaagactttatttcaaaaaaaaaaaaaaaaaaaaaaaaaaacagaaaaaaggagacattataatctcaagtaggaaataagagaaaaatgtaagccattccaaagcttactattgaaattatatttaaacattctaatagctcttcctttctataactgacaaattaatgtcaatatttcttgtattcagttggatttgaaatcaatccaaatgtacgttttcattttgaatattttaaaataatgagttcagaaaacaggaaaagatataaatcttttaaactcttctttctttctttaccattataactgttattaaaactgggcaaggctgccgggtgcagtggctcacgcctgtaatcccagcactttgggaggccaaaacaggtggatcacgaggtcaggggatcaagaccatcctggctaacacggtgaaaccccgtctctactaaaaatacaaaaaaattagctgggcgtggtggcgggcgcctgtagtcccagctactcgggaggctgaggcaggagaatggcatgaacctgggaggcagagcttgcagtgagccgagatcgtgccactgcactccagcctgggttacagagggagactccatctcaaaaaacaaaacaaaacaaaacaaaaaaaactgggcaaggctgtacagcaccaaggaagagagaggaaggaaggaaagaagggagagagtgagggaaacacagaaggaaagaaggaagaaaggaaggaaaagaaagggaattattggtcactattacttatgaacatgtatgccaaagttataatattaataaaccaaacctaatattaacaaacaacataatattaaaagaataatatatcacaacctgtagggtttattccaggtaaacaagattgactacatataggaattttttctttttgctttcttttttttttttgagacggagtctcactctgtagcccaggctggagtgcagtagcgccatcttggctcactgcaacctctgcctccaaagttcaagtgattctcctgcctcagcctcccaagtagctggaattacaggcatgcaccaccatgccaggctaatttttgtatttttaatagagacagggtttcaccatgtttgccaggctggtcttggactcttgacctcaagtgatccgcctgccttggcctcccaaagtgctggaattacagacgtgagccaccgcacccagccaagaaatttatctatgtaatttattgtattgaaaaattaacaaagaaaatgcttatgattatttcaggagatatgaaaatagtattttgtaaaattcaacacctgttcatttttttctttttttttgagatggagtctcgctctgttgcccaggctggagtgcagtggtgccatcttgactcgccacagtctccacgtcccaagttcaagtgattctcctgactcagcctcctgagtagctgggattacagatgcccgccaccacgtccagctaatttttgtatttttagtagcaacggggtttcgctatgttagcgaggctggtctcgaactcctgacctccggtgatctgcctgcctcggcctcccaaagtgctggggttacaggcatgagccacggtgcccagctaacacctgttcatgatttattaaatttaaaaaaaaaaagctttttagccagctttcacttctttatagtcttctgggtctatagaagtttaagataataattttgtgtattgcttgtgcaatgttttttttttttaaatagagacagggtttccttatgttgcccaggctggtctggaactcctgggctcaaatgatcctcctgcctcaaccccccaaagtttagggattacagatgtgaaccactgtgcctggttcacttgtgcaatttttaaaaattgacaaatcacgcagaaaaaccagcaacttatgtcatgatcaaatttattacataggccaggtgtggtggctcacacctgtaattccagcagtttgggaggctgaggtgggcagattgtttgaacccaggagttccagaccagcctgggcaacatggcaaaaccccgtctttacaaaaaaatacaaaaattagctgggcatggtggcacgtgcctgtattcccagctaatagggagcctgaggtgagataatcgcttgagaccagaaggttgaggctgcagtgagctgtgatcacatcactgaactccagcctggatgacagagcaagaccctgactcagaaaataaaataaaatcgactggccgcggtggctctcgcctgtaattccagactttgacaggctgaggcgggcagatcacttgaggtcaggagtttgagaccagcctggccaacatggtgaaatcccatttctactaaaaatacaaaaaaaaattagctaggtgtggtggcgcgcacctgtaatcccagctactctggaggctgaggcaggagaatcgcttgaacccaggaggtggaagttgcagtgacctaagatcacgccattgcaccccagcctgggtgacagagctagaggctgtctcaaaaaaaaacaaaaaacaaaaaaaaaaaacacacacacacacacaaagtacaataaaataatgtattacataatgcccagctttctatttttctatctctaccatcatagcctttgtcatgaggcaaaaataacaagaactatttcttactatatagaaaataatagaaatgggccatgcgtggtggctcgtgcctgtaatcccagcactttgggaagccaaggcgggcagatcacccgaggtcaggagttcaagaccagcctggccaacatggcaacatggtgaaaccccatctctactaaaaatacaaaaaaattagctgggcatggtggtgggtatctgtaatcccagctactcgggaggctgaggcaggagaatcacttgaacccaggaggcagaggttgcagtgagccgagattgcgccattgcactccagcctgagcaacaatagcaaaactccgtctcaaaaaaaaaaaaggaaagaaagaaaaagaaaataatagaaatggctgggcatagccaagtgcggtggctcacgcctgtaatcccagtactttgggaggcagaggtgggcaaatcacctgaggtcaggagttcgagaccagcctgaccaacatggagaaaccccgtctctactaaaaacacaaaattagccaggcgtggtggtgcatgcctgtaatcccagctactcgggaggctgaggcaggaggatcgcttgaacccaggaggcaaaagttgcagtgagcaaagatcacaccattgcactccagcctgggcaacaagagcaaaactccatctcgaaaaaaataaaataaataaataaaaatcaaagaagacctacatttatatagatcatatatgttcatttctttctttctttttttttgagacagagtctcgctctgccgcccaggctagagtgcagtggtgcatcctggctcactgcaacctctgtcccctgggttcaagtgattctcctgcctcagcctcccgagtagctgggactacaggtgcctgccaccatgcccagctaaatttgtatttttactagagacagggtttcaccatgttggccaggctggtctcgaactcctgacctcaggcgattcgccagccttggcctaccaagtgctagtattacaggcgtgagccactgcgcctggcctgatttttaattaatatgcacaaactcacatgagaattctgaccatgttgagtattctctcctgaattatttaagccatctcatttcaataaattcacatataaataattagttttaataatttcattatagagagtcttgtgaattcttgaagttcttaaatgaaatttaaatggccatattacgaactgttaacaagtcaatgttaaaatttgaggaactcatttttaaaatactaagataccaagaatgtggacataaagcaagaaaaagtttttctgaatatgaaatagaaaataatataaacataacatagtggcctggccaacgagatggtttgtaaatttgttgctgaataggaaatgaccagtacccacgtcaacaagtgcccacgtcaggctctaattgcactgatgtaaaaaacaagccaggcatggtggctcatgcctgtaatcccagcactttgggaggccaaggtgggcggatcacctgaggtgaggagttccagaccagcctggccaacatggtgaaaccccgtctctggtaaaaatacaaaaattagctgggcgtggtggcaggtgcctgtagtcccagctactcaggaggctgaggcaggagaatcacttgaacccaggaggtggaggttgcagtgagccaagatcacaccattgcactccagcctgggcaacaagagcaaaaactccatctcgaaacaaacaaacaaacaaaaagctggacgtggtggcttatgcctataatcccactttgggagactgacgcaggaggattgcttcagcccaggagtttgagaccagcctgggcaacataccaagactccatccctacaaaaaaaaaaacttaaaaaacaaacaaacctcccccagaaataactgctatgattgcactgtaaaaataataataataaattaaaataatgatagggctgtagtttacaaaccatttatgaagtggaacatccctccgcagctgtttggctgtccccaaaagggtatatcaatcttacctgaactttgtgccaagctctctgggcacctggaaaacaaactgtagagggtaggtggatggccattctccacagctgaccactacagtagaggtccagaaacgaagaggccaaccgtggccaagctcagctcatgctggtggagcagcaggggaccagagaaaggatagtgtaatggtttggagcaggaccctgaaacgagactgcccaggggaggcaggtgcccttggacaagtgacgtaacctctctgttcctgagttttttgcctaaaaaataggggtgctaatcatacctacttcatgaggtagttacacaggtttaatgctcgtaaagtgcttaaggatggtatctggcactgtaagtactatttttttttttttttttttttgagacggagtctctctg

SEQ ID NO: 742 - DNA, 2598 bp, Homo sapiens
cgcgcactccctttgcgtctcgggctcgcgcgcgttgccgcggcaccggaagtgactgagcttgcaagttcccctgtctcttcaggggaaactgaggccggcttgttcgggagagacggcgcgagcagtcagccaggtaggccggcagccaggtaggccggcccgggtccgcggcgcggaactcggccgcgaagagctcttgcgtctggaagctaccgggccgatgaagggggatgtggccccccacggctcgcggggctcgcaggaagctctttctctcccttcagaatcttatcttggctttggatcttagaagagaatcactaaccagagacgagactcagtgagtgagcaggtgttttggacaatggactggttgagcccatccctattataaaaatgtctcagagcaaccgggagctggtggttgactttctctcctacaagctttcccagaaaggatacagctggagtcagtttagtgatgtggaagagaacaggactgaggccccagaagggactgaatcggagatggagacccccagtgccatcaatggcaacccatcctggcacctggcagacagccccgcggtgaatggagccactggccacagcagcagtttggatgcccgggaggtgatccccatggcagcagtaaagcaagcgctgagggaggcaggcgacgagtttgaactgcggtaccggcgggcattcagtgacctgacatcccagctccacatcaccccagggacagcatatcagagctttgaacaggtagtgaatgaactcttccgggatggggtaaactggggtcgcattgtggcctttttctccttcggcggggcactgtgcgtggaaagcgtagacaaggagatgcaggtattggtgagtcggatcgcagcttggatggccacttacctgaatgaccacctagagccttggatccaggagaacggcggctgggatacttttgtggaactctatgggaacaatgcagcagccgagagccgaaagggccaggaacgcttcaaccgctggttcctgacgggcatgactgtggccggcgtggttctgctgggctcactcttcagtcggaaatgaccagacactgaccatccactctaccctcccacccccttctctgctccaccacatcctccgtccagccgccattgccaccaggagaaccactacatgcagcccatgcccacctgcccatcacagggttgggcccagatctggtcccttgcagctagttttctagaatttatcacacttctgtgagacccccacacctcagttcccttggcctcagaattcacaaaatttccacaaaatctgtccaaaggaggctggcaggtatggaagggtttgtggctgggggcaggagggccctacctgattggtgcaacccttaccccttagcctccctgaaaatgtttttctgccagggagcttgaaagttttcagaacctcttccccagaaaggagactagattgcctttgttttgatgtttgtggcctcagaattgatcattttccccccactctccccacactaacctgggttccctttccttccatccctaccccctaagagccatttaggggccacttttgactagggattcaggctgcttgggataaagatgcaaggaccaggactccctcctcacctctggactggctagagtcctcactcccagtccaaatgtcctccagaagcctctggctagaggccagccccacccaggagggagggggctatagctacaggaagcaccccatgccaaagctagggtggcccttgcagttcagcaccaccctagtcccttcccctccctggctcccatgaccatactgagggaccaactgggcccaagacagatgccccagagctgtttatggcctcagctgcctcacttcctacaagagcagcctgtggcatctttgccttgggctgctcctcatggtgggttcaggggactcagccctgaggtgaaagggagctatcaggaacagctatgggagccccagggtcttccctacctcaggcaggaagggcaggaaggagagcctgctgcatggggtggggtagggctgactagaagggccagtcctgcctggccaggcagatctgtgccccatgcctgtccagcctgggcagccaggctgccaaggccagagtggcctggccaggagctcttcaggcctccctctctcttctgctccacccttggcctgtctcatccccaggggtcccagccaccccgggctctctgctgtacatatttgagactagtttttattccttgtgaagatgatatactatttttgttaagcgtgtctgtatttatgtgtgaggagctgctggcttgcagtgcgcgtgcacgtggagagctggtgcccggagattggacggcctgatgctccctcccctgccctggtccagggaagctggccgagggtcctggctcctgaggggcatctgcccctcccccaacccccaccccacacttgttccagctctttgaaatagtctgtgtgaaggtgaaagtgcagttcagtaataaactgtgtttactcagtgaacaaaga

SEQ ID NO: 743 - protein, 247 aa, Homo sapiens
AGVLDNGLVEPIPIIKMSQSNRELVVDFLSYKLSQKGYSWSQFSDVEENRTEAPEGTESEMPSAINGNPSWHLADSPAVNGATGHSSSLDAREVIPMAAVKQALREAGDEFELRYRRAFSDLTSQLHITPGTAYQSFEQVVNELFRDGVNWGRIVAFFSFGGALCVESVDKEMQVLVSRIAAWMATYLNDHLEPWIQENGGWDTFVELYGNNAAAESRKGQERFNRWFLTGMTVAGVVLLGSLFSRK

SEQ ID NO: 744 - DNA, 32847 bp, Mus musculus
  misc_feature (1)...(32847): n = A,T,C or G
gggctttcctatctgtctgtcaccgtcagcatcacacgagcttcggcttttctagatgctgtgtcaggtgagggagttccccacttgccccctccagctccctcacgctttcctcccccctcccacttccttttcctgtccccccattctttgatagagtctctgttaagattgcctgaaaactcgtggttttctgcctctgtcttctgagtgctggaatctcaggtatggcccattcttttttgtgtgtgttttgcggtgaactgatgtgggattacgtcacacgtcttttctgtgtgtgcttagattactgcccgttgaggtcatcgtgtggttttgttttgtagggggggtgggagggtgtgttagtcactggttttaaagggaagcttggcctggtgttggttcatatgtgtctaaggcagtttgcctgttgtctgtggacagtttttaacctctggattctgagacgtcagttggtcattttcttaggatgtctttttgcagttccagggacactggcttcatggagtgaatcggagctgtgtcctgatagagaactgggcttcaccctccctaagtgtctggcccaatccaccactgaagcctcccaggtgtttggctcatgtcaagagaattcactagtgaagctatctgggcctgggcccttttaagggaagttttaagatgactaattcagggcctgcagagatgaatcagtggttagtaatacttgcagctcctcctgaggaactgaatttgatttacagtacccatgttgggagtcacatgacctgtaactctggctccaggtgatcggagactgtttttttgttttccaggcacagacatacacacacagaaaaatttactgatttaggaccaacaagctggctcagaggataagggtgcttgctgccaagcttgatgacctgagttcagtccccgggacccacatggtagaaggagagatttgaaccccacaggtggtcttctggggggtgaaccttaaacccaagactccgtactcttgtaatagattctcactatgtagctcaggctgccttccgggtcctccagcctcagccaccagagtccagggatttcaggcatccttaccacagccggctcctctaattcctacccgagtaacctgagctgctttttttgttgttgctgttgattggttctgctccgtcatggctggaatcacactttgtgtgatttgatttctaaaggcattgagccctgttttctggcatagcatatggtctgacttagacagtgttcgtgcgcactgtgcacacttgaggagcatgtgggtctggtgttcctgggtggctgctctgcttccatttgccttttgtctgaggagttttgtagtgagtaaggctccctcagtttgcttttccggtgaactgtctgtggttttgtttttttttttatttttatcttacgtgagctctttatatattaaaaacccttgtttatcatatgagttgcaatttttttttctggtttaaatttgtttatcaagctaggcagactttttttctttaggcagggtctttttgtagttcaggatggccttgaattcactatcttcttccccctgcctctttttttttttttaaagattatttatagtatgtatatgaatacaccgtcatggtcttcagacacactagaagagggcatcggatcccattgcagatggttgtgagccaccatgtggttgctgggaattgaactcaggacctctggaagagcagccagtgctcttaaccgctgagccatctcttgaatgctgggttgacaagtgtatgcttccatgcctgcctatattgtaatgttttgttttgtttgggggggggcgtgttgagacagggtttctctgtatatccctggctgtcctggaactcactttgtagaccaggctggcctccaactcagaaatccgcctgcctctgtctctcgagtgctgggattaaaggcgtgtgccaccacgcctggctattataatgtttttatatggactgatttatcttctaaagaaacttaagtctttaaaaatattacttatgctaggcatgatggtgcatacctttaatcccaacactcaagagacagaggcaggaggatctctatgagttcaaggctatggtctaatggtctatctaaatggtaagttttaggacagccagggctgcctggacaagagagactttatctcaaaaataaaataaaataaattttgcttgtttgtttgtttgtttggttttggtttttcaagacagggtttctctgtatagctctggctgtcctggaactcactctgtagaccaggctggcctcgaactgaactcagaaatccacctgcctcagcctcccgagtgctgggattaaaggtgtgtaccaccacacctggctgtattttgttttttaattatgtgtctgtgtatgggtatatacccattagtacaggtgcctgtggagacccctgaaatgggttacaggtgtccgtggactctctaagtatagatgtgagaaacaatgcaaggcctccagaaagcactgcatattctttttttttttttttttttttattttattaatatatgtaagtacactgtagctgtcttcagacactccagaagagggagtcagatcttgttgcggatggttgtgagccaccatgtggttgctgggatttgaactctggaccttcagaagagcagtcgggtgctcttacccactgagccatctcaccagccccgagcactgcatattcttaacctctgagtcagtcctctctctgttcaacagaacgtagatcttgtctctccagcctccatccatacagacggtgatcctgactccttttcctgtccttaccttagtgctggatgaggcattgggaggtctctgtctgatggtgagagcaatcagagaggtcagaggtcagggcaggtcttccgtaggcatgatgatatcagcacgtctcaattgcttcctacctcctgagcaccttgcaaatagcactgccctgtgtcttccttaccacaaactcatttgagcagaaactaccatgtcattttggaggggtaaactgaggcctgcctagtccacgtgcctaggcaaagctgagctggcccctgccctggcattgtggccccaggccttttgatgcctgtgatgccttgggcagtggggacatcttcgtagtgggcagcacccggaggcacatctggcacccttcatttcctctgttgctgtgggccaggttgtggcttctccattgctgtgggacagtcgagagtccctggtgagcaccagcattgtgtctggcccttccgacccttcttgcactgttcctccgttctctgtaagggcagagttcatcagaaaccaattcttccctgccacacagtctcttagttccagatgtcaggctagtataatctcctctgtcgtatgtatgtatgtatgaatgtgtgtatgtatgtatgaatgaaggatgtgtgcatgtgtctgtctgtctgcctgtctttactgtggtgttggagatggaactgagggctcatgagtacagggaaccttcctctgttgaatcatgcataccccagcccatgcccatttgaaaggtgggaatctccgagggcaccatggcaagattcagttagatgcaaacccgtgccccactccggtgaaatctttatcacagtcccaccacacctggttacattcaccctgagaagaggaaacatggtttcaggggaggactgctttgagccacctagagacggagtctggagtcctgggcagtgggagccgtactcagcgcacatcagtggactctgggccatccacttagtcctcaccacaggggattgtgggatgctcctgagtgcatctcttaagtactcagtggcccttggctgcttgcctcatgagcacaagacctcaggtttcatccctggcactgtagataataattattatcacgagaaagcaacttccagctgtcacctgatgcagggtctaaagtaaaaggggactttccttctccagaccaaccccttgtcagatgaagcattgtaaagacttggggattctcccagaaatttctctaagtctccagtgtgtgtgtgtgtgtgtgtgtgtgtgtgtgtgtgtgtgtgtgtgtgtgtgtatctgtctgcacacacacatatgggcaaagcaatcatactacagcagtagtagatcctgcttgccagagcagagcccagcgcctgggttatctccacccctgacgaccctgtggtggctttagagggtgggcaggaggtgacaccaaggctgtgtctttgaggatggcggagccctggcttgagggctggggctgggttgagacaggttgcatcagaggaaggttgtggagtttcctcaggattccatgctgctgcagctagcacccagagccagcattctgcaagaatctggtgcaaggctgagctgtgcagggggtagggcagagttagggagatgctgagttaggcagaacctggtctattgggtctggggcgtggcagggaatatggaagcctttgctgtcctgaaatgtcaggcaccctacccacgggaaagtgctaccttccttttgggacctcagtttatattcttcactgcttccctttggccctcaaggacctatctctacctcagaacttgtaagcagcggaagaaatggaggctccctcaagtgggtgactcacggtgactgggcagaagtcacacccctactccagggaagcgtgaagtctgggtctcagttccaggagagacactctccaaagggagcctctactttaccctgtatgagccccccccacacccaaatactgctaaggtccttgttggtgcactccccagctgctggagttgggacagagtgggagggagaggtcctaaggagccccgagttcccatcagacccctcaagcagccgcttttcctgtttgccctgtgtggctgtggccacaaccaccctcgtcttttaattctcatgctgtgtgacgtcgggcaagttcttaaacttctttgtgcctgggcctctccatcagtgaactaaggatgctgttaatacccacattctggatgcttgtggggattcagtgttttcaaagagtttagagtggggcacagcgctcctggagggtttagacatggacacctagtggtcgctgtaatgtgaccctttcagtgtctaagcagggtgtagctctgtatggctgtgctcagtcttctatttaccttgcaaatgtttccagaacagctggtaacaacctgtctattatgggtgctgttcagggtgggagcctggatctaagaaccttggtccatagtcccctcatagacagcagttcccaagtccacttggtctggttaccatcctcagaggctggtacaggccctccaagtgttcctctcatccgttccctgtggacctgtacatagaggttccacaccgcagcctgcagcagcctgctgggttcttagagatctccactcacatgaagctgcagaaaagaattccaggatgagtcggtataaagcagagttgagtttattaagaaggtagtttaggggagctgaagaaatggctcagtggttagagcactggctgctcttccagaggacctgggttcgattcccagcacccacatggtagctcacaactcctgtaacaccagttccaggggatccaacaccctcacacagacatatgtgcaagcaaaacactaatgcacttaaaaatatcacttaaaagacaaaggaaagaaaaaactgtagggctcggtctgggaaagataaggtcaagaagcaactgtggaaggtcctcatgccagcgtctggcttcatctcatgtgtacacagaaacatgcacacacatgccaacacacacatcaaagtgtgcaaccctcgggtacacagaagcatacatacctcttgagtgcgtgcacacacttacaaacagacacacagagatgtaatcctggggcttaatagaaagagaggtgcatatgaaagggaaaggacccccagatgctagtgggacttcggaagccccctagactcttccctgtagctgtgtataggattttggaggcttttggaattatactgtttctaaggaaccctgcctcgtttgtctctcttgtactttgcctgttccctgcccccttttttctacgataaggtctcacctggttggccttgaactcactgtgtagaccagactggctttgaactcagagaaatctgcttgtctctgcctcccgagtgccagattaaaggtttgtgccactaagaaaagatctattttgtgtgcatgtatgtgcacaggtgtgcacggatgtatgtacctttgtccctggaggccgaaagagggcattggctccctccatctcagagtttcaggcatttgccagatgccaggcttgtcacgtgggtgctgggatttgaacctgtctaaaccactggggcatctttctagcccatttccctcccagatgagatcctggggtgattgtgggcaccctggggaggattacagagtgttggtgagaccatgggccaagcgggtggaacaagggcctctgcaaacaggatggagattcttagaaagtggcaggtttagccggaaaaggagaatgaatggtcacactcaaaggtcgtgtaatcttgggccttagccatagttcgttgctagttaagtatttgttattgtgtgtgcttgatgtgtgtgtatgtgtgtgcgcacacgcatgtcacagcatgtgtagaagtcagaagacaactttggggagttgggtccctcttcattgtggttgtcaggctccacagggccgttgctggctgagccatctagctggcccaactttggtccttacttgaaatacccctgtatagaaggaatcttacctacatcggcaggatccactgcatgtgctgggattcctgactcttggctggagagagactcgggtagtgtggctgagggttcctttactctcccacaatcccttgatgtgtcccgtgtctctgaccaccctcacactgaaggtgcagaggaatgtctgctgcagccactcctgggctgccccctgacctagccgccttttcaaacaccctgggtctgcatggcaggtattagccacagacctcttccacagacaactcctaccccagcccccacaagccagcattgtagccatggccctggtacctctggcttctccttaaaggcttcactttacccttctgtgtattggggaggtacctgcttcccttggttggtgtaaggtctcaagcccagggactgtatcctcaaaagatgtgcacatatcttcaggtctggctctccctcttcaggcagggagcccattcttgattccctccagcgacaggggacacaccatgtacagttttgttcttgttcattctagagaaagctcttgcaaagtaattctttgtatcttgtaaataggtttcactttaaaatctgttttcatattttttatggtttctcagtgtccttctgaagtcaaggacccgatgttcaggaattatacagcctcaaggaggtggggtggatggactggactgcggggaaacccatctgtcagcagaggtctcaggacagtgctgatgggcactgtgacctgagggatgggttaccatggaaacaggacttccctgaatgcccactgctggacagaccctcaggaatatctagtgacccctggagccattgggcaggtctccccagcccacattctctgaggctgggcttcatcctgagccacaccccagtctgcagctctgagggtataggactgactgctacaccagggtccccatgggtaggagccacagagcttgctaccgagtacaactgaagagtcttgttcctctcagggttctttttttttttttttaagatttatttattttattttatgtaaagagggcatcagatatcattacagatggttgtgagccacaatgtggttgctgggaattgaacgcaggacctctggaagagcagtctgtgctcttaaccactgagccatctctccagccccctgtcagggttctttctttgagagatctggtgccaaggcctcctgcagcccagaagagtggttggttcctccacaacccctggtggcacatccagaacacattccagtgactgctagtgtgcaggactttggccccatttggtcttgtcatggctctgtcacataagggaaagacatggtacaggggacgatagccacaccagtgtacaacttgggaattgggctccagagccttccaaactgccgtccatctgacttcctctcactcacaggatctttgggaaggtcaaagggcattttggcgggatcctgatcctctgtgtgagagtgtgtgagagctctaatggttttcatgtccacaccccacagcatctctgcaggtgcggatgttgcgacccagggagagggagcagcttgcctagggacacggagcaggagaggtgcaacagggtctttaggccaagaccccggatactacagctggtgtctgcaccaaggccccagtctgctccccagatccactggggtagctctgctacctatcaggtgagcagagatgggagaggggagccccagcccagcttcctgggttgggcacggatgtggaaggtagcaggcatcgggtggcatggggcctttcacttggtccctctgtgtatccaggtccctggacctctcagacttgctccccctgctcatcatttggttgtttgttaagcacctgctgtatacctcactccgtgcataccaggagcaattcatgaattaaaagaagagggggctacatataaccaagggggtacagtagtttgggggctcatgaaagaatttgaggaccccttcctaaaggatgtgacttgaagtttctcttccttccttccttccttccttccttccttccttcctttctttctttttctttctttctttctttctttctttctttctttctttctttctttcttccttccttccttcctctcttcctctcttcctcccttcctcccttcctcccttcctcccttcctcccttcctccctccctccctccctctttctttctttctttctttctttctttctttctttctttctttctttctttctttctttctttctttcttgatttatatgtaagtaagtacactgtagctgtcctcagacatcaggaaaaggaatcaggtctcgttacagatggttgtgagccaccatgtgattgctggaatttgaactcaggacctctggaaaggcagtcagtgctcttaactgctgagccacctctccagccccagtccacctcttttcaccatgtgggtcctggggattgaactgaggtcagcagtgtctgtgacaggtgcctttacctgtgtagccatctgcctgacccaggaagtaactttgagctgacagctgaaggaaactgagttgggaggtgaagctgtcagggaatagtgtttgcaaaggtcctgtgaccaggaggcctggccatcccttcttcaagccaccgtactgtactgcaccttcccccagtgttagacgacttgtcaggcatggattcattcagcaatccttaaatgagcccctcctatgtgctggggacatagatatgactcaagtgtccctgcctaagaaagactgaaactgactttgggtccagcagtcaggactttggactggtatgtcttctctccatagctgtgtcctaaggtgccagcaattcatttgacaggtgtaatgagacgagtcctcccagggtggctagtccccttcttaggacctcagtttccctatccgataagtgggtggggtggcttgtctcctcccagaggctctcctctacctcggggatttctgtcgcccctagccaggaccatgggcagcaacaagagcaagcccaaggacgccagccagcggcgccgcagcctggagccctcggaaaacgtgcacggggcagggggcgccttcccggcctcacagacaccgagcaagcccgcctccgccgacggccaccgcgggcccagcgccgccttcgtgccgcccgcggccgagcccaagctcttcggaggcttcaactcctcggacaccgtcacctccccgcagagggcggggcctctggcaggtcagccctcccccttgctgtgtgtccctgagctgtggtgcaccctctctgggttctggggactcggttttcccgaggctgcgaatggggaaggattcgtaaactggaaagcggggctcctggcgctttcgggctcccaggttcagagtatataacgggttctgaaggagagggttgtaggggaggggaccctgaggccctcaggggatggaccgccacggactagctgccgcctccgcccagcctttgttcctggctctgctgtgcgatggcccgagtgcgcccctgcgccctctgctggcgctgtgtggtgcggcagccctgccgcccaggagctgagcggggtgactcacgctcctgcatgcatggctacacacccacacgtgcaaatcccacactctgacggagccatactcacggctgcacgcccatgcgtgcaaatcccacgctcagacagagccacacgcatggctgcacacctacacgtacaaatcccacccagactcaaccatgttatatgcccacattgggcatgaacccacactgagtggagacaccaacaattcctagagacacctgggccagagcacacacagatacaggtgtgcatacaacctcgccccctcagatgggcctgtctaccatcttgcatgcagaatgcagacacgggatgtaggggttcccagctccacatcccaccacaggaacttggttgtggtgagacctttggacgggcagcccacttcccgccatgcagccacacacccattcgatcatttgagaagcatttgtggagcctcgggcaaccgagggtgggatgcaggattccacggagcagctgtgggtgaggggagaatcaggggaagggtcctgaaacttggaccagaaacctcgagctgccaggcacacacacaggcagagtcccttaagtgtggggcttggggcatcttctgtgtgctgcccctgagtgcagagcaagggagcctgatctcggggggggggggtcggggggtacggggacgggacttctgcttgtgtcagtggactcattagataaggaacacctagtctgcagcccagcaggaaggcacagcctacttagcttcctcccagggacaggcgcctgccccagcccctgcagggttctgacacctcgcatccttctctgcaggtggggtgaccacctttgtggccctctatgactatgagtcacggacagagactgacctgtccttcaagaaaggggagcggctgcagattgtcaataacacgtgagtggcctggcggggactgcactgggagcgtgggcctgtcttaccgagagctgccggcagagggcggtgcagagcctacagggctgcttctgctcttggtgggtggcggccctccctagacctcaaccagtatcctcccttgtcctgggccctgtcttcgcacctcagcctctccttctctctgcttctctctcgctggcccttaggaggaaggtggatgtcaggtgtgtaccgaggccaggtagagggggatgcttcgctgaggctgggggctgctctctgcatgtgcttcctccaccgcccctgtgtgtttccagctctctccccgtccctttagcttaccctgcatcccacctgtatgagccgaccctccatcttctccccacaccttcctgttagctctcttcctccctgttctgatttgtgattccacattgggtgccagctacatgcaggacccagtgtattctgtaggccagggagggaggcagtgtggtggggagtgggttacaccagaccaggtcaggggtggatagaagcaggccggggtccctgcaagatgtccccgggagagggggctgtctctatcagactgcccatccaaggaaggacagtgagccacagcaggtaagggcagcatccctgggaggggggcagctgctggttggaggtatgtgctgggctgtggaggcctctccctggagcaggtaaggcttggggactttgatttgagctgctctggagggtagagaggatccatcataaagtgccccaaaggtctggctaaagaggtaggctttccgtctccctgggcgtgtctcgctgctcatgcctcccgttcctcgtgcatgctactccgtttgcctgaaatacttctcctgtatccatctggtgaactcctattcagccctcaagatccagggaggggatgcccgttgtgtgaggcaaaagtgagcaggttccacgttctgcaccggtcactgtcattcatacccctccatctcgttatctctgatccccgggggtggggtggggacagcagcaatggtggaggggctggctctattttgtgaatgaggaaactgaggctcaaagtcaggaaggcccttgtccaaggtcatgtggctaccgatagcaagcccaggatgggacctgggcactttctcttcttttcctggactggcgccctggggaagagacctccctagtacctccccaccagtgtggccagctgctccttccctcctaaagggaagccctgagtccccattgtccccagctgctggtggcactggtggccaggaggaggagcagtgtgaccctggcgctgagaggatggtgtcccagagccacacggctgatagaggcagaggtgagagaaggaatggccacagaccttggagtgtgtgccgctggtggagactgccctgtggggagtctctgcacaagtggcaggaggcaggaaaggcttggggacttggactctgtgtctttggggtcacagcagcctccacgcctttggggtgcagtttctttctcctctcttgtcgccttttaggacagtggggacctgtacagccaggcagccagagtcagtcacaagggagtctcctccactggaggtccccgggtggtggggtcacaggaatgaatggtggggccaggatctggctgttagacctgctgccggggcctctgatcaacccctgctctgcccagagaagttcaggtgtctgtctggtggagaatgccattgttctcagctcagcatgttccccacctcttcctagctgagaatctggggcccctcgcatgggagagtgccagacccctgaccaaaccagttcctggctaccggaggcaaggctgtcctcctagacccttggcataggaagtgggaattgatgccccatttctagggtaggtgcactgacgcgtaggtgctcattcctgctctggcccagtctgaagctatgacagactccacttactaaatattgcctcctttataaatgtgaacatgaaaacccagagagggcatgctgtttgtccaaggtcacacagttttcctccaggaactactcagcttaggtttttgaagtttggggaggtgggggggaacctgtcaggctgctcgttctggctatagtttgaccacctcattctgtggtttctgatgtcaaactggggtcccattctggtacagactgtcttctgccccagtcctcctgtctcctggcttccagggatctcagctctgcgggttgggagagcttgctgcttttggctgtcgatgttagggaccccctgatttcagcctctctctgccattgattatgctgtgtggctttgggcaaatcatctcctcctctgtgcctcagtttccacaatctataaagaaaacactggtcttcttaccagagtggctgggtcttccacctctctcaaatgtagtttcctcagctggggtgggggtctcgccttctttcttgttggatgatcttgggggtcaaaccagagggaaatgtgtgtacaccaagcaagggtggagctttggggcaggggtgagcttgcaccttgcctgtgtgtgtgtccctcatggctccactcacatcttcttcactgctcatgtccacctagaagggacccctctggcccagcgttagccagggtctgatgctcacccggcctccagcccatctttcaagcctcccagctctgcttgctcctggcctcgacttccccatctgtgaagctgggcaaacatgtgcccagatctccagtgcattcaagttggggctgtgtgactcaagaccagggtgggaatgctgtgtgtcttctcagggtcaaagcagggacaaggtcaccagctgactaatttaactcccatcttgtgtacccctccaagctttgcatgaagagctgcagagccattgagcctcgtagtacccacagggaggcacctggcttggctatgtgaccttgcacagagccctttgcttctccagcctcagtcttcccatctgtacagggggtgtgggaagggctggaccctagctcccaggcctcgttctccgatcttccctcaaacctccaaccttttccctgtcccctttggttgctttggatgtgaggtctctggctgccccctggaccctatcaccagtgtccccagcactgcctggctctctcgctctctccctcggccccctgccacggcctctcaccacccccatctctgcctcttctctcctgtcgggctctcgcttgctcctccctcctctgtctctggacccctgctccagccagacctggttcacattcagatggctgcaaaggtacttctgcccctgcccctcctgcccaggcccagagcccgaacctgctgggatccctcctccttcctgccctcctccctcctccccctcttcctggggcagttagtgtaagagcactggggctcagccacctcatttccccatgacttgctgtgtgactttgggcatggcccagttctctctggcttcacttccccagacagggctaggctgcaggaggaagcctataggttttggttaaggactttaaggtgtgagctatggtttggaacaggggcacgtactgttgtttgaagggataggcctgaactattgccgggccagaagcgccagcccttgtctccatcgggcatccaggctctcaaggcttggggagagtttgaaggtctaatgtggcatctatctcatgtaaactctgcttttcccatccctgccccagacagcgagcttcctcccttcctctctcctaaggcacctgcaggccactctgcgcttctggacacttcagtctggggtgcgtggggctcagttctgctgaggttttaggtggcatccctctgggtcagtatgtcattatggaggtggatgtcccaggccagttcctgctggcttgctgtgtacgcaggctggctcagcttcctctgctgcggagcctggccgtgtacctggggaggtcaaggttaccgaccccgatcccccgtgacctcattctttgctccctccctcctgctcagagagggagactggtggctggcacactcgctgagcacgggacagaccggttacatccccagcaactatgtggcgccctccgactccatccaggctgaggagtgagtatgttgttcggctatggtccgctgccaccgccacttctagtaccgagtccctcgtgggcccgagtgggtagaaggctggccacactgaggtctcagtacccagggccagcactgtgggcagcgaaccctggccgacaggcacagccttgtccctcccactccaggtggtactttggcaagatcactagacgggaatcagagcggctgctgctcaacgccgagaacccgagagggaccttcctcgtgagggagagtgagaccacaaaaggtatgcctgagtgagcggtggctggcagagttcagctttgagggtattacttgagctgggtattggagagtgaataggagtttggtacatgagatggggaggggagagccttgcagtggaggaggtaacaggaattaaagttaaagtggcacttgaggaagactgaatgatccagaggtggacaggacacgcaagctaaggcttcctctggcctcagtttctcacatggagagtgggtacagtttaccaggagtgtgacacagctgtggatatgttttacagatgggaacaggagccgtatgcccctctgtttcccttttccctttcccaggggccttttctggccttacccttcccccacactgtctctgctgtttctgccctttctcttagtccatcaccatggcaaccaagccaggctgcttcctgtgggcctggggctcagcgggagatggaaaagtgcacatacacacacacacacacacacacacacacacacacacacacccgtgtgctgtgcacagtacacagggatgatgggtgtgtggtgtgtgtgtggtgtggtgtgtgggtgggtgtgtgtgtgtggtgtggtgtgctcgctcactgttggggttgggcagtgttgctggagtgaaatgtggcgaggtcccggttcctggggcttgggggtatgggcaaatgtgagaatgtgggctctgggcataggtatgccgtcagcggagccttctgtgtgcacatgaagtgggcagtcagtctgtagaaaacatgacttcccaagggttgccttgagacaggttagggtgggtcccaggcctagttctccctgactcacttatgttaccagaagatcacatttacctaatgacgtccagtggggctccaggggcctcatcagtgagtggtggacagtccgtcagtccttccactcagaactgccagctacatggcaggccgttggaccctgcaccccgcctgcctctccccaggctatccaggctatccaggctatccaggctttagttaacaaaggtttctgttgaggacattcttagctgcaggttttctaggctccagagaggcagcgcaggggcaagggctgcaggccacactcaggatgtacctcctgccctggactaattactcacaggtccacacagccagccgctactcctgtctgctcagctggtgtccagtaggcagaacagggcaggcaggcacggggtgggtatacctggagagggccagcatttatggagtgcttgctgagtaccgtgtgactcttcacggttgtctcattgtgtagggaggaaacagggcaagcagcaacttgtcagggtcacacagttgtgagcaccttggggttcaggtgtcttaccagggctgtgaggcacaggggcatgtctgccattggggttttgtgcctacacggctgccctgctcctctcagcacactaggggctgaaagagagtgggactaagtcacttcctcaagcaaggaacacactagcagggtacctctggggtctcctccctgcctacccacaggtgcctactgcctctctgtatccgacttcgacaatgccaagggcctaaatgtgaaacactacaagatccgcaagctggacagcggcggtttctacatcacctcccgcacccagttcaacagcctgcagcagctcgtggcttactactccagtgagtgtccccggccggccgtgtggggactcgcccaggggagcagggtgtctgccgtgcctcctcacccctgggatgcctcttccctccctgcctctcctccatctcctcccttctccccttgctccctgcccagcccccctcttctccttccgctgcagctggccagtgaggagggggcctgccttgagcacgctagaagggaggggctagaggctggtgttgattgtttctgcagccctaagactggtctgaaccggttcctgggagagaaggagggggaggcttctttgatagagaatggcagagcgggctggagctgggctgcgggccgtgtgcagtgatggggttggtgtgggctcttctgtgcgtggctgtttcaggtgtagctacttgagctgcctccttggcctgggcctcagcctctctcagaggactagctgcccctctgtccgtctgctgatgctctggggatcatctggttcccagaccaaatcctccagggctgccacggaaccttatgatacagtcccaaggccccaagcccaggtggctaaaggttgctccatgccttcacctgcagttcctccaaccgcatctacagcttcccacctcccagcacctcttccaaccccacagccgatcttgggctctggcacaggcgatgtgctgtatggggtgcctcctagttatccctcagatccaggccagggacctcttcctctggaatgccttccagggctcccaaagaattcctaaagcctgcttgacttccccctcccaaatatcctctgtttcatctgtgtcctgagatcttgctaggcgactggagtcggggtgtggcctccctagggcagactctcacacctgtttcacactagttctgatactctcaaatctgacaggtaaccaatgagtgatttgagcaggtgacttttgtgccgcaggcccctggggaatagatgtctacaggagggtgtttgcctgaccccagagccaatgtgcacatgatacatagagccgtacacacagggcagggaagccagcttgctgtgggaccctgcctgagccccattccctgcctccatctccagaacatgctgatggcctgtgtcaccgcctcactaccgtatgtcccacatccaagcctcagacccagggattggccaaggatgcgtgggagatcccccgggagtccctgcggctggaggtcaagctgggccagggttgcttcggagaggtgtggatgggtaaggaacacacgcccctgtccccatcccagctcaaagaccctgagtccctctctttaattgtctctactgaacaactgggctgtttttcattttattgttgaacattaactgtacaaattgttacacttgttacaattgttttcctgtgacactttgaaccccgcatgtaacatacttggctcacttccagtccctcaccccactccctgccccccaccccacgctatgactcaccagggtcagcactgaggtgggctcctgactccttgtaacccatgctgctgaagatgaagactagggcatctgtgtaccagccgcacctggggactgggcaccacggtcctcaagggcctgagtgagtgtggtcaggtctcacgccaagcctcagcctcccgatgtgaagaaggggctgatgccaagcttcaagggacatctgcatattagttcagcacagaaagagacagcgctgtgccgtgcggagggagtggtgggaagtcagtgttcggtttcctgtctaattgtgcagccatcgagaggctcctggagcatcgagctgccttagccaaacccaggctccctgctatggctgcttctacccgggtacccacgagtagagggggactatggggctgtagtggctgttgccgtttcaccatcttcctttcagagggcactggaggggccgggtcaggtaggcaagggaagtcttgggttgtgaggaggaaggtcagagggagaagccagcttttaaggtgagaccaaaaggagggtttgggtagagcctgagtgagccacggccttggtctttctcaacctcatctatgattcttggtgtgtggtgggaatctgagggcttcccacctttccctggagctctgcgcagaccagcaaccaccgggaatcagggcatccggcctgacccgacacagctagagagctgacccagtctaccctctgacctgtctctgtgacagggaggtctccctgcctaatgcagcacaggcactgagctgacctcttgcccccagtgaccccagacacagccctctccctcctctgacccgtgctgtggttgctggtgcctcgggtactgactacccacccatcaggctgctgttcggcttcctgtcctgtcctaagcagtcaacatcctagtagcagtcacattgtgagcaggctccagacacacagttcacagccctgggaggggtctccattccctgagcctatttaataagtgtgaatggagagtctcagcgtggtatctggccttgcccaaagcccatgccctgagttcagaggcagagattgagacaggcacttgtgtggactcgcctgggtggccccagtgcagcagaatgatagcctgtgctcatgttcccacgtctctccccgacagggacctggaacggcaccacgagggttgccatcaaaactctgaagccaggcaccatgtccccagaggccttcctgcaggaggcccaagtcatgaagaaactgaggcacgagaaactggtgcagctgtatgctgtggtgtcggaagaacccatttacattgtgacagagtacatgaacaagggtaaggtctgagcccggggtgaccttttcaggtgcccacgcagggcgggccaagggcaacttactccttaccccagaccaccccaatgagtgtacgctacatcagggactgactgcctctctccttttgtaaataataacaaatctagtgggtttttttctaaaagacggcttcttttgtcctttcccactgtcacgatccctgttgttgctggtttggtggcacacacctgtaatctcagtgcccgggggttgaagcaggagatcgtgagtttgaggccaggctgggtacatagcaggactgtctctgtcttggtaagcagcagtgtggggctgaggttgtagctgggttggtagagtgctttcctagcttgcacaaggccctgggtttggtcttaggtttgatccccagtactgcaagaattaggcacacacctgcaatcccggcaccggggagatagaggtaggagggtcaggagttcaaggtcagcctatagagttgggttgcttgagaccctgtctcaaaacaaaaatatatgtacagcatccacattacctaccccagagttccctgctgtccttagtgctgtgactctccatccagcttcagcctcaggcagccactggctagccgggtttggtcctgataaacctgtttgtcttgggctttgcacatgatcttttgcatcttataaccccctgttgtgtctgcctgacctcctccctaccccacttactccaagggcccagtagcattccttgatctagctccctggagtcttggcctttgagcagccctggccagggtctggaagccacagtttcctgcacagggagacccaggcaaggctagagctggatctctctctccagggagtctgctggactttctcaagggggaaacgggcaaatatttgcggctaccccagctggtggacatgtctgctcaggtgagtctcctcttccaccttcctacacctttggctctcgggctcagtgcgcccccttcaggatgcctgctttcattacaccagactctcacctggcaggcgcctggggtggtacgccacatctgggaatcagaggcacatacacataattaagaataaaaataaaatattaaaagtttaaaatttattacttccatttgctagatgaggaaaccgagggacagagaggggtcttgggacaacaggcaggacctggcacgcatctgtgtctatgggtcatctggggcctcttttgtatatactcgcctgcccgcctggctgtgtcttattgtgacctcccattgccctttgctgtcccctctccccctgagctttggtctaccttttcaagccagtgctgtttattataagctgaatgaagttccttgcttgaaaagacacgaggtgggcagggtgtttgggcatccttctatccttctatcaggaataaccagcccgagacaccggcttacagcactgggacgggtgtgggttagcccctgagccaggctctctgtctccacagatcgcttcaggcatggcctatgtggagcggatgaactatgtgcaccgggaccttcgagccgccaatatcctagtaggggagaacctggtgtgcaaagtggccgactttgggttggcccggctcatagaagacaacgaatacacagcccggcaaggtgggggtgcctgggggttatccgatggtatccgtctgtcaggtggaagtgagagtcatgctcctgcggcagactggtagtgagtgataccctgtgctttcttgcttgtaggtgccaaattccccatcaagtggaccgcccctgaagctgctctgtacggcaggttcaccatcaagtcggatgtgtggtcctttgggattctgctgaccgagctcaccactaagggaagagtgccctatcctggtgaggaggctatacctgtgtccctgaccttggccctgggggcaagtctcaccctcccccaaccaacacgccgcccctgggcttcctctttccaagctgatctctgatcacaggctgccttttgtcaggactcagcctcagaagcggggttctgtacaccatagggtcaaggctgtctaggctgtgtcagtctctctggagccatctcttcattgccctctctgttcatagggatggtgaaccgtgaggttctggaccaggtggagcggggctaccggatgccttgtccccccgagtgccccgagtccctgcatgaccttatgtgccagtgctggcggaaggagcccgaggagcggcccaccttcgagtacctgcaggccttcctggaagactactttacgtccactgagccacagtaccagcccggggagaacctatagggactgtgtgcgcagaactgtcacctctaggcttccgggtgttgcctccgatgcacctgcctcccttcatcctctctctggggctgcgttgcctcggcaatgccccttttggagcatggaagggcttcagggatggggcagcctggaaggacaggtggaggctggtacagtgactgtcccatgcctgccatggccacaggctctctctgtgcattctctctggagttagcctgcttctcacaggacacttgtgacagcagagctgggggtggttttccagcctcgacccactgcgctcacctggcactgccccactttcttcaccctgggtctgtttcaagccggccagagagcctttccaaagaggaatgaggcccaggccttggctatacgtacttcctgcccctggccatccttgttggaggcttctgggtggaacactgggtctagaaccttcttccgtggctctcaggcagcccaaggcccaacaccagttgggataagtgtcagagtgagcaccccctcagcccgtcctccacaagggacccttgagatcactgacacatcacccccatttctctgctggaaaaaaccagaatccaggaggggttgtgacctgcccaagaccaagggcagtttagggttgaggtgggcttggcacctggtgctccttctgttcctcaggaactaacgagaactgtcctccaaggcagggggcagggtggggcctgagagtggcttcaagtcggcagggttctgctgcccctgatgctcatgggtctgtcccggggaaagaggcaagcaggaggctgagccaggagcgaggggtagaaagtggtggtgtggaacaggcttctgtttgtcacagtgtgggtgggctggggtggagggagctctcaggctgcagagacagtcaagtagaagaggaagagctaaggggtgtggagtcctgctcctccatttgtcctgatcatttcaacacctggcccttgctctcctgcccgtgccaggactccctaactcagggagggaggggaggtccttagctgggggaaaggaggcgagggtccttactgctgtgtaccaacactgaccccgccctctctgagctgtactctctgcccgtgactatggcctctgtcattgctccgttccaaccccccccccccccccgtattgatagatccacagctgggcgtccaagggggtcctggaacagcagacatctgactgtctggtccctggctcctctgaccagcccttaggctatgtggtggcttctctctgcctcagtgtcccggtctgtaaggtgggcagttgatgatttgtggcatctcaaccaagggcccctgtgtgtgtgtgtttgtgtgtgtgtacacatatctgtgcctgtgtgtcttcccttgtgtccatatttaatgtgtaagaacatccctactctatcccagacacgaccatttcacccattgccccatcacagcaataatgtccccgctactggggacccgagccagccaggccatgtttgcagggaaggatgccaagcagggcctgccctgacagttccactttactcccatattctccccgtgctcctggcgagcctgagcttgccactcggttctccctgcccgactccagctgcccaaggacctttgtgtaaggtggcctcaactgtctggttttctttttttctttctttttaacagtgttttgtagatttcagatgactatgcagaggccttggggacccctccccagctctgggcagggcctggggatcccacattccatgcccaggcttgggggagggggacccagacttgttgtacatattttgcatactgtctgattaaacacaaacagacctcagtttggtcagcagtttattggacatcgactgtgtgtgggaataagaagagtcgtggatgtgagggaagccggcagtcagggtccttgacccctgcagctagtggcttctgggcctggaactgatcagatggggcagatgcggcatgtccgcacttacttgaggatctggaggaggcaccgagtccagggcaaggatgtttgtgagattcaggaccctggcaggatggagcagaactgcctagcatgcatggaatgtgttcctgggtaatctccaaggctgtggtgtgtgtatgtgtgtgtgtgtgtgtgtgtgtgtgtgtgtgtgtgtgtgtgtgcgtgtgtaggcggggtggggtggtccaggtgagctgtgtgtgcttcgtggagagttcctatctacccccatgcagtgttctctctaactttcccttcccactctcagtctctcctccagagttctcacacatctccagcttcatattcagggacggggcttgttcgactctgaaaaatctcttatctctcacaagctacaaactcccattcaatcttcaaaacccgtcagaggccatagaaggccatgcaagttttctctaagctccggaattgtcaggaattgccacgtcatagctgtttacaccgggctccatcccctggaccaggtgctggggggctgggtgagatgcccccagacccaacccatgggagttgtctatgcagggaagggaggcagtggtcacttctctctgtccaccaattccttctctggtttccagttcctcactctggcccgtggtaactgctttcccagggccctgcctgtgagagatggggacaggtgcaaggagccgaagctctgcctggccttcagttgcttccctgaactgcttcagggccaggaccctggggcccttcctgttgggtttgcttccacttggcatacatttttcttccaggaaaacatttccctgtggcaagaataatgtgcctttcttcttgtagcgtaggacaattcagaaaggcacagacaaggaaaaactgaaaccaaaaatcacttgtaccccagactcatctgcccctcctgtccggttggcagggcatctccccagggtgtgtgcagtgtctaggcactcacccttgtctcttgggtctctttgtcccttgggtcctgtgtactggctcacaattgagctgctggtcacaattgagctgctggccctcagttccttcatagaaaaactcggaccagagtttcagcctgggctcagcactgctgcagcccctgcatgtgtgcttgtgtggtggtgtagaaactactcgtggcttgcaagttagcctgccttctgtgtgctcctgccttccactgggggatacagtggcctccctgctctcaaaccaatagccactattttctataattgtatctgtgtgtgtgtgtgtgtgtgtgttcctaaatacacaaatgcgacctgtgcagtctatgtactgttacttgtctgtctgttttcagggctgaccactctgatcttggacaccccgttggcatgctctcccctggggaaagctatctctcctactcagtgttccatagtggcctgtggttctttgtctaggattaaggtttggtgagctgtccccccttctgtgccagcacttctgtcggtgtcatccttgttcaggtcctgttcaggcaggcatgttggtgagacttcatttctgacactgtgaggagtcacactctcacggcaggctctgtttctctggctctcagtctttctgtccgtcccctctgcctctttggtgctggtgttaaagtcctgtgtctgctggaaggtggaggtgcacgttgtgttcccagcactcgggaggccaaggttggcagagctctattgagttcgaggccaacctcgtctacatacagagcaagttcaaggatagccagggccacacagagaaaccctaaaaaaaaaagtcctgtgtcccattttcttttgtttgtttcatactccatactccgggtgtatgtatgtgtgtgtgtgagagagacatctctctggctctgtttctctgtctctccctctgtctctccccccttctcccaatcccagcaggtctgtctttttcccattcattcattcattcattcattcatatcacagacaaatgcacatggctttgatgtctgctggtctgcaaggggtggccccagccccagcccctatcctgtcttctatcctgcaggcctgggtttctgcaaagctcttcaaccccctgccccttgatgcctcctccttccctctctcctagctccggctctgggggtcactgccatcggctggcggggggtggggggnnnnnnnnnnnnnnnnnnnnnnnnnnnnnnnnnnnnnnnnnnnnnnnnnnnnnnnnnnnnnnnnnnnnnnnnnnnnnnnnnnnnnnnnnnnnnnnnnnnnnnnnnnnggctgggtgttgtttcctcttactcccatagttcttctgaaaacattaacagtggagcggctgttcctacccagctgtgtgtgtgaaggagggaaaggggcagacagaggcccctgtccactcttccttcctctccctgtctccagggagctgagctgcccactttcggtcatgtcagcttttacagactgtgtgcatgcatgtgtgtgtgcttggtatgggttaggggggcttcactcacccatttcctgtcggcttccaggtctccctctccatcctgattattccagatgtgtgggcttccctccgtgccacccacccccttcccctctgtttttataatctgcaaaccctggaagctcgcttcaccctcccttcctccaatgcgcagggaacattgtttcatccattccctccctcagtccatccatttgttcccttgacagatttgtatggcgtccccaatgggagtgacttaggggctagaaaacaagctgggcccaccaaccaccttctgtttaaatgacaagacaggacagatgctgaagtccccaggcctcaggagaatagagacaggccctcctgagcttgtctggatggtagagtagaacttcagggaagtaaaagtctgattacccgtgggggtgtctatgtgtgtgcttgtgtgtgagcatgtgtcagtgtgcgcgtttgtgagcatgtgtcagtgtgtgtgtttgtgtgtgaggatgtgtcagtgtgtgtgtttgtgtgtgagcatgtgtactgtgtttctgcatgtgagcttgtgcctgtgtgtgagtttccttaggtctagacttcccggcagcacctgacctcccacagnnnnnnnnnnnnnnnnnnnnnnnnnnnnnnnnnnnnnnnnnnnnnnnnnnnnnnnnnnnnnnnnnnnnnnnnnnnnnnnnnnnnnnnnnnnnnnnnnnnnnnnnnnnnnnnnnnnnnnnnnnnnnnnttgtgtgtggactgtggtacatgtgggtgtggctacaatttgtactgtgggagtatgacatgtggggggagacctctggtaggtgaggtgtagtggggtacatagcttatgtatggtgtgtgtggtgtggtgggtgacacacagtgtgtgcagcagggttgtgatgtgactataggtttgaagggtgtacaaggcatgtatgaagccttggtggtgtgatgttgagccttccctgtgcctggatccctttcatggcgtggacagagatgattccatgttacctgtgttcagactttgcacacacacacacacacacacacacacacacacacacacacacacccccgcattcagccctctccagggtcctgcctcctccctggctgtttcccagtctttctttgtctcctgtgtctctgccccgggttacagccctgagtgtctctggcgctgattagtttcaattgagctgtgattgcagagcccctccctctgtgcgcctgcagcatcctctatgcccctcagcactcttcatcaatctctgcccactcccaccccccagcttgttcaagtcccctcaggcatggcctcttggtcaggctcctgccctgctctgggcagctgcctcctcttccttagctttggggtcaccgccattggtttggaagtgtttttcattcccggggctcttcagaaagggcctattgtgaagcaattgttgctgccgcccatgtgtctgactctgggagagtgtggggggttgggtggggtggggagacatgagaagggtccttgcagcttctgccatgtggctttcatgcccatctctatgggccatgggtgcccatctgggtactcagtgctctttgtttccgtgtggccaagagcaagtgcgctggaagcttgagactctgagcctctccctgccttgcctgtctccagggtgcttctgaaatctgcctggccctgcgtgtgcagcattcagaggtgtgtgtgtgtgtgtgtgttgtgtgtgtgtgtgtgtgtgtgtgtgtagctgcctggcaacatgtcatctctgtcacttgctctaatcctttgtcccactctggggtcccaccccctttacattttcttttggtcagcacacactgaagctcctgtgagtgagcatgggtgagccccagccactgtctgcactgtgtgcctggcctgcaggcttgcccctctcccgggaccctttggggtaggagggcgctctcccaggctttgtacagggtttgcttatgctctaccgatatgttccaagacccacctgcccatccttctgtcctaccgtcctcctgtttgttcaagagtcatttaaaatttttttccttttatttatgtatttagtgtgtgggtatgtgaatcaaataggttatcaggcttggtggcaagtgcttttatcttctgagctatccctccagacagtcatttgtatttcagacattacatggttttcgtttgtctgggtggtgagtatgtgctacaccacgtatgtaggggtccaaggacaacgtgtgggaattacttctcttttgttttgtgggtcccggggactgaactcaggtcttcaggttttgtgctaggtacctcttcctgctgagtcatctcactggcactcagaaatgatttccaggctcccatttggggtcacagtgcagagtccaggcatccaggaccccttgcctactgcccagccccctaaccctcacggcccacttcttcctttcacttccagccctgctcccactccctaccccacaggccacaggcatctcttaaggcaattccccactgcctgctaaagagttttgtggtctctccttgcagataacagtctgctctttctctgtggtcctactgtgtgtgttgcttttgtcctggccttacttacctgggtggcccaagcaacctcacatgtgaacctacagttgccaccctatcccgtgaatatgtgtcaccttctttttcttgacctcttccactttaaatcagggtacagcttgttgaccatgggataattgactctgaattttgtgattgtcccatctctggttgacatttgttttaaatctcaaacaaatgtgagggtgtttaaaaaaaagtatttacagagttatttaggagtcgtgtgtgtgtgtgtgtgtgtgtgtgttagcttcctcctgtctctttctgctctccccatatttcaccgaattctgcctctttgctatatgtcagagagagagagagagagagagagagagagagagagagagagagagagagagggagagagggagagagggagggaggaagagaaggagggagaaacgacggggaggagagagagggggaaggagacgcaggggggactcctcaccatcttggtccctctctgcttctccaacctctgcccctctctctttctctcccgccactcctgggcactccccactagacagtttcaggggagcctggccagatttctcagctgttgcctctctatcacctcttttgctgtctctgaggggcagaacaggattctggcctccatccttcctgtcatccgtctcctttggaagctccttgctccctggtgtagcttggctttgagttgggatcttggaatcaagtctcagacccacacacctcacctggcctgtctttcctgcccccagatgtccccttagactccatgttgtctccactcctggaaggtttcttgtctgaatctccttctcagcccgtgacgcactggcctttctgatgccccctgactcgtggctctcatgagcttgtgggccttctcccttctcctcaccctgctgtaattgtctgcagcctccaggaacaccaacccagcctcctctaccccccagagccccttcttgctcctcctccttgcccaacaaccctgtccctacttcagggctcagcaccctctctgaaggaaccactctggtatctgtcacccaagtccaggtctcccaacactcctaatttacactaagcaaccccacttttgtgttggtcttgcctacagacccctagtatagccccgaccacctcactcagaaccccaacttgattgacataccctctatgtcctatttatgagtcctccctaatagatcctgcctcccctctggggcccagcttccctgacacctgtcacctgcctggtacaggggctacccgtggtctcccttcaccaggctatcgggctattcaacaactgactagtgtctgttggggcagccccgagaggtagataattggcttgggctggagaggccacacagcacgtgttctgcctcactctcctcatctgcatctcccaatgtcctctgcttcccttcccttctctgcgtccatccttggggtgtgtctggtgtctgagggaggttctgtgagctctggccccagacagaagattggagtctgtcacctctgggtgttggactttctctctgtgggtcagtatacatatagcttacatgtgtcaatgggcatgcatctggcactccatgcgttggggtgtagacccagctggccttatttgcccatctttatgtgggtcactggtcattctgtcagtgtaagtggtgacttgggtgtctgtgttctgtctgggtggtgaggtgtcttccttttctctgtggtgaactcaccaccctgctgtcctgcctactccttccccgtggccttcttccttgtagcccctctcctggggactttgctagggcttgcatgtcaatgtctgtgcctggcggcctctcaggcagtgaagtgcgtcatagctctgactgagatggctgagcgtgggctcagcttgcgtgcatgcgtcatcctgagccctggtggagttggggggggggtctcgcctcgccttgaagctcccactctaccagctctctagctccctccctacctccctccctccctttctccctctttcctaagctttcttcttccttccagcctttgtctgttccctgttgcttctccccgtagctcctcactctgcccccttcccctctggttacctctgctgcagagccagtgttggaagaacttttggggttcatctgaatattccatccagtcccacagggatggaactgcttggggcttctcgtggactttttttcttttcttcacctgttctccctaaggtctctagggcaccccatcacagaatgcagttcccagtactaaccacatgtacgggaagacaccagctttccttggccagctgctcgtcctggtctccagcctcttctgccactagcccttgttttcctctgcccaacctttacttaaatgtgatgagctgcttctacctcaggaccttcatgcatacggttctccctgcctggaaccagttgccagaggcttgcctgctctcactgcctcctttaggtctctgctcctgtgtctcctcttcagagaggccttccctggggtcctgctgtccttagcaagacaccctttgtctgacttcacagctgtcaaataatggggtcccctttaggtgtagcctctgtgtctcttccttacatgttgcctcccccctagcccccactggttctcaacctccagtctgtccctccaggttttgttctcctcagggacaacctgcttcctagctccctgagctccacctgtccaagnnnnnnnnnnnnn

SEQ ID NO: 745 - DNA, 1623 bp, Mus musculus
atgggcagcaacaagagcaagcccaaggacgccagccagcggcgccgcagcctggagccctcggaaaacgtgcacggggcagggggcgccttcccggcctcacagacaccgagcaagcccgcctccgccgacggccaccgcgggcccagcgccgccttcgtgccgcccgcggccgagcccaagctcttcggaggcttcaactcctcggacaccgtcacctccccgcagagggcggggcctctggcaggtggggtgaccacctttgtggccctctatgactatgagtcacggacagagactgacctgtccttcaagaaaggggagcggctgcagattgtcaataacacgtgagtggcctggcgagagggagactggtggctggcacactcgctgagcacgggacagaccggttacatccccagcaactatgtggcgccctccgactccatccaggctgaggagtggtactttggcaagatcactagacgggaatcagagcggctgctgctcaacgccgagaacccgagagggaccttcctcgtgagggagagtgagaccacaaaaggtgcctactgcctctctgtatccgacttcgacaatgccaagggcctaaatgtgaaacactacaagatccgcaagctggacagcggcggtttctacatcacctcccgcacccagttcaacagcctgcagcagctcgtggcttactactccaaacatgctgatggcctgtgtcaccgcctcactaccgtatgtcccacatccaagcctcagacccagggattggccaaggatgcgtgggagatcccccgggagtccctgcggctggaggtcaagctgggccagggttgcttcggagaggtgtggatggggacctggaacggcaccacgagggttgccatcaaaactctgaagccaggcaccatgtccccagaggccttcctgcaggaggcccaagtcatgaagaaactgaggcacgagaaactggtgcagctgtatgctgtggtgtcggaagaacccatttacattgtgacagagtacatgaacaaggggagtctgctggactttctcaagggggaaacgggcaaatatttgcggctaccccagctggtggacatgtctgctcagatcgcttcaggcatggcctatgtggagcggatgaactatgtgcaccgggaccttcgagccgccaatatcctagtaggggagaacctggtgtgcaaagtggccgactttgggttggcccggctcatagaagacaacgaatacacagcccggcaaggtgccaaattccccatcaagtggaccgcccctgaagctgctctgtacggcaggttcaccatcaagtcggatgtgtggtcctttgggattctgctgaccgagctcaccactaagggaagagtgccctatcctgggatggtgaaccgtgaggttctggaccaggtggagcggggctaccggatgccttgtccccccgagtgccccgagtccctgcatgaccttatgtgccagtgctggcggaaggagcccgaggagcggcccaccttcgagtacctgcaggccttcctggaagactactttacgtccactgagccacagtaccagcccggggagaacctatag

SEQ ID NO: 746 - protein, 419 aa, Mus musculus
VAWREGDWWLAHSLSTGQTGYIPSNYVAPSDSIQAEEWYFGKITRRESLLLNAENPRGTFLVRESETTKGAYCLSVSDFDNAKQVKHYKIRKLDSGGFYITSRTQFNSLQQLVAYYSKHADGLCHRLTTVCPTSKPQTQGLAKDAWEIPRESLRLEVKLGQGCFGEVWMGTWNGTTRVAIKTLKPGTMSPEAFLQEAQVMKKLRHEKLVQLYAVVSEEPIYIVTEYMNKGSLLDFLKGETGKYLRLPQLVDMSAQIASGMAYVERMNYVHRDLRAANILVGENLVCKVADFGLARLIEDNEYTARQGAKFPIKWTAPEAALYGRFTIKSDVWSFGILLTELTTKGRVPYPGMVNREVLDQVERGYRMPCPPECPESLHDLMCQCWRKEPEERPTFEYLQAFLEDYFTSTEPQYQPGENL

SEQ ID NO: 747 - DNA, 40070 bp, Homo sapiens
  misc_feature (1)...(40070): n = A,T,C or G
tctgttgcccaggctggagtgcagtggcattatctcggctcactgcaacctctgcctcccaggttcaagcgattcttctgcctcagcctcccgagtagctaggactacaggtgcctgccaccacacactgctaatttttgtatttatagtagagacggggtttcaccatattggccaggctggtcttgaactcctgacctcatgatctccccacctcggccttccaaagtgctgggattacaggtgtgagccactgcccctggctgatattttaataatgctaagctttctttcattttattttctaattgcaattggtatatatacacataattgatttgggaatgttaacttaattccctgccactttacttaatttgcttttggtttaatagttttgcagtagattctcttggatttcccagacttatacctataccaaatactataataatactcttttttttttttttttttttgagacagagtcttgctctgttgcccaggctggagtacagtagcgtaatcttggctcactgcaacctccacctcccaggtttaagcgactctcatgtctcagcctccagagcagcttggattacaggcatgtgccaccacacctggcttatttttgtacttttaatacagatggggtttcgccatgttgtctaggctgatcttgaactcctgacctcaggtgatccacccgcctctgcctcccaaaatgttgggattacaggtgtgagccaccacacctggccaataataatactcttaccttctcttttctaattccatttattcttcaatttctttttnnnnnnnnnnnnnnnnnnnntgccatgatctccactcactgcaacctctgcctcctgggttcaagtgattctcctgcctcagcctctcgagtagctgggattacaggtgcctgccaccatgcctgactaatttttgtatttttagtagagacgaggtttcaccatgttggccaggctgatctcgaactcctgacctcaggtgatccacctgccttggcctcccaaagtgctgggattacaggcatgagccaccgcacctggcctctttccttttttttttttgagacagagtctcactctgttgctcaggctggagtgcagtgctgtgataatggctcactgcagcctcaaccttccagactcaagtgattctctcacttcagcctcctgcgtagctgggtctacaggtgcacaccatcatgcctggctaatttcttttgtgtatttttggtagaaatggggtttcaccatgttgcccaggctagtctgaaactcctcaggctcacgtgatcctcctgcctctgcctcacaaggtattgggattacatgcatgagccaacacacctggccaaatttttgtgtttttttttagagatggtgttttaccatgttgccctggaaagtatgaaactcacgggctccagcagtccgtctgcctcagcctcccaaagtgctgggattacaggtgtgagccaccacacccaaccctctttttctaagctaattgtattggcaagtatcttagagtggggttaactggtggacatgtatcttagttcattcaggctgctgtaacaaaataccatagactgggcagcttaaaccatgaacatttatttctcacagctctgaaggctggagagtccaatatcaaggtggcagcagattcagtgtctgatgaggactctcttcctggtttgcaaacggccaccttcttaatgtgtcctcacatggcagagagagacagggctctggtttcctcctcttctcataagggcactaatcccgtcataaggactccatccttatgacttatgtaaacctaatcacctcccaaggcccacctccaaacaccaccacactggggattagggcttcaacatgtgaatctggggtgggggatgcacattcagtccatagtgatatccttgtcttttctgggttctttccctgtaaaggggcttttgtaggccttggctcctaatcaactccaccagacaacacccctcaggaccatgcacagggcatggcacatgtagtaggcattttggaggcttttgcctaactgtcaaagtgactgcaaaagagggcaagtgtctgaacaaggtcttccacagaaatcataataatagccaattagatattgagcactttctatgtgccaggcactttacaaatatgacatcacgcttcctcacaatgaaccccacattatgtaggaacaatcacaccaattcccatttcccaaggctgcatggttaggaagttgcaagctggcatctgaacctggcattctggccccgggccacctgtatatatatatacatattttggagatggagttttgctcttgttgcccaggctggagtgcaatggcacaatgtctgctcactgtaacctccaccacccgggttcaagtgattctcctacctcagcctatcaagtagctgggattacaggcatgcgccaccatgcccagctaattttgtatttctagtagagatggggtttcaccatgttggccaggctggtctctaactcctgacctcaggtgatccacctgcctcggcctcccaaagtgctggaattacaggcatgagccattgtgcccggccccacctgtagtttttgactgctctgtgatgcttctgcttccctggagggtctaagatgtgggcgatgagatcataggttgccctctgacccctgtgttgctttggaccatggggtcattggcacagtgggcggggtaccagaggtaggttctgacactgctctcctgaaccgtgagcatcccagctctgctgcactcacttgctgtgtggccttggacaaggttttagtttctctgaaccttgatcccatctgtaaagtgggtgcagttacagtccctgcgtcactgtgctgttgggtcaattaagaaccaactgtgtgtaaagcgcccagccttgtgcttggcattcaaggccctgccactgcctcctcttattccctggaatgataataacaacagtaaacaacattgtgtgctgtttgtcatgcacttattcttttcctgccacaaggactctcactcgtacttttcagttgttaggtttctatccccattttaaaggggaggaaactcacaggcaaagtgacttgcacaagaaaatgtagctactaagaagtgcagccaggactcgaacccaggtttgactggagtcctcactctcagctcctaagctcctggcctactctccacccttagaagaggtgagatgatgttcttcagagtcaggaaggaaggggctggtgtgtggtggctgaacagcagtgtgacctgagcatctgtgagccaggaggtgagagagagtgtgtggcaccctgtggttgggtagatcattgtgggaggatgggacacgccgtgggagcatgggacacaccatgggagacggcagcaccaccagctgcagggccatgtggacccaggtgatggctttaggcctcatccacaggcttatgatgggaagctcttgaatattttttaaaaattgtcactttagaaaatcatgacaaagtcatttctaaatgtcaactgatacagggtgtaaagtgaaaaagggattttcctctccccatcccacacttttgagatgaaacattgtgatgaatttggaatccttccagagctttctttttttaaagtttttttaatttttaatttttatgggcacatagtaggtgtatatatttatggggtacatgagatatcttgacacaggcatacattgtgtaataatcacatcagggtaagtagggtatccgtcacctcagttatcattcctttgtgttacaaacaatccaattctactcttttagttttttttaaaattattattattattttatttttattttttttgagacatggtctcactgtgttgctcaggcagagtgcatgtgtgtgtgtgcaatttcctttctttcttctctttttttttttttttttttgagacagggtctcgttctgtcatccaggctggagtgcagtggcgcgatgatagctcactgcagcctcaaactccagggctcaagtgatccccccacctcagccttccaagtagctgggactacaggctaatttttaatcttctatagagatacagtctcactatgttgcccaggctcaatcttctttacagagataatagcagctcatgtttgctacaggtccagtaccacattaagcccactgcctgcattatcatgtttgattgctcacaaccctattatgtgggtagcatcgtccccattttccagaggaggaaactgaggccctaatatgcccagaggagattctaccctgccgctgccttcttttcactgaaacagtgtgttggggtctcttatcaggccactctcagctctcattctttgtaatggctgcactgctgtccacttgaggactggagcccctttatttaaccagcccctctctgaggaacacgtaggttgttaatggctttctgtggagagttttaagcggaggaggcccagttgtctgtgaggtttacagagccgcctctggctgcggggggagggtggactggaggggcccacactgctgtgtccaggcctaggatcacagggccctggcctgaaggactggagatagacagggtggaggggaggaatgcgcttgaggaagattcaggaactaccccggggctccccaagggcagagccccacacagggcttggcacgtggcaggtgctctgcgaatacctggagaatgactggggtgggatgtgcaggggttgtcgctgagtcagtgatggggatgggggtgggggggagatgcaggcttagcgggaggtactaggccacttggggacctgctgagctcaaggcactgggaacgccgagggaaaagttcttatagcagcaactcggcacctctcgagggagcgagccatagtgcaggccccctgtctgctgaggagtccagagcccacggtgaggagtggcttcccgaaggaaaggggccacctttccctgggaacctcaggcagccccattgtggggcccccactgcttccccttgacccccgcaagggtctatctctaccttggaggctgcaagtggcggaagagatgaggggggttggcccctctccaaggagcaactcatggtgactcggcagttgggccccagaaccaggaagtgcaaggatagagctctgtgccagggaggagggtggtctctcatgaggtcccacggcatggaagcagccctccgagactaactcccaccctcactgagtcatcgagtgaagagccgtgtagctttcgagaccagcccagccgacatggtggaaccccgtgtctactaaaaataccagaattagccgggagtggtggcactcacctgtaatcccagctactcaggaggctgaggcagtagaattgcttgaacctgggaggcgaagggtgcagtgagccgagatcacaccattgcactccagcctgggcgacagaggagactctgtctcaaaaaaaaaaaataataataataattagccaggcgtggtattcggtgactgtaatcccagctacttgggaggctgaggcaggagaaccgctggaacccgggaggcggaggttgcagtgagccgagatcgcgccactgcactccagcctgggcaatagagtgagactccatttcaaaaaaaaaaaaaaaaggaaaagaaaaagaacgagagagcttggagtaaaaaaaaaaaaaaaaaaaaaaaaaggaaaagaaaaaagaaaaagaacgagagagcttggagtggcctgagaagatgctctgaacacactaacacataaagtgaaaagagggaggcggcagtgtagaatctcctctgggtatctcagggcctcagtttcctcatctggaaagtgggggccacagtgctacccgcatgaccctcagtgggccattcttgctcaaggacgttctgctcggagctttctcaggctttctctgggagtggggtgggctgctttatcctctcacccctcttccaaggccatctggctgctttgtgagagagatccctgggggtaggaggtggggcctgtgagtttcggcccctgattcccacctgcccagtgtggtggccccttttcactctcacccatgctgtgtgacttcaggcaagttcttcaacctctctgtgtcttaatgtcctcaacagtaagataaagacatgattagtatttacctcctagattatcatgaggagccgatgagtcaatgtttgcaaagtacttagagcaaggtccaattcaaggtctgagctctgggagtatttgaataccacggaatgatatttagtcttttcagtgtggcattgcaggaacaaagtaggatgcaaattatacatccatgcccatttagtcttttgtctattctgcaaatagttccagagcacctagtgggtgtcaggcccgtcctggtctctgggggcatggagatggatcctgcctggccctgacagccgcgagtgcacagtggagggcactgggtggaccccagtttgttgaccgtcttgcgttgctgtgacgctggaaggaaacgcaccaccacacccaggtgtttgtcttctaggggcagaattatggggcattttcttttattttttcttttctttttttttaatcttcttgtagttctcaaagagtccactctgaatgataaaagttaccatttacggaggcctggtaacgttccgtgccatcctgagcatgttccgtgtacttttctcacggattctcccagcagtcctgacacgggtgttattcccgatcgatagagaggaaaactgaggcgaagggcggccggccaggattcaaaccagggagtctgctccagcactccggctcttaacctcaaccgtctgcctctccacaaacaccaggatcaaccaccaagaccaaaaaaacagtctcacaaaccatcaaacattgcacttggtggctcaggaccttagcttcgtcttaaaggtccctgttatgctttttctgagtgccccagtgtggagtggtcttcgtgtttgtgagtgcaggggtcaggggttgtgtcttttcttcttgtccccttccaagaggtgacatgtatccttgatactggaagggcccttaaggtctagccctggctctctgtctcccttcatggcacatcagccaagtacccattctcccgtctttgattacctccagtgacagggagctcactcctcaacatttattttattctaaagaaaattcaggctcttagatagttcttcctccataaaaattttttaaaaaaatttttacttcctcttaaagtctcataaacaagtcccctgctttggggtcctgaggcaggacctggctaattcgtctctatgtccccctatagtgaggagcacagggcctgctagtaggtactataaatgctgcaccaggaagcaagtggctagggggcgggctggttgggcccccatcaatccttgggctgcaggtaaccaggtcagcagttcttgtgggacaccagctgggtgagtgctgatgggtatcgtgacctcaatggaataggttgccatagaaactgactttggacctgtccccaggtccattgacttgtccctcaggagaccatggtaatcccttgagctcttcagcaggtctccccagggcctccccaaccccacattctctgagctgggtggtccccagggagcatgcaaaccatacccccattgtgcagctgggtagcctgaggccccaggggcacaggggacaggctgaaattcacacaggcagggggcgtctcatagctgggctgggcgctcagggcaaacagccttgcccgaggacccagccagtcagggggccttttccccactcatgggttctcagaggaaattctggaccgattcccaggccttctgcctccccaaagaataatcggaacctgcctccctggtgtgtccagaattacacaatatcaataacggctgaggtgacctgtgatgcccctagcaccctacagtgtcttgtgcatttatcacaatgaccccatcgttacagatgaggaaacggcacagagagaagttaagtcacatgcctaaggttacacagctatttaggggtagagccaggatctggatgtggagagcccagctccagagcccactctcaccaccatgccataccctgtctcgctcttgctttgagagggttgaaaagactttgggagggttgaaggatatttcaggtctaggaggctcttagcacgggcctgctagagccatagcctgatgaacagtgatcagagagtgggcgccattatgatttctctttctaatgacatcctcaaaacagtgctgagatgtctgctttatccctgctttgcagatgaggacgctgaggcccagagagggaaagccacttgcctagggacacacagcggggagaggtggagcagggcctctatttcgagacccctgactccacacctggtgtttgtgccaagaccccaggctgcctcccaggtcctctgggacagcccctgccttctaccaggtgagatgatggccctatcagggctcaagatgggtggggagatcccagcgaatctgggtgggagctgggaccagccagggcctgcggatggggaaatgggaggcagagggtggtggcaggactgtgggcgtcagggggagttttcaacttggtttactctgtgtttccgtctctctggacctcccaggtttctggctctgaagtcccttagctcttaaatagtcactcattcgttcagctgtttactgagcacctactgtgtgccacaccccatgctaggcactgggagcacagcagtgaacaagatgaacaaaagcccacgacagtagtcacataaccacatgaattcaaacaacaaaaacaaaacaggaccacatgttatcaaagacagacacaagtcagggggacccagtgaaaggatttggggaacacttcccaaggaggggacttttgagttgagaacggaaggaggcaccagtcaccctggtgaagtggccagggaacagcatttgggcagtgggaatggtatgtgtgaaggccctgtggctggagtgagctcccagccatctctgcttcaaacctcctgctgtatggccttggctgccacttttagcacctttccccagcgttaggcaattcccgtcagccacgtattcattcaacaaaccctcaatgagccccctccatgtgctaggtgcccgggacataggcgtggctcagatactgtccctgccaggagggagggaaacagtgactcagggggaggtgggtgggtaaggtcagggcttctgattatgaggcatttcttccgttcctggcgctggaccgaggaagccctttacggatggatgccatccttacgctcattttacagatgaagacatcgaggttttgagaggctaactctcccaaaaaggctggtgcccctgtcccccatttttttcttttctttcttttttttttgagacagagtattcctctgacgcccaggctggagtgcagtggcaggatctgagctcactgcagcctctgcctcccctgttcaagcgattctcctgcctcaccctccggagtagctgggactacaggcgcgtgccaccatgcccggctaatttttttttttttttcaagtagagcccgggtttccgcgtgttggcccggcaggtctcaaactcctgatctcaagtgatccgcccgcttcggcctcccaaagtgctgggattacaggcgtgagccaccgcgcccggccctgctgcctctccttgggcctcgttttccctatctgtggaatgggtgggagggaggccggccaaggggccccggcagccctgcctgttccagtgtcttctctctctcctgccaggaccatgggtagcaacaagagcaagcccaaggatgccagccagcggcgccgcagcctggagcccgccgagaacgtgcacggcgctggcgggggcgctttccccgcctcgcagacccccagcaagccagcctcggccgacggccaccgcggccccagcgcggccttcgcccccgcggccgccgagcccaagctgttcggaggcttcaactcctcggacaccgtcacctccccgcagagggcgggcccgctggccggtcagtgcgcgggcggcgcggggtcctcgcccacctggggccacggcggggaggcggcggggctgtgtgcccggggtcgccccctctgcgcaggcccttcctctcgccaggggtagcgcccctgggtgacttgggtgtccggggggtgggggggcggccgtacacactgtgaagcgtccgcgccgccgccgctggctttggggtggagcaagcgcaaaagacacggggtgtggttaatgggttctaattggacgcttaagcccaagaagaagaagggcggcgcgggaccgggcctgttgctgccttggcgcccagtcctttttcgttgcctgggtccgcccagagatgagtcgggacgcgcggcccacgtgcggcggaggggcagctgggtcgctcggggaacggggcaccggatggccccggttgggcccgcgccaggatgcgcccctgcgccctctgctggcgctctgcggtcaccgcagccccggagagggccgttttggagagccgcggcggtgccccagacactccacgcagacttcactccttcactcagacccgttcactctccccacaggcacacgctgggccacacacacggctacacccccgccagggacacgcacacatgcggggtggaggcagggtcacagacacccgcagacacatccccaacgcagatgtacccagatacaaactcacatgcacaggtgacctcacacttgtagctgaagacacacgcacatgccgtcagaagcgcattcagagacacacgctcagctggaaatcacaatctcaccatcgtggccgcccaggagacagatacacacaggtgcatcgagaacatgagaacactcagagacacacggacaggcgtggacccttcagacgcagacgcacgcccaagcgagagaaacagacccacagacacaccattcatttgttcaataagtatatgtggagctcctactacaggccagggctcctctgctgcccgggccccagcggtgcagacagaacccacctgggggaaggaagcaaagggcagctcgtggagggtgttagaaggggcgctgctgcgaaggcgcaaaacaggcagggagggagggctgggggatgtgaggaggtggaggctgtagcttaaaatggtggaagggggtacgggggcctttctgagggggcagttacttggagccaaatcttcctggacaccaggagcgcccagagtgacacactttatagagagagagcgagcctcctgggggagtgttcttcattcaccgcttccttcagcctatagctctttcttgagcacctactatgtgcctggctctggaaacaaaacaaagatgctggttattggcgacttctgctcctagagcaagacaggcaccaaacagataagccagcacccagcactgcccaaagccccggggacggacgcggacaggaagggatgctcccgctcccacacgcccttgcagggatgcgcagatacacggatgcagtggacacgtgcacaggcccatcttcactgaacctgactgtgtctttgggctgagcacttgcgtgtgggagacaaatccactcctcctgggtacagggccatcctgcccatgccttccctggctgtggccccactgttctgacacaccccacccctctctgcaggtggagtgaccacctttgtggccctctatgactatgagtctaggacggagacagacctgtccttcaagaaaggcgagcggctccagattgtcaacaacacgtgagtgcccccttccctattgcccctcagggctgggtggtgggacttcaaagcgggcaggggctcatgcaggatctggcatcagggcagcacagtgcagagcccagggcagtgcgaagcccagggcagtgtggaggcaggcgcctgctgcactctcgccctgggcagcacctgctgttgctcccccagccatggggaactcctcccaatccctggctctcgcttgctccctccagccctctctcagcttctccctctctctgcttctctctcgctggcccttaggaggaaggtggatgtcaggtgtgtacatgctccgtgggcggcgggctgggcggggtgcttcgcggggggtgggggctgctgtctgcatgtgcttccactccctgcctgtgatctctggctctcttggctgctcctcacctcccagcttctcccctcccccctccaccaatttgattaggtcctggaccttaacgcaggctgcgatcaggggcccttccattgcactctcctgcacatctcctccccatccaccttcctactcactcaccctcccattctgccccgtcagcccacccaagtatctgctgcatgcaggacccagtgctgtgatggggatagcctgggtggagaaggccttggccacgtccccctggagccagcatgtggccagggagacagcacatggccccagcccaggccaagagtcaggcagtgggcgagcccagagtcggctcctggagcccctgctgtggacctgcctccggtgatgaccacagggactgagagggtcaagggcctcgaaggaaagccagtgaagttatctggcaggtggaggtggtggaagggcagcttgcgggagggtgccggactggagggggctgacgccttcacgggtgtggaaggcaggaaggttctagaaggcagaggagaatcgatccctgggtgtcctcgaaggcctggctaaggaagttgggggtttccactgccccgagcgtgtctggcttgctcatgccccacttgccttgcgcatgctcttccctttgcctgaaatgccctttctccagtgtctgcctggggaactcctgttcatcgctcaagatcagtgcaggactgccttctcagaggggcaaaggggaacagaggtgccagttgccatgccagtcgtctccacctgtgtccttgtattgactcctctctgcagtctagccagggctgaagtgatcggggagggggctgtctccattttgcagatgaggaaactgaggctcagcgatgtgaaggcccttgtccaaggtcacacagctgccaagtagcaaagccaggattggaaccgaagcagcaactttctgccctcctcaacctgctcttggcgggggggtgggagggggggctctcccggctccgcctccccccttgcatggccgagtcctggtgcgaagctacagtttccttattgtcaccagctgtttgtgtctgcttcccccctaaactgggagctgctggagggtggctctctggtgcacctcacttctgggtccccatagcacctgtaactcagcacagtggcgggtgcccagcaggtgatggtgaacaggatgaatgaacagcagtgacaatgtcaccatttcttgtgctctctgtgtgagctgggccctgtgctgagtgcttgaagttgcgttattttatttacgcatcaccatagcctcgagaaatgggaagtcttacttgcaccattttacagatgaggaaactgaggcccaaagaggtgaaataacttacccaaggtcacatggctagtagtggcagagctggaagactaggctggccctccgacccatgatcctttcaggaaggctcagtggaggtgcagcagaggccacaggagggagaggcccgtgcaggggaggggcgtcagcaggatggctctgaagtcctggtggagtctctaccaagcgtctcagactggggtgacagctggggcagagctgtggaggcaggaagggctgggagaactttggttctgcctttttcacctggattcagagagtagccccatgcttgcctttttccagccctttccctccactcttcttgtcttccagggagggtgggctgggggaggtttggccaggaggctggggctgccaggaggcctggaagtgatggaatctcattcagggaagaccctggggtagctgattgggagatgggggtgggtggattgggagcccctcctcatgtcacaatgctccaatgctccttcgcttagacgtcagagatggtggctgagcgcggtggctcacgcctgtaatcccagcactttgggaggctgaggcaggaggatcgcttgaacccagaagtttgagaccagcctgggaaacatagggagacctggcctctacaaaatataaaaataaattagctaggtgtggtggcgcatgccagtggtcccagctactcaggaggctgaggcaggaggatcgctggaaccaggagttgaaggctgcagtgagccatgatcgtgctactgcactccagcctgggtgacagagcaagactctgtctcaaaaaaaagaagtgaaggagggaggtgtaggtggggggctggtattagtagaagaggagagggaaagggatttggggggcggggcttggtaggagatgggccaccggaatttaaggtgtttgagtctcacacctcatcccggggacccgcctgcatgcacgtccttcctccatcagtgctcagggcctattactgtgcagtgcctcccccaccctgtaagagtggggggctttctgaatctagcatggggcccaggcacgtgtggaggctgggctggctgtcagggcagtagagagctagaggaggaacccgtctgtggatggggtctggccaagtgggggtcctcgcagtagcagacccagagatcccgcgccatggatcttgctgccacatggccctgggtcctggtattctgggtattgtgtggccctgggtgtgaggaagccctctggggctgaggtctgactgcctcaagctccctcatctgacatcctagtctcaggagtcagggcccctcctgggtctgactctgggttgctccctgaactgccccttcctcccacccaaattccaggagcttcttttgggagttttctggcaggcgcttctgggcaacagcgcctcagctggcctctgcctccttgcccccggcatggcggcagggggcacctcgggagtctagagcctcggggtcctgccttcatgctctcctccagagacctgtgctggcttcacccctgcctcgctcctccctcaccccacagaccatgtgctccaggtcttggggcttggcaattgacctcctggccactgcccacctggccagcctcagctgtggtgcaccagctcagcggccatccccagagtgccctcccaaccagtcccagcagcccaagggagcgaatgtcagtgcccacgctggcacatgtcccaggttccaaagctgccgtgcccctgagccacacgccaccctggctggccccaaggattagggccccaaaagaggatcctgaggctcagagaggtgaagtcagttgcttgaggtcacacagctggtgaccagcagttgtgaaaaatcatggctctgggactcttggcccttcttctagccatgggtgggaaggcttcccttccttccctgcttgctgcccacctgatgaggaccaggcccgggggaaggtgctggatgccgtagaattcctctccctgatggcttgatgctgctgtgactggtgaccgcagccaccggaggcagctttgagcctcccaagcccttgacatgggaagatggggattgatatctccatttcacaggtgggcaaactgaggctcagatgatcatcacagtcgtcatctcagtttactctgagcccagcatgacgctcactgtttacacactttgcctgcaagggagattctgtgaatgttgtctgctttttacatatgaggaaactaagactcagagagggcagggtacttgcccaagatcacacagcaaatccttgttggagactgggactgtgctgctttggtttttaaaaagggtcactgtggaaataccaatttagttgtttttatttttattttttagctaaatccagatctaacagctgatgcatgttgtgctgggctctgatctggctttttttttttttttttttttttttttgagaccggatcttgctctgtggcccaggctggagtgcagtggtgcgatcttggcttactgcaatctctaccttctgggttcaagtgattctcctgcctcagcttcccagcttcccaagtagctgagattacaggcacgcaccaccatgcccagctaatttttatatttttattagagacggggtttcgccatgttgctgggctggtctcgaactcctgacctcaagagatccatccaccttggcctcccgaagtgttgggatcacaggcgtgagccaccgtgcgctgtctgttctggcatttgatatcctgggagggagacatgctgaccctgcagatgaggaaactgagactggcgagtgtggtatggaggggccaaggtcagacagccagcaagtggtgagctgggatggtgtctagggcagtgcagcactggagcccattccctcagacccctctaaatcaggggccaggctgagactggatcttgggtccttcagtaaaattggagtgcatctcatctctctccctgccccttgtgaaatgaaacctccagactagaccatgaaaccccaggctcacaggtgggctgactctggggagctgggagccctgctcgctgaagtcgggtagcatcggctgcactcctctcgctcttgggccctgcttggctggcctccgagcacaggcctcctgccagccttccactctgggtggctggagactccccagaggccggccagcctgcggactgcagctttgtcaaacggcctcaatttttagcgtctggtcttagaccttggccccttcccgctgtggcctgtcctctgaccccgccctgcagcctcctctttcatctgccacaggctttcccaaaggtctcagcctctctggggcctggggaggccctactgtgcctggctgtggacagtcaggggccctgcttctcactcttgctctgccattggttgaccatgtggctttgggcaaatcactggcctgtctgtgtctcattttcccccactggtaaatggaggctttgaactgaaagatctcagagagctgttttctgtgatttgagtccttgctttgtagctttgggcaagtcgctgcacctctctgtccctcagtttccccaactctctaaagaaagtgctggccaggcgcggtggctcactcctgtaatcccagcactttgggaggccgaggtgggcagatcacttgaggtcaggagttcgagaccaccctggccaacatggtgaaaccccgtctctactaaaaatacaaaaattagctgggcatggtggggcttgcctgtaatcccaactactcaggaggctgaggcaggagaatcgcttgaacctgggaggtgaagtttgcagtgagccgagatcgcgctgttgcactccagcctgggtgatagagcaagactccatctcaaaaaaataaataaataaataaagtgctgggctactctgacctgggtgctgtgtgtccctgcgctgatcgcttgacatttctgagccagtttcttcatctggggcctggagccctgccttcctcccttgcagggtggccttgggggtcagtgggagagacaagtgtggacaccccgggtgggtgtacaacaaggaggtgggtggggatttggggcatccaaaggcttcttttcttgaggtgggtcttgcctccttactcccgggccctccctccagtgaccccatatggcttgcccccctgcccgagtgtgtgtgtagccatcacagagccaagacaggccacacagccccagtcacacccccttgcctcactccatcaggaggggacacaacaccctctggctcacttcgagccatccggctgaaccccagtgtctcaggtgctcacctgtcctccgacaggtccctggagagctccccaagccctgctccctcctggcctcaacttctccatcttctatatgggctgaagaatatggccaggggcagctcagaagaagtgggagccagggatccaggttcatgttcagattgtgtgactgtaggcaagggcctttctctctctgggccctggcggtgggtgggggccaccctgcctgccgtgtgtcttctcagggtcctggtgaagtacaaaagtggccttggattgagaagagcccagcaagctgtcaagccctgctgcaacctgcagggggtgctcctatctgggagtcaggagcctgggcctggctgtgtgaccttgagcaaagaggcctttgcttctctggcctcagtcttcccagctgtacagtgggaatgagaggggctggaccctagttcccaggtctccctgcccattgacctctcctcactccctgtggaccccgtccctgtccccttggttgctttggatgtgaggcctctgtggctgccccctcgtcccctgtccccagcaccgcctggctctcccgctctctcccctgctctttctgccactctccgcctctcaccacccccatctctgcctcttctctcctgttgggctctcgctctctcctccctcctctgtgtctctggacccccgctccagccagacctggttcacattcagatggctgcaaaggtacttccgcccctccccgctcccgcccaggcccaggggacccgaccacgccgggagctcttcctgccccatccccatcacaccccccactccttctcctcactttcgcatagaagtgccctgggcattggggctctgccacctcaccccctctgacagggctcactgtgtgactttgggcaagtcccagccccctctggcctcagtttccccctgcagatgggtaggctggaggaggaggcctgtagttttcagccgaggagccctttaggtgtgacccgtgatttgggacagaggcaagccttgctctagtttgcagggttggggcctggatggtcactgggtcccagcagggcccctgcttgcctccacccaggtctcaccagctcccaggagcgggcttccaaatctcagagcatggggacactttgtaggtctcacttgactttctctcagccaggaatctcttctattacaaccttacttgcccgcagagacagggggttccctccctccctcccaaggcagctctcggcatcttgagatgtcttggtacatctgaaaggaagtgaatttcttcctgtcccgggactcctcccctatggatttgagcctcagatgaccaaggccagtcctgccctggtccaagacaaagtccatctgatccagctttggcaaaaaggcgtctgcgccagggaggggaggagttccaggccagctggacctggcatgctgtggggactcacgctggccccaccacctccctgggcctccctcagccactagagccctgagcacagcacctaggaggatggtgggcaccgggcttgtggctgacggctcccttctcctttcctccctccttctgtccctgctcagagagggagactggtggctggcccactcgctcagcacaggacagacaggctacatccccagcaactacgtggcgccctccgactccatccaggctgaggagtgagtaccgtctctggctgcctctacccgtcgtccctggacactgccggtgcagagtgcctctcctgggctggggtgggaggtctggctgtccagcgccccagccatatccagggagaagcactgtgagtgggcagaagcctggacagtcagcaccatcctccgtcctcccacccccaggtggtattttggcaagatcaccagacgggagtcagagcggttactgctcaatgcagagaacccgagagggaccttcctcgtgcgagaaagtgagaccacgaaaggtacgagcgctcttgctggccaacggatactgagtcttctgtgagtggtttgagctgggtgttgtggaatgagcaggagtttggtttgtggagtagggagggaagaaccttccgggtggaggtaatggcaggatcaaagtcagggaggtgcatttgaggaacactgagtaatccgcggtggccagatgtccagagaaagatgaggcttagtctctctggcctcagttttctcagataaaagatgaacataggttgtctggaggtctgagtgtcacacagtaacaggctcgttcccagggtaggtgctgctacaatgagccccgcttcttcctcttccccaggggtccctgggctgcactggatgctggaggctggttttgccctcccccaactgcagtcctggtccctgcccctctcctgtccctcccctgagccagagaatgaagaccatcccctttctctccagcccctctgaaagtgggttgcaggcgcccgtcaccatggcagccaagctgagctgcttcctgtgggcctggggctcagcgggagatgggaagcagagcatccatgtcgagccgtgcatttacgagcagtcgtgcagccatgtgcgggtgtgcatgctgtgtgtacatctgggcgtgtgtgtgtgtgcatgtggggtggaattgtctgtgtgttgctgtgtgggaatggactgctgtggtttgtctggtgcctgagggcctagggagcgtgtacttgtgtgagcgtgtggctactgggcatgggcatgcctgtgcgtgtatggacatgtggctggggttggcttcagcctcaggcctgtggcttccacatgcaccctcccgggccatcagtagaaaatcatggttgcctaaggcaggctttgagtccccggatgtgggtttgagccccagccctgtctctggtttgctgggtgaccccaggctggccacttccctctctggacctcatttcttctgtacgctgggattgtaatctcctgaagatcgcagagggggaggtctgtgggctaggatggctgggcttcccccatgcccatgcactgcctggccaggctcctgagaaggcctgtccctggctgctggagcctctgcccctgcctccggggctcagccttgttccctgatgccatttgggcgtctcttggcctctggtcctacccaggcctgctggatgggaggaaacttttccggccaaaagcttttctatgctcaagggaaagaggggaggcaccagggctggccccgtttgacccaggcagccttcaggccacacccagcccgtggtctcctgcccacgacggccaaagcctctgccaaccaccccctcccgcctgagcctgggcctgtcttcagcaaggaggttggggggacatggacagtgcccccgcaagctgacccagagagggaaagcagttaggccagggccacacagccacagggagccactcacaggctcccagcagttattgagtgcccagtgtgtgccgggcccttctatatgtggttgcatggaatctccccagcagccctgggagcacccgcattgtgcagaggaggaaactgaggcccagatagggccagcaacccctccaagtctcatagctaggatgtgcacctgggatatggaggtcttgctggggccaagggtgcgtggcaggacgtactaatcaagtgtctcttgggtcccttggccctgcctctgtggctgccccggggctggctgttgagagacagggtgggcctggggccccgcctgggcctcccttccctccaatgtcaggcaggcacagaacggtgtccagagcagcggcctgcggggggagagggcatggcggtcacggctcccctcggtgccccgcaggtgcctactgcctctcagtgtctgacttcgacaacgccaagggcctcaacgtgaagcactacaagatccgcaagctggacagcggcggcttctacatcacctcccgcacccagttcaacagcctgcagcagctggtggcctactactccagtgagccagcctcggagggcggagggcgggcgggcaaagcctcagctgcagactctggggaggggccttggagcctagaagggtggggacttctgttatcctgcttctctccccacttccccctcccccctcccttcctctctcctcccttttccctcctttccttgtctccttcttcttcctcttctttcccccagcccccctcctccctgtccccctctctccctgctccacgcagtgtcccactgcccgcctttctctgcagctggctggtatggagggggctgccctgaggagccccagagtaagctggaagggaggggacagaggctggtgtcatttgtctctgtagccctaggaccggtctgaaccggttgctgggagaggaggagggggcggccagatcgattgcagcaaagagggaagagagcggcagagggagctcgcggggcttgcgtgctgggtgagggctcgggcgtgggcgcagtgctgtagcccacccacctgggcatccggagctgactgcagtgtcgggcctgtgggtgcctgtgtgcccgtgtgtctgtggcacacatggcctctgtgcacaggtgttggtccactccccaccccgagcctcctcctcctctcagcttggcctcctgacttcctctgggatcacccgccactctctgtctcttcggccaccgctgtgtagctcattctgaacccctttccctcagatcagaactctccaggggctgtcttggaatcttgggataaagacccccaccggcccctgagtggtctaatcctaactgcctccccacctccgcctggtgccacccttccccacctgctccctgcgcccctttgtcctccgcttctccagccctgcagctgttctttcctcagagcctttgctctggctgtgcccctgcctggagggctcttccctacttaacccctcaccgtcctgcacatccaagctcagttgctgcttcctccaggaagccttccaggccactcctgctgttgcgcgaacagctctccagtcacattcacatctgtggtcctgggaggtgattagggaagtggggctcctccctggactctgagttcctgagggcaggttccctggacatgttccctccccgcagggttcctggcaccccctactgtctgctgaatgactgactgaatgactgactcagcagatgcataaagcactgtgggcctgtgtgggggtggggctgtgtgcacacagatgtagatgcctggctttgagggcaccctgcgtgtcccctgaaatctgtgtgcatctggcatgtagggcgacacacactgaggggcagggaggccccagggcagaagacccgcctaactgctcctcctgcctcctcctcagaacacgccgatggcctgtgccaccgcctcaccaccgtgtgccccacgtccaagccgcagactcagggcctggccaaggatgcctgggagatccctcgggagtcgctgcggctggaggtcaagctgggccagggctgctttggcgaggtgtggatgggtaaggcctggcccctgccctcgggagaggcatccaccccccaccccgtgtggcagctccgggctcccttggtccctttgcctttagctgcctctgctggatgacggggccctgttgtaaatctggagctccccagcggtggctggcaccgagttgggttgtggccacccaagcactgtgccccggaccgtgcaaaccatagtgcctgattccaagatccgcacagggctgggcattgcacagacctgctgtgtaggctgggcccggtggcctcactcagagcctcagtcttcccgactgtgaatggggctggtgacagtgggacctatgggagactgtggagaccctgacccagtgcgtgtccacacactagctgttcgccatggagagagaagcccggctcgcaggagggagtgctgggaagcttaggtctggcatggtctgggcctgttagcgatttcccgtctgaccctggagaaacagcaaagcatgagcaccgtgcagccctgacaaaacccaggcccctcttccaccggatgctttctgctcacacggagggaccggaggccagggtggaggagagacggcggttgtaaccccgtaagcccatggtgctagcggggatcacggtgcgctgttttcaaggtggtttcatctgagccgcatctccactcactcccactgcctccacgttccgccctccagagggctgatggaggagagcagagcggcctcctgggtggaaggcactgcagggacagaggcctggaggctggaggtcaggctgtccgggaaggggaggcgtgggctttgagctggtgagaggggagaggggtgagaagccagggtgtgggcacagccacaaagtgaggacttgagcaacacctgggtgaatgcacagcgtcagccattatggtggctgcaaaactcatttctggcttgggtgagaggtgctgtccctgggaagggcctcacttcctccctgggtgctccaggtcgactcatgaagtgccacatgcagatggcctgagccagcagggccacagagattggcctgagccccaaccctcggacggaggcccagcgactgggaggaacgggcccaaggtcacacatcaaaggaacctcgaggcccactgggacaagaacctggattaaacatgctggtctagaatgcagcttcccccagagccccacagttagaaaagcagatagtagtgaaatgataaccacattacttactgagccctcacggtggggctggcccagtggttaaaatctcattcaatcctcaaacagctccacgggtaggcactatggaatccccattttccagatgagataactgaggcttagagaggggaactgactctcccatggtctctccgctggcaggaggcggaggtgagaggctctggccagcctgacccccaagccctcatgcttaggacagtgtctcattttggggggcgggtgggctccagaggtgacctcttgttctggcaacagccttagaaatccctgggccagctccacatcacccctggcttccaccagtacacattgcatttgctaacacatgaggcacgttcaaagtcctgctcagagggaacatgactaacccagaagtgacaccggttgagttggaaccttggtcccctatctgtctaggctaataagctgctttttaggactttttttttttttttagacaggatctcactctgtcacccaggctggagtgcagtggcacagtttcggctcactgcaacctctgcctcccaggctcaaaccattctcctgcctcagcctcccgagtatccagtattacaggcacgcaccactaccacctagctaatttttgtatttttagtggagacagggtttcaccatgttggccaggctggtcttgaactcctgacctcaaatgatccacccgcctcggccccctaaagtgctgggattacaggcgtgagccaccacgcccagcctggacattcttaataatcacagtcccgacaacagctactggttcttgagcatttaatcctagtaacagtgccatgaggagcaccctgtcattgtacccattgtacagatggggagactgaggctcagaaagggcccaggctttgactgggtttgtcacatggctgtggaggccacagctgacactggcgcccaggtgggcagatcctggatccctgtgtggtaggagttggggggctccactgagtcagcctgcatccctcctcaacagggacctggaacggtaccaccagggtggccatcaaaaccctgaagcctggcacgatgtctccagaggccttcctgcaggaggcccaggtcatgaagaagctgaggcatgagaagctggtgcagttgtatgctgtggtttcagaggagcccatttacatcgtcacggagtacatgagcaagggtgagtcctgggcggccggggcagggggcaggggcactccggacagggcagggagcatgagcctcatttcctctcatgtctagaatgggcatcttcaaaggtggaatgcagtagagccaaattctctgttgcctgggccggagtgtggtggtgcaatcatagctcacttcagcctcaaccttccaggctcaagcagttctcccacctcagccacccaagtagctgggaccacaggtgtgtgtcaccaggcccagctaattttttattttttgtagagatgggaccctatgttgcccaggctggtctcgaactcttgggctcaaggagtcctcccacttccacctcccaaagtgctgggattacaggtgtgagccacagtaatttttaaactaattagttatttttcaaaattccactttttggaggtatagtttacatatgataaaatacaccccttttaagtgttcagttcagtgggttttaacaactggatttactgtgtacccctaaccataatgaagatatataacatctccatcacccagaaagttcctcatgccctttgcagacagtaccctccagccccaaacccaagcacccactgatttgctttctgtcattataaatttgttttgtttattctagaatttcatacatggaatcttttacatctgggatgcattgtttttttactttttacatttcaattttttattttttgagatgaggtcttgctatgttgcccaggctggagtgcagtggcgtgatcatagctcactgcagccttgacctcccaggctcaattgatcttctcatctcagcctctcaagtagctgggactacaggtgcacaacatcctgcccagctacttttttttttcgtattttttgtacagacagagacttactgtgtagctcaggctggtctcaaactattgggctcaagcgatcttcccacctcggcctcccacagtgctgggattgcaggcaggagccactgctcccggcctgagatgcatccttgttgcatctcccagcagtttgttcctgttgttgctgagcgggactccgctgtctgcattagcacagtttacctgttcacctggaggtggacttctgcttgtttcccatcctgcttgccttttgagtgacaagcactgagtgagactttattcagagatgagtttacgtaaaatctgctgtgctggttaaagcaaggccagccacctgggaggatgggttttgggaatcactgcatcctggcagagggacagggcaggagctggagctgggtctctctctgcccagggagtttgctggactttctcaagggggagacaggcaagtacctgcggctgcctcagctggtggacatggctgctcaggtgagtcagcccctcccgcctccccacacccttggtcctcaagcacccagacccatctggtgcagccagttctggcctcttgagtgccccctccaagaagcctgccttgattgcctccacactcactgatcttgccgcacgtatttaccaggtctgcttacaggtgccctgaggggtgattctgggcagcagaaggcccttacctgggcatcaggggtcactgacttactgtgggacctcgggcctcagttgtcgtctctgtaaaggtcatttagtcgcttagcagacgtgttcatgcttgctgtaggcagtggtcaacaagcctttttttttttcatttaatcctcatcacgaccaggagtgacgaggattggctgttattcccattggacggatgagaaaactgaggctcagagaggggacttgggcagcaggcaggacctggcactcatctgtgtctgggtccgctggggcctctttccctggtcacctcgctttcctggctgcatcggatctcgtgcctcccctttgacctttgccttctgccctctgctctgtgccctgtgctccctactcccgcagagcactgctcctgctttcgatgccaacagcatttactgtgaactgacctcacttgcctgaagaagtgtggggagggtggggaaggggtggttggctctccagccccagagtgctctgtggccctgggagggcatgggtggcacctgagccaggctcccacggttccgcctgcagatcgcctcaggcatggcgtacgtggagcggatgaactacgtccaccgggaccttcgtgcagccaacatcctggtgggagagaacctggtgtgcaaagtggccgactttgggctggctcggctcattgaagacaatgagtacacggcgcggcaaggtgggcaggggctgtgtggtatgtcgcgcttggcctgggacaggtcacgtcccgctctgagccccagttttttcctcagctgtcattcctcatggtgcttatctagcagagcggtcatgacaggaggtcagagctgccctgacctttctcgttcctgcaggtgccaaattccccatcaagtggacggctccagaagctgccctctatggccgcttcaccatcaagtcggacgtgtggtccttcgggatcctgctgactgagctcaccacaaagggacgggtgccctaccctggtaagaaggtcctcatggcctgtctgtggtccctgaatccctctgccctggtggccttgggcaagtcatgactcctgctgggcctgtttccccacccgtaaaacaaagaagttgagcgtctgatgttaggctctctcgatggtccatgctctcagcttcggggacaggacttatctatggtcactcccaacctgtcctaggcaggaagccctcgctgccctccccatcagcttcccccaccccactttcctcaccggagccgggctccccatgcctcgctctgcccacagggatggtgaaccgcgaggtgctggaccaggtggagcggggctaccggatgccctgcccgccggagtgtcccgagtccctgcacgacctcatgtgccagtgctggcggaaggagcctgaggagcggcccaccttcgagtacctgcaggccttcctggaggactacttcacgtccaccgagccccagtaccagcccggggagaacctctaggcacaggcgggcccagaccggcttctcggcttggatcctgggctgggtggcccctgtctcggggcttgccccactctgcctgcctgctgttggtcctctctctgtggggctgaattgccaggggcgaggcccttcctctttggtggcatggaaggggcttctggacctagggtggcctgagagggcggtgggtatgcgagaccagcacggtgactctgtccagctcccgctgtggccgcacgcctctccctgcactccctcctggagctctgtgggtctctggaagaggaaccaggagaagggctggggccggggctgagggtgcccttttccagcctcagcctactccgctcactgaactccttccccacttctgtgccacccccggtctatgtcgagagctggccaaagagcctttccaaagaggagcgatgggcccctggccccgcctgcctgccaccctgccccttgccatccattctggaaacacctgtaggcagaggctgccgagacagaccctctgccgctgcttccaggctgggcagcacaaggccttgcctggcctgatgatggtgggtgggtgggatgagtaccccctcaaaccctgccctccttagacctgagggacccttcgagatcatcacttccttgcccccatttcacccatggggagacagttgagagcggggatgtgacatgcccaaggccacggagcagttcagagtggaggcgggcttggaacccggtgctccctctgtcatcctcaggaaccaacaattcgtcggaggcatcatggaaagactgggacagcccaggaaacaaggggtctgaggatgcattcgagatggcagattcccactgccgctgcccgctcagcccagctgttgggaacagcatggaggcagatgtggggctgagctggggaatcagggtaaaaggtgcaggtgtggagagagaggcttcaatcggcttgtgggtgatgtttgaccttcagagccagccggctatgaaagggagcgagcccctcggctctggaggcaatcaagcagacatagaagagccaagagtccaggaggccctggtcctggcctccttccccgtactttgtcccgtggcatttcaattcctggccctgttctcctccccaagtcggcaccctttaactcatgaggagggaaaagagtgcctaagcgggggtgaaagaggacgtgttacccactgccatgcaccaggactggctgtgtaaccttgggtggcccctgctgtctctctgggctgcagagtctgccccacatgtggccatggcctctgcaactgctcagctctggtccaggccctgtggcaggacacacatggtgagcctagccctgggacatcaggagactgggctctggctctgttcggcctttgggtgtgtggtggattctccctgggcctcagtgtgcccatctgtaaaggggcagctgacagtttgtggcatcttgccaagggtccctgtgtgtgtgtatgtgtgtgcatgtgtgcgtgtctccatgtgcgtccatatttaacatgtaaaaatgtcccccccgctccgtcccccaaacatgttgtacatttcaccatggccccctcatcatagcaataacattcccactgccaggggttcttgagccagccaggccctgccagtggggaaggaggccaagcagtgcctgcctatgaaatttcaacttttcctttcatacgtctttattacccaagtcttctcccgtccattccagtcaaatctgggctcactcaccccagcgagctctcaaatccctctccaactgcctaaggccctttgtgtaaggtgtcttaatactgtcctttttttttttttaacagtgttttgtagatttcagatgactatgcagaggcctgggggacccctggctctgggccgggcctggggctccgaaattccaaggcccagacttgcggggggtgggggggtatccagaattggttgtaaatactttgcatattgtctgattaaacacaaacagacctcagaatctgatcaacagtttattgaacatctactgtgtgctggaaagcgagatggggcggaatgcgagaacaaactaccccttgaggggtctttgggcagcactagtagctggagggcttcaggccaaggcaggggtgacatcagattggagacagctacggcagaatgtggctgtttgtgaacatctgcacctgtgttagggggtgagcacctgggagaaggacaaggcacatcacaggacttccctgagcatgacaagttcaggactcaaatgtccgtggtggatggtagcagtgacattggggagtgggtggggctgtcaagcctgcctagaggagatcacaaatacacgacgagaataccgttgtgtgtgctcttcgtgtgtttcctaggagtgcagggcaggggtgctgggtcgatccacaaaagtcctgaaaacgctgaagaaaaatccaaagacccttcccctcctccctccttccccaccaccgaagcacacagtcttgaaggttgatttgcaaccgtctatacaaacacatttattttacacaaatatacatcagatcacacacctgtgcaccggagtcaactctggccacgacattgcttaattaaaaacaaatttcaaaaactggacatttttctgttcagtattattttcacaagccaaacacatcatagtgtccaggtcagggtggcatctgggtggcatctggagatcgcagggggcgggtgtgtgtgtgtgtgtgtgtgggtgtgggtgtgcgtgtgtcttaggagtagagatggagttctggatgtgaggttgtggcaggtgttctctgcttgctggtgggagtatacctggatgcgtgtgcctttgtgttcatgggggtatgtgcgtgggctctgtttgttcgcagacatggtgcttggatgtttgtgtgtgagcacttgtctaggtggtctgtgagcctgggctcatggaaatgcgtcccagatgtgtgtgcttgggcattaacgcgatgaggtgagccggtccgcttgctctggctgtgtgtgcagaatgtgtgtgtactgtgtgaacacagatccaggggcttcatgagcctgtgggctcctggagtgtgtgggcaccgaggtgtgcagctgggttcacgtggatgtgggtgggaacagcatgtgtgcccgtggacccgtgtgagcttgggctcgcacccccagcgctggccactcccggcgggacccacgtgtgcccgggggcgcagggccacgtgcgagcgcaaccgggacaaagcgctcgcccgcgctgccgcggcgggtcaggcgtgcgcatgcgcatgcgcggcgcggcagggtccaaccccaaccccgcgcgccgggacaggagggaccggccaccgcgcggcctctctcctcttccttgtccatctgagtctttctctctcttcctctctcttgtctgtcagtgcctctccagccctctctggccttacatcaatttcctgtttcttcttttttaatttttaaaaatttcagtagcttttggggttacaagtggttttttggttacttggataaattatgtaggggtgaattttgtagtacactcgtcatccgagtagcgtacgttgcacctaatatgtaggtttttaaaaatcccacaccccgccttccttgcttttttctttctttctctttccttttctttttctttatttccctttcccctccctccctccctttttttgagatggagtcttgctctgcccctagtctggagtgcagtgactcactgcaacctccacctcctgggctcaagccattctcctgcctcagcctcccgagtagatggaaccacagctgtgtgccctcatagcccggctaattttttttttttttttttgtagagacggggtgttgctatgttgcccagactggtcttgaactcctgggctcaggtgatctgccccctccggctcccaaagtgtagggattacaggtgtgagtcactatgcctggctgattttccttttctttctctatgtgtctctctgtctcactgttgctaatttctgtctcttttcctctttgcctgggtgctgtctctctttctctagtccccaccctccctttctgcctctcagatttttctccccatccacctcttcacatctctgactcttcccaggccctcccacacctccatgcctttgcccaggctgttttcaccgctgagaatgccctttcttccctctctacaacctggcaaactcctattcatcctgcaaagcacatctccgaggccacagaccggccctgggagctctccctgacgccctggaatccgcagagcgtgtcagcccgcccactagaacaagcgcttgagggactgggtgacgttctccctagtgatcccaggtcccgccacattggtaatgtctgctcagggaaggcaggcgggaaagtcgctctgcctctcccactcctgtctctggctccttctccggttgggacttcctcactctgggcctgtgtccagttggcttgtgctggactcggtgtgtaagggagacagagatagacacacagagatggagtgcagaggcgagagatgtcatccactctgctgggccacagtctcctggccccgctgtcccctccttcggccctgtgtagtgtccaggtgtctcccggggatatgagaccccagggctccatgccccctcagcctttcctttctgccttcagttggttttactcttaattctgcatgcatttttttctttttgagaaaactaaaatgtttcccccatgacaaaaaaagaatatatattctttctggcaaaataggaaagatacaggaaaacacaaaccaaccaaccaaccatatttcacaccccctgctccacccctcccgcctggagtctggggcatgtctccagggtgcatgcagggtgtgtgtggtgtgtggtgtgtggtgtgtgtaggggtgtgcggcatatgcgtgtccctgctgctgttgcctcccaggctttttcctatgagcttcgaaagtctctttgttcatcctctgcttctctcgtcccctctcttcctccctccctagttacattctccagaccagacttcatgctgggtgcacgcatgcacagacacacacacacacgcgcgcatacacatgcacacacacacacacacacgcacactctgcattttctatcatctctgtcttcttttcccatttttctctcagaggctctgaaacgctgtgattcatagagagaaaaagagacaggcagagattcagagattcagacaggacagacaggaaaaggggatggagacagaggggctggagttggtggcggggagggagcggcagggagagaagctttttgtccatctgtttgtcgtctgtgaggtccatcccgattctcactccccgcagccctcccctttctggggcttttcccacccagcccttggagcgtgtctcctgggatcctggggccgtgtccatctgtccgtctgtgtgtcagcctctgcctcccgcctgcctcttgctgtggtctcattaaatgctcatctctttctttgattgttccacccccaggttgtgtgtgtgggcacgtgtgcatgtgtccatgtatccagatctctgtgcctttgtggctgtccatctgcctcccacctgacttccccttctccctccctcctgttcttgccaccgtgtcagtgtgtgtttgcatctgtgtacgtgtatgcacctgtgtacatgtgtgtctgtgcatgaatctcttgctcacctcacttcccctgtcccagaggctcctggacttggcatctgggggtgttcttctcctcactccccatcctggtccagcctcagcctcaaggcttgcctcctggacaatttccctggcaaccatccctggacatcttacctgcaacctccgaaaactcaactcacttgtccactcccactccgtcagcagggggacctctggcacagagccacatgccctgggtggctcagccttctctcacttaacgctctgctgtgggctttcatttcctcttaccacttctggccccactcagagccctgtgtctcccccacctgcctgtgcacaggctgacctgtgtcatcctgatccccaccatgcaggcattgctcatggtgcctctgcctgacatctttcctttcttttttttttttgagacagagtctcactctgttgtccgggctggagtgcagtggcgcaatcttggctcactgcaacctctgcctcccgggttcatacgattctcctgcctcagcctcccgagtagctgggactacgggagtgcgccactatacccagctaatctttgtatttttagtagagacagggtttcaccatgttggttggccaggacggtcttgatcttttgacctcatgatctgcccgcctaagcctcccaaagtgctgggattacaggcatgagccattgtacctggccgacatctttcctttcttcagcctgcaaatcccacctcctctgggaagccctcttgataaccccctttgctgggttcccttgtctctgatactccctgcagtgagatctgtcctggccttggtcttatcgcaggctgggcacccagctggagtcccatttggaccttcgtgggcctagacaccttggccctttccttagaaaagaaaattaaaaattacatgttacgatagcactggtatcaacacgaatatattaataggacatactgagacattttctttgagttaaaagttcgtttttcttctgattttaaaagaaattggaacattttcttggggtcccaaaagtatggtgcatgggctatagattcactgatcccctcctcttgccaggcctgggcgaatgccatgccgggcaggctgtgtatgctccccgccttctaccctctctgtgtctgtcttcttcattttgcctctgcagtttgtccttgtgttagtgcattaaagcaagacgatgcgtgtgtgtgtatgtgtgtgtgcatgtgtgcatgcacacgcacgccacatcctccctcttcatctctgtgtccatctctctgtgtttgtttgtttgtttggtttttttttttgagacagggtcttgctctgtctcccaggctggaatgcagcggtgcaatcacggcttactgcagcctcaacctcctgggctcaagtgatcctcctacctcagcctcctgagtagctgggactacaggcgtgcacaaccatgcccggctattttttttttttttttagtagaaacagggtctcactctgttgctcaggctggtcttgaactcctgggctcaagagatccgcccacctcagcctcctaaagtgctggaatcacaggcatgagccactgtgcctggcttatgttcatctctttcaccataacaggtttgtctctttctccggggtcccctcattcattcattcattcattcctgcaacaaacacctgtgtgtgtccctgtgtctgtgcgttggcgtgtctgccagggagcaggggtcttggttcctcatctttccccaggtctcctgctctcccagatctgcaggctgtgagctttccagggtgggccatgctccctgctcccgaccctttgcctgcccgcctccccttgctccagcattggggtcactgctatgggtggtggttgttttccctctcccccttggttcttcctagaacaccatgtagcagctgctcctgcccagcagggtgtgtgtgtgtgtgtgtgtgtgtgtgtgtgtgtgtgtgtgtatgggagggagtgagagagagggccaggccgacatatagacagacagacaccaagagagggtgacaagtgcacagccggcacctgtctctcctgtatttgccttctgtctccttccctctcctctctgaggttttgctggcattttgtcttttctctgggcttcctgcatttgtgtgtgtgagtgtgtctgtgtatgagtgtgtgtgtgcacgtggcatgctcaggtctgggtccccccttcctcaccctccctttgtcccccccaatccccacaccttctctaccacagtccaggtgtgagtgtggtctgcggtgtgtgtggtgtgtgatgcgtgtgttgcatggttgtgtattgcatggtttgggtggtgtggatgtggtacagtgtgtgtgcagcacggcctgtgtgtggtgtggccgtggcctgcggtcccttgcggttgcctgcatccagcgacggctgtgctgatgcccctcccacccatcgaggcctctcctcctttctttttcccttcccttcccttcccttcccttcccttccctcccctcccttcccttcccttccccccttcctttcctttcctttcacttgctccttcgtaaaatcctgattgagccattcccatgaggcagccctggtggccggggcacacttctctcactgggtcgttctctttctccttttctctctctcttttcctgtctttggctccgtttctgtgtctgtttttctccctctgtcttttgttttgtttctctgttgtctgagtctttgtctctttgtttctatctttgcctgttggttttagcctagcccactcaggcactaattagttgttcccgttaggaagtggctgcaaagtcgtgtatgtgtgtgtgtggggtgtgtgtgtaagtgtgcatgtgagtgtatgtgcctgtgtgagtgtacatgtgtatgtgtatgtgagtgtgtatgtattgtgtatatgtgtgcatgtgagtgtatgtacctgagtgtgcgtgtgagtgcatgtgtgtgtgtatgtgtgtacatgactgtgtgtttatgtgtgtgagtgtgtgtatgtgtgcgtcttgtgaatgtgtatgaatgagtgtgtgtgtgttcttgctctctttccaacagttttggccatgactccacctcccattcatttcctaagcgcccccctacacacacacactcacagggtcctcccaggcgtgagtatgtgtatgtgcagctaacaggtctggctcctcattgttccccgaggctcttgcctaccgtggctgcaggctggtgggattccggcgtgggcagcagctgcctccccttgctccagcgttggggtcgctgccatcggctgagggtttgtttctttcactttcacagctcttcccaaaacactcgtctcggagcagctgctcccgcctgtgtgtgtgtgtgtgtgtgtgtgagagagagagagagagagaatgtgcatgtgtgtgtgtgtgtgtgtgtgtgtgtgtgtgtgtggagggtcacagcagcccctccctggccccctttctgcagggcttggcttttgtgttcattctgagtcccttgcacttgtccctcagttcaatcaacacctctacatctctcctgtgtactgggctgtgtgtgtgtgtgtgtgtgtctccacttctccctccttcccacctgttctcgccagtctctaaggcactctgaaatctgccctggctgtatgtgtgtgggttcacagggcgaggtctgtgcacgtgaaccagtatgtgacaagctgtcagggcatcatctctgccactgtacctaatccttcactctcaccctggggtaatttcctttgtactttcctttggtccacacatgcagaacagctcttgtgagttgtgcacacaggtgtgtgtgtgtgtgtgcgcgcgcgcgcgtgtgtgtgtggtgtagggggagagacagagagacagatctcctcttccctttgctctctctggctgcatcttgacctttgcacacctgcccggatccatctctctctccacttctcctaaacctctccttgtctctttctgcatcatctctgaggctttgctttccctctgcagatgagagagggtgctctgtccatccatccatctatccatctgtctgtctgtccaagagttatttgtgggcccttttctacctccccacccctttcctgggcctgcactcttgtcacccgcccccctgcaccctcctgcggggccatttcagcgcccaccctcttcacctctccatctccatccctccccgcttgtgggttctggaccgggacctgagaacaaagctgcctcctgggccccacacccatcacccggccccaaacccttcaaggcccgttgggcttggcatcctgtttggctccttccctcatcagggggcctcatgcagcctcactccacttccagcaggtcacccctgccgggccattcccctgccactctcttatgcccccctctagctcaaggcgatttccttcctgccttataaatcccctacccccaattcaggtctcccaggggcctctccttttccatgtgggggtctaggagtcggtctttctctcctggtcaggttccattttatttcctttttcctctgacttggtcgggttttgttcttccctgggcatcactggtacctgtgtgtgtgtgtctgttcctgtctccctgtctgacgcattcacctttccttccaccttttatcctcttcctctcatttcaaagaattgggatctaacttacatatcgtaagatgcacaaatctgaaatgaaaagctttgatgaatttcacatgtgtctgcacctgtgcctccaccacccggagcaagaaacagaccgtcctggccctcgagtgcaggctccctcccacccgccccttgaggctcggggtgtttctcactgtgtgtatgcgtgacattttgtctgtctgtctatcctgcaactttctcagctgttgcttccctctgggagccccttgtcttt

SEQ ID NO: 748 - DNA, 2455 bp, Homo sapiens
gaccatgggtagcaacaagagcaagcccaaggatgccagccagcggcgccgcagcctggagcccgccgagaacgtgcacggcgctggcgggggcgctttccccgcctcgcagacccccagcaagccagcctcggccgacggccaccgcggccccagcgcggccttcgcccccgcggccgccgagcccaagctgttcggaggcttcaactcctcggacaccgtcacctccccgcagagggcgggcccgctggccggtggagtgaccacctttgtggccctctatgactatgagtctaggacggagacagacctgtccttcaagaaaggcgagcggctccagattgtcaacaacacagagggagactggtggctggcccactcgctcagcacaggacagacaggctacatccccagcaactacgtggcgccctccgactccatccaggctgaggagtggtattttggcaagatcaccagacgggagtcagagcggttactgctcaatgcagagaacccgagagggaccttcctcgtgcgagaaagtgagaccacgaaaggtgcctactgcctctcagtgtctgacttcgacaacgccaagggcctcaacgtgaagcactacaagatccgcaagctggacagcggcggcttctacatcacctcccgcacccagttcaacagcctgcagcagctggtggcctactactccaaacacgccgatggcctgtgccaccgcctcaccaccgtgtgccccacgtccaagccgcagactcagggcctggccaaggatgcctgggagatccctcgggagtcgctgcggctggaggtcaagctgggccagggctgctttggcgaggtgtggatggggacctggaacggtaccaccagggtggccatcaaaaccctgaagcctggcacgatgtctccagaggccttcctgcaggaggcccaggtcatgaagaagctgaggcatgagaagctggtgcagttgtatgctgtggtttcagaggagcccatttacatcgtcacggagtacatgagcaaggggagtttgctggactttctcaagggggagacaggcaagtacctgcggctgcctcagctggtggacatggctgctcagatcgcctcaggcatggcgtacgtggagcggatgaactacgtccaccgggaccttcgtgcagccaacatcctggtgggagagaacctggtgtgcaaagtggccgactttgggctggctcggctcattgaagacaatgagtacacggcgcggcaaggtgccaaattccccatcaagtggacggctccagaagctgccctctatggccgcttcaccatcaagtcggacgtgtggtccttcgggatcctgctgactgagctcaccacaaagggacgggtgccctaccctgggatggtgaaccgcgaggtgctggaccaggtggagcggggctaccggatgccctgcccgccggagtgtcccgagtccctgcacgacctcatgtgccagtgctggcggaaggagcctgaggagcggcccaccttcgagtacctgcaggccttcctggaggactacttcacgtccaccgagccccagtaccagcccggggagaacctctaggcacaggcgggcccagaccggcttctcggcttggatcctgggctgggtggcccctgtctcggggcttgccccactctgcctgcctgctgttggtcctctctctgtggggctgaattgccaggggcgaggcccttcctctttggtggcatggaaggggcttctggacctagggtggcctgagagggcggtgggtatgcgagaccagcacggtgactctgtccagctcccgctgtggccgcacgcctctccctgcactccctcctggagctctgtgggtctctggaagaggaaccaggagaagggctggggccggggctgagggtgcccttttccagcctcagcctactccgctcactgaactccttccccacttctgtgccacccccggtctatgtcgagagctggccaaagagcctttccaaagaggagcgatgggcccctggccccgcctgcctgccaccctgccccttgccatccattctggaaacacctgtaggcagaggctgccgagacagaccctctgccgctgcttccaggctgggcagcacaaggccttgcctggcctgatgatggtgggtgggtgggatgagtaccccctcaaaccctgccctccttagacctgagggacccttcgagatcatcacttccttgcccccatttcacccatggggagacagttgagagcggggatgtgacatgcccaaggccacggagcagttcagagtggaggcgggcttggaacccggtgctccctctgtcatcctcaggaaccaacaattcgtcggaggcatcatggaaagactgggacagcccaggaaacaaggggtctgaggatgcatt

SEQ ID NO: 749 - protein, 530 aa, Homo sapiens
MGSNKSKPKDASQRRRSLEPAENVHGAGGGAFPASQTPSKPASADGHRGPSAAFAPAAAEPKLFGGFNSSDTVTSPQRAGPLAGGVTTFVYDYESRTETDLSFKKGERLQIVNNTEGDWWLAHSLSTGQTGYIPSNYVAPSDSIQAEEWYFGKITRRESLLLNAENPRGTFLVRESETTKGAYCLSVSDFDNAKQVKHYKIRKLDSGGFYITSRTQFNSLQQLVAYYSKHADGLCHRLTTVCPTSKPQTQGLAKDAWEIPRESLRLEVKLGQGCFGEVWMGTWNGTTRVAIKTLKPGTMSPEAFLQEAQVMKKLRHEKLVQLYAVVSEEPIYIVTEYMSKGSLLDFLKGETGKYLRLPQLVDMAAQIASGMAYVERMNYVHRDLRAANILVGENLVCKVADFGLARLIEDNEYTARQGAKFPIKWTAPEAALYGRFTIKSDVWSFGILLTELTTKGRVPYPGMVNREVLDQVERGYRMPCPPECPESLHDLMCQCWRKEPEERPTFEYLQAFLEDYFTSTEPQYQPGENL

SEQ ID NO: 750 - DNA, 24518 bp, Mus musculus
  misc_feature (1)...(24518): n = A,T,C or G
atagtgagaccctggctaggaaaagagatgaaagagggagggagaagagacaacagaaaggggacttagagaagcaggactccaaaccaaaaccaaaggaagacacatatgctatggtgatttcccaggcttgtaattagctacagattttctttttttttttcttttctgttttccttagtttttcttttgttttgttctattttccccagacaggctatctctacatagtcctggtcgttgtgaaactcactatgtagatcaggctggccttgaactcacagaggtctgcctgcctctgcttcttgagtactgggaggattaaaggtatgtgctaccatgcctaacaatgagaagccctcctcctccctcttcctcctcctcctccccccttctcccccctcttcctcctctgcctcttcttcttcctcctcttcttcctcctccttttccttctcctcttcctcctccttgcttaaccttgagacagagtcttatgtgtgacccttgactcctgctttcgcctgccagatgtgcattgctccaggcctttaattctgcatgggctttatctgagaggtctcttttccctggatgtgtgcttctctcccttctattgacttagtgggtctctctcttctagtctatatttaggtgacagccattgctattggcataaccaataatatttgctgttccttgactagagatctatagctgagaccacagaatgcactcgcagttagtttaaagagtggacatccattgtctaacatcccctgagcagagaatgttaaggccatcctcgccttgatctcatggggtcagtagtttctcattttacagatgagaaaggagaaatgacgggtagctgtaataaagctgctccaactgacctacaaactcgccaaccggcagcacgcatctctactgtttgccgttgagatctggggctactggttatgcagcaaaagctggctggtacaggattcaaactcagttttgttttgttttaattgcatttgccttcccattctcttccactgagcttgctcccttgatccctgctgcaggcaacacacaagcaatcatttttaaatgggttacattttaaaatgcagctacagccccccttttctctgcccctccctgcaatttaacaccgagcaagcattgtaccactgagctgcaccctgtggttacagccatctagctgccgaggaggaaaccgaagcttagaggaaatcagttgtctgggaggcctaggtttacttggaaacccatctcttggattctggccctgggctcattccacaacaccttactggtgctgagtgcttgacaaagcccatcatctggcacttcctgtgtagcgggcacaatgccatgcagttcacatgttccggctcctggacgagtgtggcgaagactgtgtgacagtgacggggggggggggggagtggacatttagttgagctgtcctcagccttcccgcttgttttccaaggctcccttgaagtccccctccctgattcaacatctggtcaatgagaaggcagcgcacctgtgctccagatgttcctgaaatcagaacaggctcattacaaagagctgctgccagagaaaaccgtactagggaaagccgggcagattccaggcagggaacttgcttgcctggtgtgcctctggctcatccctagtatggggttgcggggagcacagctgtgtacaaacctaagcctgcctggctctcatcttcttcctgtgcccatcatggtgatttttccatgtctcagggtcctgatgtttttctccatctttttttctccatctatttactgacacccaactgttagagatactctgactacaaagggcttgcattgccctggttcacaaccctcacctttcaggataaatctaaatgctacttcctctgagatattttctgctaaaaccaacttgttttcctcctcaaattcttttacacaatgtccttcatcatcattatcaccatcatcatcatcagtttgacaggaggtaggggtgtgggtggcattttgtgtgccataatagctgtgtgaagttcagaaggcaatctcgtggtacagtgggctccggctgagccatctcgccagcctttaccatacttacatgttcacagctatgtgtttgtgtttgtgcctgtgtccttgttccttgtacactgcccctgttacactctgaggcccctggaggagggactctttctggcttgcattcatgttggatcccacagcctagcagagcgccagctacttcagctacttaggaagtactcagagagaggtacttgtaggacatggcaggcgaacgaactgatctgctccacactgtgacctcttcactcaggtcccctggaatatgtccctctgttcatgtcccccgatgccataagttaacaggagcaggtgcggttacccgctgctccgtctcaccagccccttcatgcttttcatcacctgatattaaaatatgacatcaccgcctgccttgcttgtctgtggcttcctaaagctagagtgttcctcttggttaacttcgttcgttcgtttacatcagttcctggcaaacaatggatgcctagtgaatgtttatcaaatgaatgagcgacttctaaaaaaaaaaaaaaaaaagtctgagtccttacagttaagagcaaagagtcatttctaggcagagacagggagttacctctaggacagggtcaagaatcaagctacgagcccaggcatgaaagcacatgcgggtaatcccagcccttgagtggctgaacaggaagatgcagagtttgaggtccacctagactacataaggaggcagcctgggctatccaatgaggccttgtttcaaaaccaaagtaaaccaaccaacgaaccaaccaattagaagaaggaggaggaggaggaggaggaggaggagaggaagaagaagaggaagaagaagaagaagaagaagaagaagaagaagaagaagaagaagaagaagaagaagaagaagaagaagaagaaagcttgtcattcgaggggaaggcaattgtttgagaatatgttgcctgcctcttttccttcccaaggtgtcttagatatcattaactcggataggtaacccctggagcagagtccggtatttaagagaaacaataccagccaactagaggcccagccacttactggcatgcctggcattatccaccccttaagagatgttttgcagaaaagtctccgtgataaggcttagaagacagaaccctctccccctggccctctgtggtacagggaagaactggaaactcgcaggctgcaggcagacacagactctccacacttctgaactgtattacccgttgttttggtttgcagcactggcaatggaatccagagttttgcacgtgctaatggagtgctttacctctgagagatgcctctagccattgtggtgcctaattttgatcctgcctgctgaggagacataccttatgcggctggctgaccttgagtgattgccccctctgagctccagtcatctgtgaaatggggacaatatttatgctcaccttgctggggggagggggggtgaacatagacaaggttatgtaggtcagagtttttttgttgttgttgtttgttttttgggtttggtttttttttttttttatgtaaactgtaatgtccagtggactctgtggggaagaggtgacttcgtctagagtcgagctgacttgggttggagttcagcgctgcccctttctggaggcctctgggtaagtagcacccttctctcaacctcaggtttcttatctgctacgtgagaataccaatagtgtgccctactcgaaggcttgttttagaaatcaaataaggaccaaaggagataagagaagcctctaacatacagtaggcacccaggaaatgtcccttctcaaatgtgtgcacacacatagcccttaatgcagtcagggtaacaaagtattctcagtttggaggagaaaacaggcagccaatgagcaacccccgctctcgtttccattctaagaaaggaactcactggccaaagtccaggacagtcagtgatgtggagaacaggaacccatgccaacctcccacacggagtttccaaaaagtgtgagcgcagcattgcgtaacctgtcctaggacgtgccttcagagaacttccacaaactagtccccaaaaggaaacgtgagcagagccgtggagtaacctccggagggaggaggatgggagctgaagtgtggggttgagattggagagagaagccgctggccctggtgccaccagtttgtcctctgagctatgccagaggctgagacaggaggatcacaagttcaaagcctgccggaagtacaaaaagaattgcagagtcagcctgggctacatagtgagactctctgccttcaaataaaaggtgaaaatggagacaaggaaacttgtccatgagacattctccaggtatgcacaaggccttaggtctagacctcagtactaaaagatggacacagagaaagaaccatatttattgagcttctactatgtcctgggctccagattagttctgtctgatacttattatagtaagatccttgtctcaatcctgagagcttaggtatttccactcccacattccaaaggaagaaataactgcagtaatgaatcctgccaacatttacacaacactgactagttatccggctaagaacacatttgatcctcagcacagcccacaataggggtgctactgtgatccctgtgttatggaagagaaaaaaaaacaataagatggggcgggggagggggtgaagtaggttccccaaggttaccaaacgaggcagtaactggagccaggatttgactccagtcccatgggacctgagtggcttcccagggtggatcagaaggtgaccccagtactagttgtccttatatgcttgtagttaggcccccatatggggaatgatgtaagtgaccaaatgaccagacactcagaggacagtttgtcccagctggtggctgtttgccacttctgcctctgacccaaagtttgaatttcattcataagtttgtaaccacagacttggcagtgtgggaagagcccttggggaccagctattctagtccgactcccccgtattacaaatggaaaaaaaccctaaagcttagtgacaaccatggacacatcaaggtcacagaaaatttttcggttggattgggggagttagtttggggtcaattagagagcatcttctagggttgccaaatatgtagctctgactcactcttttaaagttgttgttgttgagacaaggtatctctatgtctccaagcttcctgtaacttctgatcctgtcttggcctctagactccagagtgtacggatcacatgcatgtatcactatgctcagtttgggattagctttaaatgtatagattttggactgaagtgtagctcaatagcatagtgtttgtataaatgtaggaggccctgggtttgatctttagcactggggacacacacacacacacacacacacacacacacacacacacgccatatgcttgtagaagttgggcagttcacttctcttagtctctcactgtgtgtgtcccaggaagtggactcaggtttttaggcttggcagcaagtgccttggcttgctgagctagccatctttcaatcctgacactaatctctacactcagcttttgtagagaatccaaatatgccctgtttcttaaggagctcagatggggcccaccaggggacttgcccaaggtcaaatgacaagtcaatgacatttcctggaccctttgatcaaatgtcaaaaataagctaaggaggctgttgaagagaactgtcatgggtctcttagcccctagtttccttgctggagtcaggttaggacataggtggcctttcctcagactcaacaaggtaggaacccaaaagctgaaccctcaaagggaaaaggaaacagcagggcaggaaaggatgtaccccactactggggctttcccagaggcaggctctgagctgcaggagtgacatcagacgggatctgtttacacagtcgcaacgctaccgtgagtcctatctcaggatgagaaggaacgctcccgtgggggatgagatggggtggaccctaacccagctgtggtgtgaaggggatggatcaagtaaggactgacctgcctgagggaactaagcagggaactacatttccctgctgatctttctctagagctcccccatctgttccctgatctgtgcttcctaggcagcgtgggggaatttatggctcctttttcttttactacagtgccaccctcttcttccttctttctttctcctgtcatgtggaaaggaatttggcgcttgcagccacgtagcctttgtttaagcccagtctaagtcaccttcctctccctccccctctccccctnnnnnnnnnnnnnnnnnnnnnnnnnnnnnnnnnnnnnnnnnnnnnnnnnnnnnnnnnnnnnnnnnnnnnnnnnnnnnnnnnnnnnnnnnnnnnnnnnnnnnnnnnnnnnnnnnnnnnnnnnnnnnnnnnnnnnnnnnnnnnnnnnnnnnntgcctctctgcctctctgcctctctgcctctctctgcctctctgcctctctgcctctctgcctctctgcctctctgcctctctgcctctctgcctccctgcctctctgcctctctgcctctctgcctctctgcctctctgcctctctgcctctctgcctctctgcctctctgcctctctgcctccctgcctctctgcctctctgcctctgcctcccaagtgctaggattaaaggtgtacaccaccaccactgcttggccagcctcggtttcttcacattcagctgtcttgggctatgagatttccatcactcatgtgtgtccctgacagtctcacagacactgagttctgcaagtctgtgaactggaggagtctgaacacttatgctgaactgaactgaggtgcctcaaagatgatggagcagaggagtggctcagcaatcctcagactagagtccaggtgaattatttacagtttccgactgtaagagaaatcacgtgccctggctagagccttgtttctttacttttgtcgagagtcctagcaattctaagtggtcacgtgaccatcgctgctctttgaaaagtctgattagcagctatgtggggccttcgggaaagttcttagacagtgtcgattagatgttggagaatgttcattcactccaactcctcatttcagaaatagggaagggctggtgagatggctcagtgggtaagagcacccgactgctcttccaaaggtctgaagttcaaatcccagcaaccatatggtggctcacaaccatctcacaaccatccgtaaggagatctgactccctcttctggagtgtctgaagacagctacagtgtacttacatataataaataaataaatctttaaaaaaagaaaaagaaaaagggaagctgaggtttaaagaggggcgctgctttgtagtcacactgctagcaagcagcagagtcagcgcgaaagcccacagtcttcctcagaagtgttcacttcccttcccgtgctcttctgtggaagtggggagcttgggtctctgggaacagaaatcaattcagtcatggatttgcctttgcccttttctgttcttgattcattcagcaaatatttgccaactgtccactactcactctcagagaaggcggagatcgaaaatgaatgtggaggcaggcaaggtcatggcgtgatttcagaagctgtgctttcttctcattggatgagccacctcaacacccactctcctgccatcaaatgtagccgtgtctgagcacagggcaatgtctcatgtgtccaaacctgcctagcctccaatggacacaaacccaccattgcaatccctggaaacattgaattataatgtctcctttgctgcagtatggcacacacttttaatttcagcacttgggaggcagaggcaggtggatctcttgtgagttccaggccattctggtctacaaagcaagttctaggaaagccagcagtgtgattacacaaagaaagaaaccctgtctcgagaaaacaagaaccaaaacctgttttgccattaactttatttaattaactaatttatttattttaggtttttgatttttttttttcaagacaggtttttctctgtgcagctttgactgtcctggaattcatgctgtagtccaggctggctgcaaacttacagggatccacctgcctctgcctcctgaatgctggaattaaaagtgtgcaccactaccatctggctaactttatgtttttaagagtgtttgttagctgggcagtggtggcgcatgcctttaatcccggcacttgggaggcaggggcaggtggatttctgagtttgcggccagcctggtctacagagtgagttccaggacagccagggctacacagagaaaccctgtctccaaaaacaagaacaaaaacaaaagacagtatgttgcccctcttctctgacctttagtttaaacatgtgtataatgggagcagaggccaaaagaaaaaaaaaaaagagcctgaaaactctgtactaaagaaagaaaacactgagaatctaaaatgaaaatagtcattttttaaaatgtattatttccttgggagtccttgggaattccatgtgggtctggaatatagcaagtttcagaccatccagggctacatagtgagactgtaagacccctgaagctgggcctctgctcaagtcccaggatgagttggccagcaccccagtgacccgagagaaaaccacacctgatgcaaactgcaagaggttttattattaggtagctgaggatgaagtccctctgctgtgcaggggctgggagttgaccctgagcggtgacagtagggggcttttaacagctagctggggaattgggaggagttgggaggagagttcttctcttccgggtgtccttggtgaaatttacaaggcaggagtggggagtgagttctttctgaatttttatctccatgtcctcggcacaggaaggcaggcatctctggttgtaaagtatagaaacaaaaaggctttttgctggctatagagaacaaagagcttctttctggctgtattttagagatcgggggaaacaagcttggggaacgtccaggggctttaccttccagggagaaacgctctaagtcggggtcccacgagactctgtctttaaaaaaaaaaaaaaagaaaagttcccttttgttaaatttaaattgttgccgggtgtggtggcgcatgcctttaatcccagaacttgggaggcagaggcaggcggatttctgagttcgaggccagcctggtctacagagtgagttccaggacagccagatctacacagagaaaccctgtctcgaaaaaaaacaaaaaaaaatttttttatattgttatcattgtatttctatgagtgtgatagtcagatgatagcttacaggaggcagtcagttcttttcttccaacatgtgagttcaagatataaaatggtcgtcagtcttggcagcaagcatctagccctctaaccatctcaccattcctcagtgaatgctattttattttattttttattttttatttattttatttattttatttttaaagtctagaccttccacccctttccctcctaggaatggacctgctggattttaaaaatctccctctagagggcgcgcaagacccacggttttgtgcctcacttccgtttgccttcatccttcatcttacgcatgtgcagagtttatttccgggctgctcgcaagggcccctttggatggcgtgtagggttcatccactgcgtctgcgcaatgcccctcggttgccgtccccggaagctctcccttcccaggaagccgtgggccgcagctattcggcctctctaggccggcgggtcctccgctccatggtcctgtctgtcagcgctgtgtcaggaggccagtgccgaggtccggtcgcgctccgacgcttcgaccctcgagccggtcgcgggtgagtgaacccgggaggagcccggcggtcggaacgggtgggtccgcccgccccgcctctcccacccgggaatgggcttgctcccgggtcccaggccctcctccctccctcccgcgccgttaccaaggcgacggccggcccgccggctgcagctccctgtgtcttcccgcaggtatcccggcggccgcgggacgatggcgtggtggcactgacaggcgcgggcggctgccgagccccgcgggccggcatggcgggccagttccgcagctacgtgtgggacccgttgctaatcctgtcgcagatcgtactcatgcagaccgtctactatggctctctgggcctgtggctggcgctggtggacgcgctggtgcgcagcagcccgtccctggaccagatgttcgacgcggaggtaagcttagcggaaaggagtggggttttgtggtggggcaccgccgagctctaaatccggctgggccaagttctcattttgtggacactttttttttttaagaagggatttcagtgtgcgctccccgcgcgaccccggtgcccatctgtaaaacggaacgacgagaacagggaaggagatagagtctaggaagcaaagtagtgatctacaaagttcacgctcaggaactgcgcgttcgagatacaaacaagcaaaatctcatagggttttaaagaaccttacagtgttgtgttggctgcctatgcgcttagcctcgtagccagctccgcagcttgtggctagaggttgaacacacatggcagatactacagtcaacagacttgtgtcccgggcaaacatgatgtctctttcttgaaaccctctagaaaaatgacttcctttctcccagctgagcttgtcaggagccacagtaagaagagggatagacaaaagggcatccgtaatgatgaagtggaaactgttaagacttggtgtcagataggtccctttaaattcctctctgccctgtgacttgggcaaatgtttcctctcccgtctgcaatatcacactgttggtacgaggtggtgaactgttcaaagagcctgctgtgcttagggtccaatctagctgagagaacttgaagagttgttttgcctttccaatcccttttatcctctgcaaagtgagcaggataatcctgtcatgttacctatagtaaaatgttaaaaggcccagaggggtttaagaataagaaaatgcttcgtgccgggtgtggtggcacacgcctttaatcccagcactcgggaggtagaggcaggtggatttctgagtttgaggccagccttgtctatacaaaagtgagttccaggacagcaagggtaacacagagaaaccctgtctcaaaaaaaaaaaaaaaaaaaaaaccaaaatgctttgtgaggtatagtggaagcctaagaggttgctaagaggagagacagtgatagttgatatgaacaaagttcttggttcgggagacctgggatggagtccttgtgtttgctactgttgtttgcattggcctttgggtaactaattctgtggaaagagacactaggagctttgtgagatcatggatgtcaaaggcctttgcaagctgaagtatggcacaggtatttagtatttggtagtactctgtcaacaataagtatctcaaacatagcagatgctgagtagtggcaccttgtgggtgactccatccttcttgtaagggccaatgggaatcaggctttgttgcagagtggcctgatgtccacagcctgagttcagccgacggctttggaaggatgagatactaacgggcttttggtcatggttattcaactctgcccctacagtgtaaaagcaatcctaaacaatatgtcagaaaatactgtgaactgtgtttctgtgaagcagaagcctgacctgtggagccacagtttgctaaggagatttcctagacttgattcttgctgtctagacaagctattgcctcaggcaacttccctaaactcttgcatcttttgtaaatggagaatagtagtctctccccatataccatgaggttcaaatgagatccgagtggatgcgtgtgaagagagcatggtgtctcctgtcctctgagaagagtgctcgtgccatcggctctgtgctgggatcctggctgtgcaaagccacctctagcatgtcccctttgtgattccccttcagatcctgggcttctccacccctccaggccggctctcaatgatgtccttcgtcctcaacgccctcacctggtgagtatcaccagctctactatctgtctttcggggtctaacttcctaaacttaagcatgaggcaggctggcacttcttcttgggagtagtaagatgggtcaagagtgtgtttctgtggcctggccccgtcatggtctccattgttgttctgaattaagtacaaagctcagctgtcactgtatgtgcctgatggcgttctttaatgtagtgtgaggtagggaaagaatgacgccaggcaccgggagaattggcttacactcttctcctgtgccatcgcttgagttactttcctcttcctctcctggccccaggctccctgtgtataccaggggttggacttgttagcatcctaggtctcttaggaccattgctcatcttttaaggatcagtttagcatagggaccaagatcttagacttaagagcagtctcacttggctttgaaccttacccactggtatagtgactttggatagtttatctgcaatttggtcatcagtaaagtggggcgaatccaatcacttagctcatagctgtaaagtgctgttaattcataggaagtacttcaaacaatatcttgtcctttatattcggactttacgctgatggtggggaagtatacagatttctggcttttcttgattagtggggaaatggattgattccaggctgtagtaagatttgcctagatgtacgtagcttttgtctgcattttacgtagaccatgtatactttccagtacccagcagtctgaaccattcctgggtagctgtttgtcatcaaactctccacccgacctccctctgtcaaccactcttgatcttacccagtaggtttctgtaggcatctgattaggatgacccttgcttctcacttaccgtgcttgcttctgatcatcatgatgtcatcctaactgtccccacttccccagaaacctgatgtaaggccaggacaacccagtgacaactcgctgctatcctctccccacagtgccctgggcttgctgtacttcatccggcgagggaagcagtgcctggatttcactgtcactgtgcatttctttcacctcctgggctgctggctctacagctcccgtttcccctcggcgctgacctggtggctggtccaggctgtgtgcattgcactcatggccgtcatcggggagtacctgtgcatgcggacggagctcaaggagatccccctcagctcagcccctaagtccaatgtctagagttgggccctttggacactctgctggcacttgggccccatcaccttgggctgctcagacctccagatggggtctggcccaagtctgagcagaaccctggaaatgtgaagtctgttggtggagagataatgaggtcccatcataaaggcaggtagcagccatgatcacagatgtaagaatggcctctgtctgccaaagccttgatatctggaggccagtaagggacctcatggagggtagtggcagatttggaaccatgtcacatgagccatcatactgtcaccagcctgttattttaaaaagaaaaaaaaaaatcaaggatatctgattggaataaaccactcttctcgttgtctgtcttatgcccatgacagccagtacctttgctgtgttgccaaaccacagggattctctgtggagaaatacctgatttctgggtccatagccacagaaaaagatgtaggtacagagtgctaggctgctgacaggacgtcgaggggaggaggcatcaagcacaagaaaaatgcatggccgtgccgttagacacacacacacacttttgtgtgtgtccaggacccatgactgtctccctccagttccctgtatggactctgccttgctgttgtcactcagcacagccagagacaggacccagagaaaaccccagcatccctcccagccttcccttcataataaaagccattgtctgctctctggaagtgagcaggcagccagcttctactggacctcaactgtggcaggagtttctgtttgctgtcttttgagttctgtgatagggagggtgtactaaaggtgctggaggctcaccctgctaagctttcttccaagtggtttcctcaggaagggctggcagctgtccttcctaggtacataaatacactattttccaatcctttggcttgtacttaagtcattgttgggaccaagagagatcaactgtgcacaagagctataaataattagtattccttcattcctgagccccagagttatttctccaggtaaaatactaaatgccagagtaagtgtggtagcactaccttgccctaagacttgggagactgaggtatggggatcatgagtttgaggccaacctgggcaacatgacaaactcaagggttaagagtgaagccctgtctcaagaaaacaggcaaaataactatatctcaccctccacctgcagctgcctctacagtatctggtgtaaactgccacactcccccacccccaccccccagagacacacacttgtgattcctgaactgtggcatacatttttttgtgaagcctctttggtttctggagcttgtccaagctagctgaggatcacagctaagatgagttttgcttcctgcacagagagcccttcttgcctcttggctctgctcggtagagtgagaatctgagactgaaaatattcaaaggctaggtgagctagggtgaggcccggggttaacccggggttggggccacactggctgcagggcctgggcccagctagattggtgggtttcctccctaacacaaactctgaagacatacgtgacagtaatgaatgatttcagcagttgagtgtggctgctcccttaagctgaggattctgttgctccaggcaggaacatctcttatcggtttctcttaaaggctgtgccagcttttcctgcataggtttttgttttgttttgtttttaaatgagaagcctgtgtcctttgactgctaatttgatttttagaaattggaaaatcaccaaaggaaccaaggtggattttttaaaatttctttttattccaattaatatgatgactgagctgagtaacagttgattaaagattacataaccttccccagaggacagggagacaggtctatctccatagctaactggccatcccgcctatctgaagtaacaagtttccagttcaggataccctgtctcaggatagtaggcagagagtgaggggggggaaattccatatcctgctctgggccccgcacgtgtgcatgcccacactcaacctgtacagacaccatatgcatgaaacgcatgcgagatctgtgtgcagtttctgaagcaacagtgcgaatggtttagagagatgagttccaggcttcagtagcagtgacagcatatcatcttaatataaatgcatccacggggtgcttaacaggtgtctgtctagtagtgggccagggacttgcctcttctcatgtgacaacttcagttggaagtcccatcatccgtatcttacagataaggaaactggagcttgtcagcctcgggatttgggctctggaggtgacaatgcactcttgcacagagggcggagattaggatgtgtaagttctgattggtccagcagtctataaccttatagtcaggccttcagacctcactgtatagctctagattaggttgaacagagttttacaagcataacaacctcttcatgaaaaatgggtaggcggtgcataaggaccacagcttatcaagtgacagaggaacgcatgccatgtgtgtctttccagaggatgaaggctgcagtctaaaacaaacctacctccagcttcctggtgaatgaacatacctcctctggagacctgaagtcttggccctgcctctcccttcactctgcctaacacctgaattcaagagacatgtggagacttgtgcacttgccgctcaaaacagttaaccccaaaagacaggtgaggtggggtggagtatggctcagaggaaacctacctcctcttctaggcagccccgttttgatcgactacatggaagtcagaatgcactggcagacatcttggagggaggggtttgagggaaggccccaggtcctcctaagtcctgaaggaatcatgactcataaaggctctcctggaagctgagtttctggggctctcctctgtggctttggggtgacttccttcttctgacccaagggcagtcagagagcaaacatcacggcttgtaggagagtgacaagagctaagggaaactgttgtgacaggcgaggggccgtgtgtcctggcacgtcctactcagtgggacctgccgtctggaggactaggaagctgcatggggtgactgagtcgaggccagcttggctggagtgcgattgtatctcacactctaaccccaacccctgcaaaagacagtactggagtgtttccatgttaactatatacattctttcatgtttcaggtggtgcagtatggtggtggtggggtgggcatgcagtattgttcagggtacaaggaaagcctacatactcagtgtggagggacatctttatcaagtatttcccatctacagctggataaatccatatatgtatgcagggctcaggactgtggagggcagattgtactcacttctttagattattgtgtgaatttcatgagatcccacatgtaacgcagatctggaaagtaggcaatgaccaatgattataaaagttagcagtctctctcctgcatccccattttatagaagagactctttttaccagtctgcctcaccctgcccatgaatattctcacttaatccacggagagagggaccacaaagaaggtgttaacaattcagctccacaccacacaactcacgctccaagcttgatccagatacgttaggaaaccgacagctagtaccttattggcagccaattagcagctcacaagggagaagcaggaccaagcctgggatgttagggaacggaactgtgaaggaaacttgggggaaatctaaaatccttcagcaccccacaaactgaccttccacataagcttcatttacttcagaacctccaggtgggtgttagtggtaccccctctctttttgagacaaggtctcactgtgtagacttggcaagtgctatctatataaaccagggtagccttggactcatggggatccctctagctctgtttccccaacgctgggattaaaggccccacctctcccagctagtgtcccttaaaaaaacaaacaaaaacaattgaaatagtgagatgtggaggtgcacacattcagtcccggcacccgggaggcagaggtaggcagatctggaatgggggagagggggcagcctgttctacagagtaagttcagtgccatttctgggatactcttttctcaaatagtggatcttaccaaacccagaagttgttcagacttaagtagttaaatgcaggaaaggaggcagtggaatgtaagcagatggcagtcacaaatgtccagggcttggggacatggccacgttggaagaagttctgttggaggcagaagttgtgcctttcaccaggcccttcctccccttggtggtggtgtacctcagcctctgcacataggcctcagcctaactcctctccagggcacagactgcagcatgtcaaccttggccaggccttctccactggagcctggtacacccgagtccctctctgaactgggtgccatgaagacagagcttgtgccctgagcacctactgagggatgctggtctgaggtcacaggttaataagcaggaggttgggaagagattgaacaggttatttaccaaggttgatgggacccaaaatggagaccactgagcaggaaaacagctggagaggagcaactggggaggagggtcctgggaagcggtaggggtggtgatacacaggtgggccacagagtgctcagatgcccttgggctccacctctaagaaacagcagtatagtgggacactcccgatgccatgtgtggctctggccggtccatgttctcaggctgcctctccaatacagatggcagtgccaggcccagtagggagcagcagtgtgggagcaagtgaggccgatctccatccttctccctcccagagggctctgtgggaggacctgccctttggtgcctcacctgagggcaggcacactcatggaagccagctccagggaggagacctgggatcctttgactctcccgagctgtgtgtacaaggcctatggttcctgctgacaactggtgacagagatgagatcaagttagccagagccagggctcaagggcgaacctgtgttagacctcagctgtaggacacttgcctatcccacctgtcctggttttcccatgatctttgaccaaggttagagtggttggccaggatccataaactgtgaccaaggaggcccagttattgacaccacaagcactgacaatctatggggagctggattctgggaagactgtgggccaagtccgtgtgactttctccccttaggaaagtagaatggagaaaagccaggagaatgagggtaactttgctctggtgactcctctctgagcaagcctgggtgagtcacctgctgtagaggcatacaagtctctgctgctccttggatctcaggaccattatgaggtacctgtacccaggagacaagtgggctctgacttcatagaggaagtgtgcactgctcaaagggaccaccttgtggggagttgggggaggctgaaggacacagcttggtagattttctgttctggttttacaaaatgaccttaggagccaagggatggaggaggatagccgactcatgacacatacacacccaccctcctcccctgcacctccccaggaaacctttgctccatgtttatgtgatgtcagcctcagataggcagagccagtagtgccataggggagattttatttgtagacttgcgactgtcttgcctatcccttccactaagctgatagcacgatctctacttcttacaattcaagttcccgtctagggttacacaccacctgaaagcagagcatcctgttagttatgagaaccgcccctagagggagctgttattcggtgagcaagcacagggcctgggcgctttggtttttgtggcaagttggagctctttggttttcccaaagggaaacacattaacgtggacttcatgacacagtcggcctcttccattcgtgggaacctcaaccaacgaaggggagagtttcttgtctttgctttaagaactttctctgtagcataagtcttatttaaaatgtgagtaaatcagagttgatttggtctaaagggaagtgacgcagttaagcccagtgtggctcctcctcccgaggtttaaacatcaattgagcttcagagacagagtggtttccactctcctgaggcctcctcatttgagatggtgcatatcaggtctcaatgccatcgcaccttgcctggagcttagagtcagaccaagatgtatcctcagcccagcttagcctgctgtgtggcctgcttcccctctctggaaatggagtctcccagtactgccaaccacagtcaccaagacccacagccccgagcatgagcctggctgaggtggtgtcacacttacctagtgtggatggtacgtaggcagctcagagtgatgcacagcagaaacgggtgcaggagcgcttgaggcaccggtaggtagacgatctacacatgattcggcgccctgggatgtgtatgcgtgtgggaagcccctcaaaccagaccaactggtcagttatatccagtgccttcatcttccccatggtagtgctgtgatggtaggtctttaagaagacaactcggggcttcttaacgtaggtcttcctcttctgggccctggcttgcaagccaccactctttattaccttggagattttaaatgtttcctgcttttttctccatgtcacggctgcaggtgaccccttagatccttgcttgggcttccactttttggatgttttttgcttgggttcctttacggactctgccttcttagaatttggtctcatttcaaggaccctaatctcttggaattttatattattttgtttcactttgtccttgtccctggcagggagaagaaagaccatcagcagattaaggctaaaagggtccttctaacccagccctgaggtggttgctatgtagagttctagctctaccaggctccctgaaccagactgaaaagaaatgtctctggagcctgggtgtggtgtaagagtagtatgggcagaatggatgtgagacctcgggaagtcagatagcaggaccagtatttgaggagcctaaggatagtatgttgttggcacctgccagtatactaggcttctgtctcaactgagagggaagactgtccagtgttcctttcaaattatattctgagaaatcatggcattccaaggagccttctccagtaccctcacctgccctgggtagaaggcaggatgaaggtaagatgcccctcacattgagggttagttagggacaactgtttctaagagatgtttctgtgctttcagaaccatggtgttctgtgaccctgagccacgtggttctgggcttcccagtcacctgtatctgggaggccacattaaagaaagagcctcaggaaggaattaaccgtctctctctctctctctctctctctctctctctctctctctctctctctctctctttctctctctctctcactctctcaccagaaaggagatttcctcaggagtactgcaccagctgggcaaaaccccacgctagctcatcctagctgatgagagtgatgccagtggatggcggctctcaggatctgccaagtaggaagcagtggagccgcagcagactgcagcagtctttggagacagacatgctagactctgatcatccagatgaggtgagacatgtaacctcccagagccctgggtctccatcataaaaatggggcacacgtaggattgttgtgaagaaggaactaagtaggggtgccaagcagagagcagacacttacacacatgttcttcaaattctagagtgacctacgaatgatcagggtctgagcaagatgcatgggtcatcaaattcagagggcagtctgtgagtgagtctctgggcgaggctgccagggagaggaggctgccagggagaggaggcagagaaagctccctagcacatgcacactcagtaccccagtgatcagtgggcccttcactgtcactaggtgactgtgatcgctgttacagccacagctttgctatgaggtgggaatgacttgagacaggtactctaccaattatcaattcaactggccaagctaaatcacttcacttcctgggcttcaggccctatcagtaaaatagcttgagtgaatacctgttgcacagagcccttctataaagagggccactgtttccaatcctttactacaatttctgttcctggaaaagatagccattgggtccgttttatgagtgtataaagagggggtgtgggcaagcttacctagaagagatttgcaggatctttggaactctgagcattgaattccagcaccttctggccagcttatggagttcttggatccggctatttgagctcttgaatagcttcaagagggacaagttttttaatacctgccagggtcaagaaaccggaaagaggtctccagatctcccaggggagcccttcatcccctgtgtgttgcttggctcatcccagggatgagtctgctggctcccatggcacacccggtctagcacttgggggtggcacttcaggtaggggttggcttccctaagcaggggctaaaatagaacatctcaccattttaagtcgattccgctcaatcactttgctcacatgctgggttatcttgtcctgcagtttctcatcttgcatcttaggggtaggaagaaagagagagagctagtataggggaatccccttgagttcctgtattgtgcctttcctgtttgagtacggtctgagcagtcctagactggagtcttggcatgttgggtttggaacagaactgagagagttttagctctaccggcctctatttcaccttcccctttccccttcccacatggctggagagactgtctttgctgtggctggattctctggttagaccccttttatggggcctgccggggctccaggacaaggtctgaccttagaaggcactttatccctcggcctcttctttgtagatggactcatgctggggctgtaggagcaagactggaccagtgctgcctgcaccctgctcctcgcactgcagcgctcggctgagtaacataggatggtgctggagctgccaggcaggggagctgtgacatcactgaaatgtgcgacagcatcaggactgtgtctccaggggtaaagggtgaaggggcaaaaggccacacccatctgtggagaagctcagtatgaggcaggtggtgaatatgatcatgacctccctataagataagaagatggacccctctttttaaatgaagctaagatttttaaaggttatgtagtttataagttcacatgactggttgctggtagagctgagaacatgatgtaggcccgacaagtcaatccatgaaaaggggagttcccaaactgcccatctccagccaggccacatatgttgactggcacctgtgacctttttttctctgtataattcctagaataaaatgagcttatattcagttgaaatcaggcacagtttgggtggtatggctgtagactggctcacactgtagtggagacaagtatccctcaaatagtatatgtgtgtattataaattttactgatagaaatctaaaaataatcttataatgctcttattataaattttattattcagttactattcttttgtttggctttggttttgggttttggagacagggtgtcttggtgtgacagagccctggctgtcctagaactctctttgtagaccaggatgatcttgaactcacaagagatctgcctgcctctactgtttaaaggctgggattaaagccatgcaccaccacatccagcctgttttgggttttaataagtaatttatttttatttatatggggtgtgtgtgtatgtgtgtgtgtgtgtgtgtgtgtgtgtgtgtgtgtgtgtgtgtgtctaggggtgcttgcagaggctggagagagtgctgtccctaggagttagagctctaggcggttatggtgcttgggtgttgggaagcaaacttggatctttcgtaagagcggagtgtgtttctaagcacagagctgtctctccagccctcaattttgtttttgaaataattgtcttgctatgttgcccaggctagcctcaaactcagagagctgtcttggttcctttgcttagctctcccttagttgtctctcccaacgtagctagtacttacactttccttgaattttgcagaagtcttcttcctatccctggccagcatgtggtcatgtctaaacaaatgaacaaatgcggtaccaacataaggactggaatttgtattcaaactagagggcaagaaaacaaaaatatgaaataccagaaactatgaaacaataagagaaactttgaaatttctctctccctcccatgacctgactgcctttgcatagctaatgttttctctaggattttcttttccttcttttcttaatttttcaagtcaggggttctctgggtagccctggctgttctggaacttgctctgtagaccaagctggcctcaaattcatagagatccacctgcctctacctccaagtgctgggattaaaggtgtgctccaccccagcccagcttccattacttaaggacaaaccagttgccaggaactttcttctgtgaagggctgctactggacttttcagctatagctgtaactgcttaccttagttctgtataaagcagccacagatagtatgtgagtgggcatggttttaatgcaagaaaactataaatacaagagatgagctgaatttggaccatgccaaccagggacaaatcaatgaaacaatacttttaaacccagtttgtcatgcttacctctcctgtggaccacttctactg

SEQ ID NO: 751 - DNA, 1586 bp, Mus musculus
gcagctattcggcctctctaggccggcgggtcctccgctccatggtcctgtctgtcagcgctgtgtcaggaggccagtgccgaggtccggtcgcgctccgacgcttcgaccctcgagccggtcgcgggtatcccggcggccgcgggacgatggcgtggtggcactgacaggcgcgggcggctgccgagccccgcgggccggcatggcgggccagttccgcagctacgtgtgggacccgttgctaatcctgtcgcagatcgtactcatgcagaccgtctactatggctctctgggcctgtggctggcgctggtggacgcgctggtgcgcagcagcccgtccctggaccagatgttcgacgcggagatcctgggcttctccacccctccaggccggctctcaatgatgtccttcgtcctcaacgccctcacctgtgccctgggcttgctgtacttcatccggcgagggaagcagtgcctggatttcactgtcactgtgcatttctttcacctcctgggctgctggctctacagctcccgtttcccctcggcgctgacctggtggctggtccaggctgtgtgcattgcactcatggccgtcatcggggagtacctgtgcatgcggacggagctcaaggagatccccctcagctcagcccctaagtccaatgtctagagttgggccctttggacactctgctggcacttgggccccatcaccttgggctgctcagacctccagatggggtctggcccaagtctgagcagaaccctggaaatgtgaagtctgttggtggagagataatgaggtcccatcataaaggcaggtagcagccatgatcacagatgtaagaatggcctctgtctgccaaagccttgatatctggaggccagtaagggacctcatggagggtagtggcagatttggaaccatgtcacatgagccatcatactgtcaccagcctgttattttaaaaagaaaaaaaaaaatcaaggatatctgattggaataaaccactcttctcgttgtctgtcttatgcccatgacagccagtacctttgctgtgttgccaaaccacagggattctctgtggagaaatacctgatttctgggtccatagccacagaaaaagatgtaggtacagagtgctaggctgctgacaggacgtcgaggggaggaggcatcaagcacaagaaaaatgcatggccgtgccgttagacacacacacacacttttgtgtgtgtccaggacccatgactgtctccctccagttccctgtatggactctgccttgctgttgtcactcagcacagccagagacaggacccagagaaaaccccagcatccctcccagccttcccttcataataaaagccattgtctgctctctggaagtgagcaggcagccagcttctactggacctcaactgtggcaggagtttctgtttgctgtcttttgagttctgtgatagggagggtgtactaaaggtgctggaggctcaccctgctaagctttcttccaagtggtttcctcaggaagggctggcagctgtccttcctaggtacataaatacactattttccaatc

SEQ ID NO: 752 - protein, 219 aa, Mus musculus
QLFGLSRPAGPPLHGPVCQRCVRRPVPRSGRAPTLRPSSRSRVSRRPRDDGVVTGAGGCRAPRAGMAGQFRSYVWDPLLILSQIVLMQTVYYGSLGLWLALVDALVRSSPSLDQMFDAEILGFSTPPGRLSMMSFVLNALTCALGLLYFIRRGKQCLDFTVTVHFFHLLGCWKSRFPSALTWWLVQAVCIALMAVIGEYLCMRTELKEIPLSSAPKSNV

SEQ ID NO: 753 - DNA, 25694 bp, Homo sapiens
aaaaatgttaagctatcaactaaaaattatgtcaaggagtacctagtcttaaaataatcatttacagagtacactagcaaaaaaacaaaaacaaaaactgaaaacagctcgtttagagagttaatggaagttcttctataaaactatcttaacctcctggaattaaggaaataatttccccttccccaagttctgagaatctctaaagggatgcaacatgtttgaatataattatttgtggatgtatgggtctttaacctgggctccatgactgggggcagaggacacatgcatggtcagtactcctctaggttatgtgtctctgcatacattattttggggcaagaaacttcagattctttctttatatccacaaaaagaggatgtttgggggatcctccttttgggtgatcctgacccccaaagagttaaaaataatttgtccaaaacctgagattctttgagaagttttattgggttcttctttggcctccaaaaaacaaaatgcagtagtcaaaggtttgtaatactgaataggagttcctaatttcctgcatggggctgaggtacaaaaacccaaacaaccaaacaaaacccacagtgtttacagccagaagttcttcattaaaatcctgtttccaggacttgccaactggaggaaagtttgtgagtccctttgctcctccctacaatggagataattccctcttgaactaattaggagaatggaataaggtgaagtggtgaacacataacatatactcacctatgttgggtccagcactctttctgtatattctaacctgagattgagtgagtctgagagatggcattggtcaaacactttacatcctccccctagcttcctttcaagcaaaaggaaatgatctaggacatcaacaggcagccccctcccatggagctaaaaaatgagctcagacccagcctatagcagaggtggtgtccctcccccttttctcagacttcctaggccggagttaaccaaggctaggtgcacacctggtacatccagagacaccttaaatgctaccttctcctggaatcctccatcctcttcttttaattctcatttcttcctgccttgaggtttctaggactctatctgtcccactctttgggcaggcatccctttctcactcatgttagttttaggtgaagagcacagtcttcaaagttaaagagacctagattgcaatcttggtggtatggagcaagacactttttctctctgtgcctcagttttctcatgtgtccccccatgtaatttgagggtcattatagttcttaacatcataaaaatgttaagactacagtgcttagcacaatacggagcatcaaagtgttatctatttttataatcaagggggcctccccataagagtcttgacttactcccctccccagcagctcctcacacatggttaataacaggtaacacattactattttcagaacagaaaaaggattgggccatagggctctcgcccaggatggtgccaaccctttctggtcttcctcagtttatgtaaatctctctccagctacagataatgacagcttagagtttccaggggctgtggaatgtccagccactgccttgcataaccacagaaactaagaacactaggcccagaagggtcctctcaaatcattcagtccaacagtacccgcattataagataggcaaaccgaggcccacacggtgaatcagcatccaccacaggcattttgaagaattctaaaaataacacctccaattactctttccacttgctttgctttatttttttgtcgtaacatttcccttacctgccatcacacacttattcttttacttgtttattttctgttttctctgccacatgtaagtttcatgagggcaagaacattgttgtgttcacaactgcatcccttgcaccttgtccaaggtctggcagaggtttacattcagtaaatacttgtcgcatggataactggatgaatgccatttggacattttcccttagaggctcagatgtagcaattcactcacttggtcatttatccaaaaaacatctgatgaatatcttgtatgtgagaagcttttcgataaatcctggtgaacaagacctgtccgtgttcttaagcagctccctgattagcggacaatagctgccagctatacagtagactgaggatctactatatgccaagctgtgggctggcaactttatatgcatcttctctgtcttagctcagttcttgcaattgcgaggaaacatgcctcactcaggactccttaagaaaaggcttaggagttattaggaggaccgggagggctaaaggttaaaactgaaagggaaacatcaaggactgagatgatgccacagactggctgactcatctcttgctctttaagcctgcttattctttctttaagagtgtctcttctttttcctggatgtgtgcctctctctcttttactgacttactggttctctcttctagtctaaattttgggaggggaccacaagactcattggcttggccaatggccttccttattccttaagtaagcgcctgcagcccagaccactttttggattactatttggcctagaggttgaacatttagcttctcacataccctgagcagagtgtatgtttaatcagaagggagtgttgagcatcatcttcacttggatgctgtgaagtaagtagttttatctctattttacagatgagaaaacaggcggagcaaggagaaatgacaacaaaaccgtaactgtaacaaagctgccctaacccacctgcaaatctacaattgagaaatccatttctgttgcccctgagatttgtggggtgtttgttaagtagcaaaagctgactgatacaagattcaaactcaagtttctttgattctgtctgcatcaccatgctgtctcactgaacttacagccctgattcctgttcctgattcccaagtgtcctgtcctaaaaggagcagagataaatattgtattcatccattttctgatgttataacagaatcccacactgttggtgttctgagtatactgacattccttgacgctagattttatattgttgattgacttgtttatcatctctctcctctatgagattagagtattttctctttattcactttattcatttatatccataccacctggatcagtttctggcacataataaatgctcaatgaatatttatcaagtagatgattgaatgaataaataatgataaaaaggaagtgtaaaaaaacaacttttcatcttaaaacaaggccctgagtcctttaaggtcagaataaagaataatttctaggtagggacagaaagtttagtacatgatggatggggtcaagaatcaaggtaagaaaacttgaaggtgtgaggctgggcacagtgtctcatgcctgtaaccccagccctctgggaggccatggcatgaggatcacgtgagcccagaagtttgagaccagcctgggcaacatagtgagattccttctctacataaaataaaataaaaatagccaggcctgatggtatgcacctgtagtcccagctactcaggaggttgaggtgggaagattgcttcagccccggagtgtgagcctgcagtgagatatgatagcgccactgcactccagcctgggtgacagagcaaggacctgtctctaaaataacaacaaaggccgggcacagtggcttacacctgtaatcccaacactttaggaggctgaggtgggcagatcacctgaggtcaggagttcgaaaccagcctgaccaacatggtgaaaccccgtctctactaaaaatacaaaattagccgggcatggtggcacatgcctgtaaatcctagctagtcaggaggctgaggtaggagaatcacttgaacccaggaggcggaggttgcagtgagccaagatcacaccgttacactctagactgagcaacaagagtgaaactccgtcttaaaaataaaataaaataaaacaacagtacaacaatgaaaataatacaaataaaaattaaaatatagtttcacaactatttacattgtattagatgtttagagatgacttaaagaatgtgggaagattgcatagactatatgcaaatactataccattttatataaaggatttgagcttctctgggttttcatatctgccaggagtcctggaaccaaccacccatggatgctgagggatggctgtactcagaggtccttccacccactgtcatgcctggcatcatccaccctgcatagatagagggtttgcagaaaacccctgatcattagacacagaacacagaaaaccagtttcctgactccctctggtgtgaaggaaagaacagggaggttggggtggaaagttagagtggaaagacagacaccccagatgtttcttaacttttgattattccagctgacaagacatgccacacctcaatgtgtactgagtgtgagtcacttccttctctaagcctcaatttccttacctgtaacatgtggacaatgtttatacctacatccctggggctgttgcaacaataagatgaggtcaggtagatgaaagctgtatgtcactgtaatgtccagtgcctttttttttttttgagacagagtctcactctgtcacccaggctggagtgcagtggtacaatctcagctcactgcaacctctgcctcgcaggttcaagcaattctcctgcctcagcctcccaagtagctgggattacaggcatgcaccaccactcctggctaatttttgtattttttgtacagacagggtttctccatgttggccaggctggccgccaactcctgattgcaggtggatccacccacctcagcctcccaaagtgttggaattacaggcatgaaccaccttgcctggccttcagtgcgctttttgttacacactgagaaggaatagtgtgtggagtcaaactggcctgggttggagttcagctctaccactcactggcagcatggctctgggtaaatgtcccttctctgagcctcaggatctgcatgtgttcagtggggctattaatagttctcaactcacaggcttgttttagaaattaaataaggattaaattatataagtgcctgtcatacagtagatgctcagcaaatattcctccccaaacacagacacaaacagcacttaaagcaacctgggtaacaaaggggttttcggtctggaggagaaaccaggcagctaatgagctctctctccagttttccttctaagagaggaactcactggccagagcccaggatggtcaccgatgtagaggacaggcagccaactccaagcctcccacgtggggtttccaaaaacctgtgagcacagagttgcataacgtgtccctgagacacgtgtttctactgaagtgtcttcatcaaatattccctgaaaggaaacatgtgagcagggcagtagggcagcctagcgggggaggaagggagagggggaggaagggagagagggagggatctagagaacacgacagtaggggtgagaggaggaagagaaggtatcacatttaatgtgctcttactatgggccagccaccgggcttgacttgtctgatacattgttagatccttgccataaatctgagatcaggcatttccgttcccacattccagaggaagaaataataacaatcatattaacattgctgaggttaacatagtgcccactgcatatcaggcagtggactaagcacacatttgaccctcaggacagcccataacatgggtactattctgaactccactttatagaagaggaaaccaactgagactcagagacatgaagtaactttcccaaggtcacccagcaggacagcaagacagccagagagccaggattcgaatctaagcagggctctcaagcctatgggcctatgggagaacatttcccaagggatttatgggggtggatccagaaggtgaccttagcgattgtccttacatgcatgcagtggggccccagtgtgaaagtgacgaaagagaccaagtgaccagaggcactcccctcccctccacccaaaggacagtttgtcccagcttgtggcttttcgtcactctgcctctgacctgaagtttaacatttcattcataagtttggaaccacagacttggcagcgtaggaagaaccctcgtagaccagctagctattcaaatccaatcccctcatattacagatggaagaaaaccctgaagccggaatgtgactcgccaaggtcacagagcagttttctgttggatgaaggagccggtttagggtcaactacagatcatcttgtgctgtagttatcaaatgtgggtgcacctctgaatcacttggggagctctctaaatacacagatttccacactctgctttgggagacttgaactggacttaggtttgcaaacaaggactggaaatttgaatatccagtatgttcctcaggtgattcagatggcacagggccacgacagcatctgcaagtcggagtccaatgtccctctttcatttgatagtttgggatactgggacccaccaggggactcgcccaaggtcacatagcaagccagtggggctctagttcagactctgtggtctgaagcagactgcttgtggtcaaatttgaaaatgggccaatgaagctaaacaagggggttgccatgattttccccagctcttggtttccttcttggatccaaattaagacggaggatgatgtacatttccgaagcttggcaaggcgggaatccaagaactgaactcccaaaggggaaaggaaagggcaggaggttagcttgcacgcccagtggggttttcccagaggtgagctccggactccagggatgacatcagacattccagccagccctaatatcaaaagctacctgtgttttctagttcagcagaatggggcaggcctttcctattgggaggagatggggtggagtgggcccagctgtgacgtgaagggagcagagcccaggaagagccacgcattccagcatctgcaaggaagacagctgccctgggtattgtcaacctctgcagcccttttctaagcctttcctcccatttctccctaatccctcaccccagggctaactgagcagagagattcactgccccttttccacttcctgctactccaccacctattttactatctcccttcctttatttccctctccctccctcccttcctcccttctttcctgttcttttattctaaaatggcatcttggctggacacagcggcttatgcctgtaatcctaacactttgggaggccaaggtgggaggattgcttgagcccagggttcaggaccagcctggacaacatagggataccctgtctctacaaaaaaataaaattaaatgaaaaatcaaaaaagccaagtgcgggccaggcatggtgactcatgcctataatcccagcactttgggaggctgaggcgggcagatcacttgaggtcaggagtccagaccagcctggccaacatggtgaaatcccgtctctactaaaaatacaaaaattagctgggcatggtggcacacacctgtaatcccagctactcaggaggctgaggcatgagaatcgctcgaacccgggaggcggaggttgcagtgagccaagatcatgccactgcaccccagcctgagcgacagagcaagactccgtttcaaaaaaagccaggtgtggtggcacatgcctgtggtctcagctattcgggaggccgaggcttgggcctgggagtttgagggtgcagtgagccatgattgcaccactgcaaaccagcatgggtgacagattgagaccctgtttcaaagaaccaaactaaaccaaaccaaaactaaactaaaagtcatcttgatgtttggagtcagttgtcctgaatttgaatctcagctctgctccctgtgagctctctgacctagagagtcacaccacctccccccaagcctagtttcctcccctataaaaaggggacaatagctatattttcagattgtgagaattaaacaagatcatgtaggcacttaagaaacagatgttttctcagaaacactagatcatgtgcataatcagtgaactagaggaatttgaatacatatttgttggactgaattgaggtgcctaaaagaatggttgagctggaaagcacctaagaaatctttgggccttaataactccccaactggagtccaggggaactgttcagggtatttccaaatgataaggacaatcgcacactctcaataaagtctcaagtttctttacttttgtctggaattgtatcagctcaaggtgataacacggctatcacaagctgttcagaaattctgattggcagttacatggctctttgatacgttttttttttttttttttgagacggagtctcgctctgtcgcccaggctggactgcagtggcgcaatctcggctcactgcaagcttcgcctcccaggttcacgccattctcctgtctcagcctcccgagtagctgggactacatgcgcctgccaccaggcccggctaattttctgtatttttaatagagatggggtttcaccatgttagccaggatggtcttgaactcctgaccttgtgatctgcccgcctcagcctcccaaagtgctgggattacaggcatgagccactgtgcccagcctaagttttttttttaatgagaaaataattactggaaggtagattaaatggtggaaaacgttaatcatgtccaactcctcatttcataaacagggaagctgaggtttaaagaaggaagtggcttgctggtcacactgggtggcatagctggccctaaaacccaaattcttttcctggaacaacttacttcccgtctttccacttcagagagggggaacctaggatcaatgaagttgatgggttttcgtctgctggagtaggaataagtgagttatcgatttgctcttgctttttctgttcttaactcattcagcaaatatttactgactgtccactattcggatttggaagatagataaaacagtcatggcagcagagagggtcaggatttactcctatgtgcgacttcagaacctgtgcctttttccaatggacacccacattttaaaacacccactactctgccttctaatatagttcatctgtgtctcagggcaggggctgtcttatatatacatgttctagccttcctgccaccgagtaggtgcgaaatcaatgttgtagtgttgaggaaacacttgaattttatttatttatttatttatttatttagagacggagttttgctcttgttgcccaggctggagtgcaatggcgtgatctcggctcactgcaacctctgcctcccgggttcaagcaattctcctgcctcagcctcccgagtagctaggactacaggcgtgcgccaccacgccccgctaattttgtatttttagcagagacggggtttctccatgttggtcaggctggtctcgaaacaccgacctcaggtaatccgcccacctcagcctcccaaagtgctgggattacaggcgtgagccaccgcgcccgaccaacacttgaattttaatacttactttgctactaactgtgtcgttgaaacagtatgttgctttccttctctggcccttagcttaactatctgtacagcgggaacattggcaaactcctacgtggaggagcttgcaggtccacttcaagttatcagactctaactaggagaaaacattgagaatttaggctgaaaataacgacacagtttatcacctcgttaattcccaaacatcattaccgcgtcctaagccaccccacttccctctcccctagccgccttcctttaaaaaaagaattcccctctagagggcgcgcaagctctgcggccttcgttcctctcttccgtttgccttcactcttccttctgcgcatgtgctcagttcgctatccggctgcttgtacctggttcaggaggttcaggcagaggttgcacccactacgcctgcgcaacctcagccccgcccctccgctgctttccccggaaacgtttctttcctacgcagccgctcctgccgccgtggtcgctggagctttgcctctctaggccggcagcgcctctcctccatggtcctgtctgtcagcgctgttttgggagcccgccggtgaggccgggccacgctcagacacttcgatcgtcgagtctgtcactggtgagtagaccccagaggagctcgtgtacgggcgggggccgcgcaggcggaatgggctggatttcccctcactctgagaatgggtctgtctgccccgccttccccctgactcttggaatgggctcaccccttggttccagtccctcctcccgggcggggcgacgttgccatggagacaggccgctggctgaggcccggctcgtgtccctgcagggcatggcgggtcagttccgcagctacgtgtgggacccgctgctgatcctgtcgcagatcgtcctcatgcagaccgtgtattacggctcgctgggcctgtggctggcgctggtggacgggctagtgcgaagcagcccctcgctggaccagatgttcgacgccgaggtagggtccccggactggggcgggtggggtctcggcctccccgagtaggctttgtggtccatcactactgtgctgtagacgtggctgggtcaccttctttctttgtagccctgggaaagggatttcacctttctgagcctcagctgcctcatccataaaatggaatgacagcagaggctgattagtacaaagaaaagggcctggatgttaatacaataaacacgtctgtgttccaggcaactctgatacatttcctttctgatactctgggaaagtgacttgatttctctgagctaggttctcaggtgccatatcggagagaggggtggataaaagagcattcgtgcgggtacagtggaaactgcctggactttggggtcagacaggcgtccgtttaagatccacttactagttgtgtgacctggggcaaatgtcacctctgtgaacttgttttcctgtcttcaaaaccatgagactagttgcagagaggtcgtggactgcaatataaagagcatgtgctttgggttcagaaaagcaagggttcagtctaggcctaaacatataaaactagctgtgggaccttgggcaagttgcttcccctttctgagccttttctgaaaagtgggccggatgctcctaccatgttgccctcaacaaaatgttacaaggcccagaggggtttaggaataagaaggtactttgtaaagtgtaaaggaggcctataagttgttacatctaagaggcagctgtggcgtggtgatgagcacagttctttttttttttttttttttttttttgagacggagtctccctctgtcgcccaggctggagtgcagtggcaggatctcggctcactgcaagctccgcctcccgggttcacgccattctcctgcctcagcctcccaagtagctgggactacaggcgcccgccactacgcccggctaattttttgtatttttagtagagacggggtttcaccgttttagccgggatggtctcgatctcctgacctcgtgatccgcctgcctcggcctcccaaagtgctgggattacaggcgtgagccaccgcgcccggccgagcacagttcttaaagccaggagacctgggatggagtccttgctcctgctgcttgttctctgtgttagcccttgggcaagttattatccaaaaagtgataagaattaaaagaagaagaatggctttgcgaggtttttttagggataatatgagattatgtatgtcaaagacctttctttgtcagctgaaagtgtggtgcagatgtttggcatttgatagtattgtgttggatagtggaggttgcacacccaccatatgcctagttgtagtctcgtaggagactctatgctcctgggaagagctgtgggaatgccaggctttgttgaagagccatatgatgcacacaacctgagttctagcctagggatcagcaaacctttcctttaagggtgaagtagtaaggattttaggtcacaattattcagctctgccattgtagcacagaaggctgctatagacaaatatataagtgaataggtgtggctgtgtttcaataaaaccttatgtacaggagcagatgccgggcctatggagccatagtcagctgaacgctgttctagactttactcttgttgtttattactttgggcaacttaacttgtctgagtttttacgtcctcctttgtaaaatgagaataatccctttccacctgctgtgagaaacaaatgaaatcccataatggatgtctatgaaagcacctattggaaataggctgccgtacagatgtagggaggtattatcttctgtgctctgggaagaatgcttgttccttaggaggcttgctgagatcctggggctctgccaagtcacttctccagtatatttccatttgtgattccccctcagatcctgggcttttccacccctccaggccggctctccatgatgtccttcatcctcaacgccctcacctggtgagtatcaccagttttgctatccagcttttgggctcttagtgctgggactaacttcctaagtttgaacatgagacaggctggcacttgtttctggggagtggtggagtaaagtgggtgacagaggccagttctgggaccagctgtataatgggcctccttccattgctgttttgacttacctggaaagctcttatgtcactatgtttgtgctgcctgcaagacaacttccatctcagataacttccctgatgtggagtgagctgagaaaggattcgaccgagaggcaggagaactgggttctgttcttggtttgtgtgccattggccaagttacttgccatgggcctcaggctcctcttttgtccatgagggtttggactcagtgatgtctaaggtcacacgtaatcattgcctgtctcttaagaggcagtttagcatagtggtcaaggtgtcaggctctggaggcagactcatttggcattgaacctcagctttactactagtctagtgactttggacaagttaatctaccacagttgcctcatcagtaaaatggggctagtaatattacctacctcatagttgtaaggattaaataagttaattcacaagaaggacttagaacagtgccttgcatgttattattattcttgtccttacaccggaggttgaaaactggtgggctgactttgacctaaatttgtcttccagataggttctatttggcttacatagatgtcagcccacacatggtgtttaaaacatttttttcacttagttgaaaatcaggctattttatataaaaatccagatttctggcttctcttgaataatggaatgactgactgattccaggccaaccttctagcatgataagatttgcctagatgcaagtagctactgcccccctttagctagaacatgtatgcttcagggtgtcatgatccccaccaattcctaggatcccctagtgacaattgccatcgatcatcaagctcatactcagtcagcttcactcttgacattacccgccaggttcttctaggcgtctggtatcataacccttgcttcacacttatctcgtcacttctgaccactatgctgccgtcctaattgtccctaccctcccaaataacctaaggccaggacaacccagtgacaactcactgctgtcctctccccacagtgccctgggcttgctgtacttcatccggcgaggaaagcagtgtctggatttcactgtcactgtccatttctttcacctcctgggctgctggttctacagctcccgtttcccctcggcgctgacctggtggctggtccaagccgtgtgcattgcactcatggctgtcatcggggagtacctgtgcatgcggacggagctcaaggagatacccctcaactcagcccctaaatccaatgtctagaatcaggccctttggacatcctgctgacacttgggccccttaacaccttgggctgctcagaccctccagatgaggtccagcccagatctgagaggaaccctggaaatgtgaagtctctgttggtgtgggagagatagtgagggcctgtcaaagaaggcaggtagcagtcagcatgacagctgcaagaatgacctctgtctgttgaagccttggtatctgagaggtcaggaaggggacctctttgagggtaataacataattggaaccatgccactcttgagccacaatacctgtcaccagcctgttgttttaagagagaaaaaaaatcaaggatatctgattggagcaaaccacttctttagtcatctgtcttacccccctgggacagctgttacctttgcagtgttgccgaatcacagcagttacctttgcagtgttgccgaatcacagcagttctgttggagaaacgcttggtttccggatccagagccacagaaagaaatgtaggtgtgaagtattaggctgctgtcagggagaggatggcagatggaggcatcaagcacaaggaaaatgcacaacctgtgccctgttatacacacgttcatgtgcacccaagaacctatgactttcttccagttccttctaccaggtccccatcctgctgccagctctcaacatagcaggccataggacccagagaagaatcccagtgttgctcaaagtctaaccatcataaagacactgcctgtcttctaggaatgaccaggcacccagctcccactggactccaattttttttcctgccttatttagaattctttggcgggaagggtatgatgggttcccagagacaagaagcccaaccttctggcctgggctgtgctgatagtgctgagggagataggaatttgctgctaagatttttctttggggtggagtttcctctgtgaggggcttgcagctatccttcctgtgtatacaaatacagtattttccatggttctgcctgcacttactttgtaatgccacggttgagattgagagagatcagtgcagccaggcaagggaactttaaagaattattaggccaccttctccctttcctggaccccagagtcattcctccatttggttaaaatactcagtgcagggaactcttacatcctgtctccttcacttgcagcgtcccctgctatgcctcaggtgaaccacataattcttgggtttccgttcctacttgctagtgatttctgaacatgttcaatggagcggcacacagtctagacccacttccgcattgaaaccttcactgttcctctttggtttcttcagagctttcccaagagagctgtcagttttcagctgtcagtaacacaaatgagtttatggtaacacaaatgagttttgctatctctctgagaagctcatctgacctcctgactctcagccctacagagtagggagttgatgctgacaggatgaaggtttaggaataaatatgcctgggaagagactgggaaggttctagggtgaggcacctcagtaactcatggtaccttggccaagttggaaggaagcagtttgttaatgaggcacagtaatcctggctgcagggtctaggaggtaagaccagctgggatgaccttccctgggttaatcaatttccctctagacaacacaaactgcaggcatgtgactaactttgaaagaacacccatcatgtggctgctgtcacccttgaccagctgtggtggtggttactccatctgtggttggagcgcctctttgggattcacttcaaggtcttgtgcctatttttctgcatatcttctgtgatgacaaatctctgtcccctgagtgttaatttgatttttagaaatggccaaaagtaacgtgatccaaactttttttcagtaatatggagactgagctgcatggtagttggggatcaaaaatatgtgaccttaatgagatttttatgatttctaaagtaacaataaaagcagtttttagagttgagttccagagagggcagggcaatggcagtgacatgtttgtcattttaataataaataacatctattgagtgcttaagaggtgtccagcagtgtgggctgagtgctttatgtctcttttcaaaatcttcacaagaaccctctgaagtaagaagtaacgtcatctgtatcttacagatgagggagctgtaaggaacttacccaaggtgactttttaggagctggcagagccaggatttgggctctaatagtgatattaataagctcattttgaagaggtcagtagttagggatgtataagttctgactggctaaacagtctggttaaatagtttatcaccttataatcatatcttcttgtcctgtcaatttttttaaataccgaggatgaatagtactttataaacattactagctttctaagaaaagctgatatgcagtacattaaatatagccagagatttccttttttttttttttttttgaggcagggtcttactctgtcacccaggctggagtgcactggtgtgatcttggctcatcatagcctcaacctcccaggctcaatgatcctcctgccgcagccccccaagtagctgggactataggcacatgccaccacgcccagctaatttttgtatttgtatttttatttttatttttttagagacagggctttgccactttgcccaggctggtctcgaactcctgggctcaagagatccacctgcctcggcctcccaaagtgctgggattttacaggtgtgagccaccaagcccaactggccttttttttttttgaaacagagtttcactccgacttcattacccaggctggaatgcagtggcccaatctcagcttactgcaacctctgcttcctgggttcaagcaatgctcatacttcagcctcccaagtagctggaattacaggttggcaccatcatgcttggctaatttttgtatttttcatagagacggggtttcatcatgttggccaggctggtctcgaactcttggcctctcaagtgatccacccgcctcagcctcccaaagtgctgggattacaggcatgagccactgtgcccagcattggccagagattttcagatgatcttaggaatgtgggaaatctatttccaaaggataaaggaaggtacctagataagagagtactagcccactactgagttggcatatctcttaactctccaggtgtctgaagttgacctccctttttcccacccaccacctgaactctggccattcagagagaaaagtggagactcctacatagctgatggtcagaatagtttataacccttaaaggaggacaggaaaggaaaaagggatgtctggctcagagggtacttctaacccctcgctctaggcagccctgtccatatcagtgccaaatgagagccacgatggcagccagcagacatcagggggtacaatgggaagctccaggactcccagcatcctggagggtacacagctcaaacagtctcccctggacaggaatccccttggactccttcctcagcaactcccaggtcagagtagcttccttctgccagccccagaaggcagtcagtgcacaggtatgcaacacctccttgtaccggcagcccagggaccacggagtctcagaggtagggccctggggacctagggcagaggagtagggatggaatcaaggtacaagagaactcctctgtggagagattaaaaaccactgtcttaaggttttctgttgtaaagtaataaagggtggtagaaatagcattgaggcaggagggagtagagggagctgagggttttaatccctgccctgccgctacctgggcaagtcacagtcctaggtccaattctggaaggctttagagagctgcagtggagtgcaaagtcctggagtcccattactagctgtgagatcttgggtaagctatgttacctcccttacctagatttcctcatatgtaaaatgagggtaataatggtacttatttccctgggttttgttttgtcttgttttgttttgttttctggtaggtcaacacttacttctttaaaatggaaaaagtgttccctccctggttttattgtgaagatgcaataagatgtcacgtgtaaagcgcctagcccagcccctggcacgtaggaagtgatccataattctagacaattattaggctaccgtcccccctatccattttacagaacagggacatttttcttctgagcctgtgttttcaaatgttgggggataggcttgccagtcctctaggtaccactaccaagtattgagctcctatctggcatgtactgcaaagtgatttatgtgtattcttactcagtccaataaggtaagcactactatttcccccattttgcagacaaagaaacagaggattgggagtaaacaactttttccccattacaaagttggtaagaagctaggcctgtctgcctcatctgcttttcacgttccagttatgtttatgtgtgatccagacaattgtgagacggacagtcttagggatctaaatgccatattagcaaaaggttgtgaatgtaaacgtacgtttggcttgttaacaagcagctagttccataaaggtgagtagttaggtagctgctgataagtgagaaatggagccgggactgactggccacagggctttattatgatggccgtggtgtggcgtgggaaaaggccaaacatttgttcaatgccccacaaactggcttctcctacatcaagcttgatttgcttaaacccccctgaaacagacattagtatcactattttataaacatgaaataggctcagagaggtcatgtgacttctaaaaagtcactcaatataaaatcagattcaaacacttcaattttttcccagttaactgttaagcagccatttctagggtggcctcctccccaaatctgtgttactgggcccagaggaggagctttaggttgaaatggttaaacaaagagagggtggtagtggggagaccctggttgtggaattgtgggaggcaggtggccagaggcctaagtgccggggcaggtgggatgaggtggaaggatgtactgctgggattccctcactcccagacctgccccttgctgccctggccatgctgggtccccgccttcgtatacagccctcccatatattcagtggcgttcccagtgggcaactggggcccaactccggctctctggagcaaagtggaagttgccagtctcactcaggcccaacccaatccagcctccacttggggctccctgggcaggcccccacgaaggctagtgcaagggagctccccagaaagggtcagattttttagctgggagggcgctgtcttgactgcccgctgacagcgcactcaggacagaagttcacgcaaaggttgatggaatggaagagtgagtagagattattttcgaaagttgatgggattgaaaatacccagcaagggaactgcaagggagactgttcaggaaatgggctggagtgcaagctgggtgggaagaccgctgaaagtggttactggggtggaatttgcacgggaattagcggggtggtgggggcggaggtaggcaccgaccgtaggggagctccaggaagattgcgctgggagcaggagctcgggagcacgcagcagccactatgaggtgctaagcagtccccgcgctgtggctccgcccaggctggtccgcgcggcagctgatgcccagtcttggtgcccagtaatggtggggaggagtgtgtgagtgggcggggtgggagggggggagagtccatccaatcgttctccctctgtcccaaactggagatctatctgcatcgctgccctgacccccaatcccggagagctctgtgcccctcgatggctccactgctctcccgagggcgcccactccatgcagcctgcctctggggaatatggaggtcttcgtccggagaaaactcgggctcccttggctttcctctccccaacggcatggttaggaccctgtgactcctaccgacagagggtgaccccggccagatggggtcgaccagggcttggggttgaggtcttcagattgagggtggacctgccatgtcaccctggagcagtagagatgcagtaccagctccccctcctgatccggtgccttctgtgatctgtgaccaaggcaggacacatttggaggcccagctgacatccactttttgacaccagccacagtgcaatcagtttttgacaatcaatttttgacaatcaggtcgcaatgcacgcgcatgacctacagggtgctggggctattccgcctgcctcgtgacttctgagcaggctctcatttcgccttttccctttcttgggaaaatggaatggggagcaaccaggagcccttgctcctgccactttctagctgagtgagcctgggcaagttacttgctgcctccgcgccgcggtttcctcttgcgagctcgcggggcgattgtgaggcactttgcacccaggaagcacacgagcgccctgacttcacagagcgcgccactcaggagactagctcgcggaggtgggggaggggtgctgctcgctggcttctttggttctagactgaccttaggggcctcggggtgggggtgggggaagcctgaagtcgcgacacaggctccctctaccgaaggcctctttccttcatccttcccagccccagacaaacaggcagagtaagcagtattcgtcttaggtgccatatggaagatcttatttgtagactcgtgaatttcgccacccattcctccccttcagctgatggcgcgatctccaccctctgctcgcacctctggctctcgtccaggtcacatcaacctgccagcagaaacctcggtgttaggcgctaagactgtccccagggggcgctggtcgtttggggagcgggcgcagggacaagggtgctgtggtgtctggtaggttggaaatgcctttgctaaaaaggaaaagcctccctttaagctagacccggtgggcactcacccccttcctttcgtgggactttcattctcccacgaaagggctgcggtattttcttctttttttgctaaggaactttctgctcagagtaaatctttttttcctttctttttttttaagacagggtcttgctctcttgcccaggctggagtgcagtggcgaagtcacagctcactgcagcctcgactcctgggcttaagcgatcctccgacctcagcctcctgagtagctgatactacaagcgcaaggcaccacatctggctaatttttaaattttttgtagagacagtgtctcattatgttgcccaggatggtcttgaactcctggcctcaagcagtcttcctgcctcgacctcccaaggtgctgggattacaggcgtgagccaccatgcctagcctgttcagagtaaatcttatttgaggcatgaatcaatcaaacataaatagagagttgaattgatcttagagggaatgggatgcagcaaagccctacttgaccatctcccccctcccacatttggaaatccttaaacccacttatgtaggcctctgactgtgagattcagagccacagcagtttccacctctgctaaggccttcaggcagtgagatggctcacttcagtgcccctccttccacacatctcctagctgtatcctgagacgcctcaacctagtcactacccttctgtatgatgttggtctaaggcttccccctctctggacatgaaggcggagcctcccagcactaccagccacacaccactcaagactccagatcctgaaccctgactctggggcccagctctgggcctggcttggggcttgcatctcacctagcctggcagtgttgttgtcacacccaccttgtatggatgccacataggcatttcaagtgatgcggagcagaagcgggtgcagcggcgcttgacccaacgcagggtggaggatctgcacatcaccctgggcgccgggaggtggattcgtgtgggcagcccctcaaaccagatccactggtcggctacatccagctgcttcatgtgccccatgggagttctattgcggtagggcttaatgaagatgactcgggggccctcggtgagtggttgcctcccctggactccagggttcaagctatcatccctcgatgtccttggaacctcaggctctatatgcttttctttccgtggcattgccgccaatgacgttttctccttgttcctcatccctgactgcacctgggacttccactccttgtactcttttttcttagggtcccctgtggactctaatttcttggacttgagttccttctcggagcacccgatctcctggaactcttcattattttgttttgttttattgcaggcactgttttccctggcagggagaggaaaggcagtcagcacagcaggaccgaggccctggttcccgagacagttgctatgtagccagctcaggggagcctgttaagaaaggctagaggggcctgcaaagaaacttctctactgcccagaggccttgtgctggtgtgaggaggtgtgatgagcactagcagagggatgtgagagattgggaaggtgaaagccatgactagtagttaaggcccctaagaatgaatattgtctacatcatctgccactagattagggttctgtctctctggacttcagctgggagggtgaacagtccagtagtttttctaaattgtgctccaagaaccttagggttctgaggaggtgtctcaatgtcacctcccctgacccactggggcaggatacctctccccagctcataacaacacaattggggcttggaaatagatatttgaacagaggtttcactgctttaataaagttggaaaactgttcaagaccagcctgggcaacatggtgagactctgtctccatacaaaaaaaaaatttttaagttggaaaatgatggggctagatgatcctgatccttctagctctatgtttcctgattgcctgcgactagaggccaaatcagaaagaggagcccagaaaggtggccttgacagaaatattaaatgctgagactttcccaaagggtgtctgtaacagactgggccccctgcaaacccccagtggcaacaccatcctagccaagggcgtggagagagatgaggccttgggctgcagataatggcaatactgtgatgataataatggctcccgctgattgagtcctcgctctatgccagactcgggacccttacaacttgggatccttactatttctgtgaagtagaaggcagtgaaacagagtggcttacagagcacaggtgttggattcagacaaacgggctcagattctgcttctgcctcttaccacctgtgtgatttgggcaagatatttaacctctcagagccttagcttccttatctgtaaaactaggataattctgtctacctaacaggattgttgtgaagaataaactaaatgggaaaattcttaagtgcttaacactgtaggatggtacttagcaggcaccaatcaatgttagctttcttaatactgtcatgtgacttatgaggaaacggtttgaacttgtctcggaggcatggtaaaaaaaaaataaaaataaaaataaattaataaagaaaccaagcctcagcaagattaatcttcagatttcaggggtcagtctgcaggtgactctctgggttatattgacttgcaggggaggaggaggaggagtaacctgtctgtctcagtgccccagggtgaagtgagcgccacaactggatgattacaaccattgttatggccacagctctaatatcagacaggaatggcttcacatcctagctctgccacttatcagttgagttaactgaatgagacaagtcacttcacctcttcagcctcagctctccagcagtaaaatagagttaataaatacctctctcacagaggctttgtgaaaattagacttgttctctaaatgccttagcacaatgcctgttcccagaaagacggcatttgggtccattatgggggccaggccccagcttacccagaggagatgcggagaatctttggaacactgagcagtgaatgccaacaccttttggccagcttatgcagttcttggatccggcggtttgagctcttgagtagcttcaagagcgacaagttttttaacacctgccagggtcaagaaaccaggtaaatagaagcttcagctttcctggacagcctccctctcccctgcctgcctctggctccgctcagccaagggccggcctgctggctcccctgggccactcagcctggcaaccaggggcagtactgcatgagtatatgagcttccccaagctggggccaaaacagggcgtctcaccgttctcagacggttccgctcaattactttgctcacaggctgctctgtctcgtcccgcagtttctcatcttgcatctgagggacagaggataagagagacataaacccagaggaatcagccaggtgtggtgcctcatgtctgtaatcccagcactttgggaggccgaggtgggtggctcatttgaggtcaggagtttgagatgcctggccaacatggtgaaaccctgactctaccaaaaaaaaaaatacaaaaattagcgaggtgtggtggcatgcgcctgtagtcccagctactcaagagggtgaggcaggagaatcacttgaacccaggaggtgaaggctgcagtcagctgagatctcgccactgcactccagcctgggcgacagagtgaggcactggaggaatcctcctgaactcctccatgtgcctcttcatttggctgagcatggtttgaccaatcctaggctgggagttttgtcatcttggtctggggacagaactgggagaccattttaactctcctgacctcccttcacccttcaccttttccttttctcccatgctggaaagcccctttccttggcatggtggattctttgttaaggtcccctctagggactcacccccagggtctagtcccaagtctgaccttggaaaccctgctgttcttgggcctcttctttgctgatggactcatgctggggctgtgagacctcagagatgaatggagcaacaccagtgccaggcaccaaccctgttcctctcagttcagccagcactcaggctgggcatcagatggtggtgctggctctgtaccacctgcagctgtgacatcactgaaatgtgacagtagcagggctgggtctccaaggagtgtatgtggcagaggtgaggggtagagggtgagaaagaaatatagacaataggcgacagacagctgtgtgcattgtcacaacctccctgtggggtaagaggattatcccctctttttaaatgaggaagccagggttcaaagaggttgaataatctactcaaggccacactagatctagcccagctagatcatagtgggctggaaacctaaccaaggtctgatagtcaacccatgaaaccagggattcccaaaccatgctcatccattcagtcatgtcgcctgttttgactgggcgcctgctacatgccaggtgctttttcttttctt

SEQ ID NO: 754 - DNA, 1431 bp, Homo sapiens
cagttcgctatccggctgcttgtacctggttcaggaggttcaggcagaggttgcacccactacgcctgcgcaacctcagccccgcccctccgctgctttccccggaaacgtttctttcctacgcagccgctcctgccgccgtggtcgctggagctttgcctctctaggccggcagcgcctctcctccatggtcctgtctgtcagcgctgttttgggagcccgccggtgaggccgggccacgctcagacacttcgatcgtcgagtctgtcactgggcatggcgggtcagttccgcagctacgtgtgggacccgctgctgatcctgtcgcagatcgtcctcatgcagaccgtgtattacggctcgctgggcctgtggctggcgctggtggacgggctagtgcgaagcagcccctcgctggaccagatgttcgacgccgagatcctgggcttttccacccctccaggccggctctccatgatgtccttcatcctcaacgccctcacctgtgccctgggcttgctgtacttcatccggcgaggaaagcagtgtctggatttcactgtcactgtccatttctttcacctcctgggctgctggttctacagctcccgtttcccctcggcgctgacctggtggctggtccaagccgtgtgcattgcactcatggctgtcatcggggagtacctgtgcatgcggacggagctcaaggagataggaatttgctgctaagatttttctttggggtggagtttcctctgtgaggggcttgcagctatccttcctgtgtatacaaatacagtattttccatggttctgcctgcacttactttgtaatgccacggttgagattgagagagatcagtgcagccaggcaagggaactttaaagaattattaggccaccttctccctttcctggaccccagagtcattcctccatttggttaaaatactcagtgcagggaactcttacatcctgtctccttcacttgcagcgtcccctgctatgcctcaggtgaaccacataattcttgggtttccgttcctacttgctagtgatttctgaacatgttcaatggagcggcacacagtctagacccacttccgcattgaaaccttcactgttcctctttggtttcttcagagctttcccaagagagctgtcagttttcagctgtcagtaacacaaatgagtttatggtaacacaaatgagttttgctatctctctgagaagctcatctgacctcctgactctcagccctacagagtagggagttgatgctgacaggatgaaggtttaggaataaatatgcctgggaagagactgggaaggttctagggtgaggcacctcagtaactcatggtaccttggccaagttggaaggaagcagtttgttaatgaggcacagtaatcctggctgcagggtctag

SEQ ID NO: 755 - protein, 150 aa, Homo sapiens
MAGQFRSYVWDPLLILSQIVLMQTVYYGSLGLWLALVDGLVRSSPSLDQMFDAEILGFSTPPGRLSMMSFILNALTCALGLLYFIRRGKQCLDFTVTVHFFHLLGCWFYSSRFPSALTWWLVQAVCIALMAVIGEYLCMRTELKEIGICC

SEQ ID NO: 756 - DNA, 32807 bp, Mus musculus
cctaagagtaaataaggtgacactgatgttcatgttaactgctgatggtccctcctttattttaaccgtagcatcggtgtgtggctatttttaaagacaaacagaacaagccgactgggtttgctctgggcagcattgaggggagagttgccattcactacatcaaccctccaaatccgtaagtgactcggggcctgggatgctccttccaactggttctgaaagcaaactgagacgcctttgcttttcagggccaaagataacttcaccttcaaatgccatcgatccaacggtaccaacacttcggctcctcaagacatctatgcagtacgttctagcagcacttcatcctaaagggaaacccccagaaccagacttggagctggctctccaagtgcactggaaccaggagtcatgggagagcctgtgtctgtgtgctcggactgcgaggttgccgcgtgtctgtgggtgtccatagacactttccacacagagtgatagtctgctaaaagaaatgcacacttttccctgaggttgctgcttatgtgtgttcctcggggagctcctgagcttgggttaggtctaagctgctgcacctcagacagcatgcctggggagtgaaatgtgcctgggtgtttgttttcctttcttagtgggaacctgtttctgcctctcactgtccatgttcaccttcacaggtgaatgggattgccttccatcctgtccatggtacccttgccactgtgggctccgatggtaggttcagcttctgggacaaagatgccaggaccaaactaaagacttcggaacagttagatcagcccatcgcagcttgctgcttcaatcacaatggaaacatatttgcctatgcttccagctacgactggtccaaggtgagtactttcaagccagttctggtctccctctcagactctggagccaaaagtctgagtttgagttgtccctatggacatgtgtgcccttagccaggctgttgccacctccctgtgggcagggacctgactcttggtgtggggtttacccttgcatgggggaaggagggtgctatgtcagggagagccatcatgagctcctccctgttcttggacacaacacatgaacatggatggaggaggtctgggccaccaaggtactggaggcagtgcagacagagtgggcctggggttgtaactcgaacctccctggggaatgtgtcctggagaagcagctccacttcattcgtggttttcacttccttttcccacccagccttgctccccatatggcttctccatccgcctcaacctttgctgccctctcctaccccacgtttctcactccattcccctacactgttttctcactgccatcggcagagtatacatgcccgcctgctcagccccatctcagcttcgccttcccgtgtgcacatgcgtactcactgttgcctggccggagtgctgagatgcacccggtctcctccctgtctgcttcccaccactgcttaaagcgtcggtcagaggccacttacaccactgcttgccagtcgttgtcctccagttaaggggagactgggcttctttagctgtttctgtcctgaggtgccagtcctggtgcacagctgctgcctcctggtggctctactcattcccagccatcccactcctggtgccaacttctgtatatacagtcagggttctctatagagtcacagaactaatgggtagtctctgtgtagtaagggaatttgttgatgacttaaacatctgtagtccaactcaccaaacagtggtcagcagcagctgtgaatggaagttcaaggatctagcagttgctcggtcccacaaggcaagcaggtgaagacgagagcaaatcttcctactttcaatgtccttaagtaggtctccagtaaaaggtgtggcccagattaaaggtgtgtgccaccacctctggatctgggacttgctttgtcccagatgactagaagctctccctgccttagtcttaggggattcatagccactgtgcctcaagatctccatgccaagatccatgtcagaaacttgtatctcctggcctccagattaggatcacaggtgagtcttccagttctgaattgtagttcattccagatatagccaagtcgacaaccaggaatacagctggaatagcaccctcgtggcaactaataactgtagctccagttgtagggtctgatgccctcttctccgcctccccccatggagttcacaggcacataaacagctgtaaacacctgcacttttctgggagtgttggctgagactgaggtggacggatcacaaagccaagactcccctcaaacttgaagtgcctgtatgtatagctcagtagccgagtgcttgcctggcattgtgacaaggcccttggttcagtccccagcaccaccaaagacaaatgtttaggagggaaaaattcctgcatcctccctggagccacgtagcacttatgctcttgtgtgctgcccaaagccagaagtcaaacagctgagcacacctttaatcccagcgctggggaagcagaagcaggtgtattctactgcgttcaagaccagcctggtcttcatagtgggaccctgtctcaaaaaaccaaaactgaaaaaccagttgaagttgtaatttgttgaagcttgtgggctcacagtgttgtgtggataagtagaaacaggctcaggaatcctctgatcggaacaggagcatctgtctccagtgtgcagcctggacatagccattccctaaagctggacttcacatcctgtgataagctaccattgaccactgacacactctagagctttgtaatgctgctggggtgagactaaaaatagcaagagtgtgcttcagctgtgtcacttctcctggccacaccttcccaagtctcacctcacctgctcaggatggtgctgcgttcctcctcactctgggatcctaatggaaggggggcccagcattcagagcctgggcaggctggctgtgtctcttggccccgcccactgatgcccacagccgctgctcttctgggagctgttccttctgtggactaggtccttcccctgaagcagcatggatgagttcagccctttgtgaaacctctggtcagggctgatgctaatcctgagaccctcagctgttgccttggcagtgaagtcattgacggaataccacaggcgcctctgagggtagaggctctgataacacagaactgttaacttccctccattcttactctgccttctcagcggtggctccagttctcagagcaggacttggtgtgtgtgtggctattgcttttaatactaaggtcatttctttgtttttccttctttagggacatgagttttataatccccaaaagaaaaattacattttcttgcgtaatgcagctgaagagctaaagccaaggaataagaaatagtggcctgaagctgggactattggagtttcatctcctctctgcccaaacttgggctcaagccctcggtggcccacagccctggccatgggtgtccactcctggagggactgttcttgttgagcatcagcacagcatcctggcgacttgccgtctctccattcagctccctgctgcggttttcctgaaactgagattctcaactggagtcagatcttgggggcactgtgtccagcagtgtgtatttgacagtgttgggtgggaactgttggtgagccctgtgttgtgttttataataaaatattttgaagatggcctgccccttcatccctttccccaactcctcaggaaatagccatcaatctcagaataatgctatgttccaagtttctcatcattttgtcagctcctgagaagctgtgtgagccacatgccacccctgcctcagtgttgagggaaggtgctgctatgatgtcctgagagaggccacggggggtggggggtgtcttccttccacagctcatttatcccacagaaattgtagacagtggatcccaggtgactggcctggggtgcccttggaatcccagctactcatcttgaggcagaacttggagtctggcagacaacttggtttagatgggcagggaatgagggctctctttccagaggtgtctcagctcctctcacggagactcttggcctccatgacggtgagaggagtaagcggtaatgcccaagcccttgagtgtgtggcagttggtaacgagccacaggagcggaatataggagcttcttgcgctcagacccatgggtgtggtgggagaagggccttgtcttccccaaccagagttcaagggacccagaatcattgtgtgtatggtacacacacacacacacacacaccagcactctcagctgcaccggtgccttggaggacaagaagcgagaggctgcatgccagtatgcagctgtcaccaacatggtgacatggtgtttgcctccatgctgtgatacaatgcacccaccagttgtctccataataacgcactagtatgacagcacacacgtgcctacatcatacatgtaatgaagttaatattcatttttatgaactaggaatagtaacatgaaataatacaatgtgagattaatattaatgtagcaactgaatttaattttttgagacaaggtctcacgtagccaaagctcatcttgagcttgacgtgcaggggcatgcagggatcagaagaggatgctggtcccctggaggagcaccacacttgagatgcagtgctggggcttgaactcaggacttcatggatgctaggcaagtgttctacccactcactgaaccagtcccagtcctcaacagctgtggtttaaatatgattgttccctttgcatgcaaaaacatttgtctgagtctttaagccatgactctgagaaagttcctccagtctctgcggatggctacaggctccagggcctaggaggacctgtgagggtacactagttggcaggatacaaattcacaagttgttgctcctaatgcggatgagaataagttagatgctctctcagagcaaccccaaaccatctgcaaaatcctagagacattagcgcctagagacagtccagtggttagtgggaaatgccaccaacagaagatgagttaccctgctatgactggaggggacaggagggacagatagggtcaggctttgcctcctcctgaaagtctaagctctgaagctcaagggcaccacatggtagtttgctattttactccaggactctggcaggcaggttggctgagtttgggacaggtaggtggcgtgcagctaggactattctgactgtcctctggggaggagattgtaaactggtgtcccacgccatgggcctgaatactcaaacttcacacctgttcacgtacttcgatccccccaaccccagagcagaagacagcactgcaaccaaccaatctatccaccagtcactggaggcttgacagcgcaagaaacggggctgagatccaagtccaggctgaccccagtccgtgccacagccgctgaggggctgtggggagaagggctggaaccagtcccaggggccctgacttccatacccaggacagagcaccacccctgacctccatcccacgatgcagtaacacccctgacctctgcccgcaggtacagcagcatatcctacccgactcccacccctaccaagctgtgactataaagggtgtctctgtgtttagttaaatcagaacaattgtatcttgccctttgcctcatggtcacaagatgtcttcagagctccagacatctgctacaaactcaggacagaaagaatgctatggtttggctgaggaatagctcagttgacagagagcttgcctcatatgctcagagaacttggtccccagtaccatgtaaatcaagtgtgatgatgcaactcctgcaaacccagtaaaaggatgggagttcaaggtcacccttagctactagcaaagttgagggtagcctgggctacacaagatcctgtcttaacaaaaaaagtatagaaaaagaaaaaatgattgccaaggtctagtattgcctggtactcgatctcaccagtcaggaagtggagagctccacaggggccctgacagacttcactggggactccctggccacagacggttggaaaagtaactgcatcctccaacctcgcctgtcacagggctccggagaggaagaaggttgtgggacagggtgttatctgtcgactccagggtagcaaggtttcacaacaggttttcatgtccactgtcttggcacctgatgccacccacatcctgcctgaggtgcctgaaaagcagcagcagagattcacagtcaggctgtctctagaacagtgtgtgacgggtttttcctctttgtttgtttgtttgttttacagttttgttgttggtggtggtggtgatgaaacagagctgtgtgtgtgtgtacacatttgaatgcaggtcagaggacaactttgtccagtcagttctcttctatctttatctctattctggggattgaacttgggtgtctaggcttccagttaagcacatttgactccctgagtcaccttgcagactcctagctccagaaaggttttcaaaaaaccggcttgctccaagatgctctcacttccttatggtgtaatctctggttcctcggtccccttgctgggtctctggcatttatttagcttttgctggctcccggggcaggatttcccgcactaaaacgggatcctccacagcacgggccagcgttgagagcatcacaggggtggtaagagctgatggtagtttcaggcttgtgccaagagctccgcccagaggtgctgaccctgtgagagttataattatcccctagtggcaggagggttccagggactggccagccccagtcccgccccttgtccttctcagagccagctagctaggcagcctgtctatgcccacaccatcaaggttcctgacgactggccttgccagctggggagtggggcagcccaagcctgaagcctgatgggttctgagcttgagagaagtttctttttgtcaggtgaggttggcccagcacaaacaggtttagacaaagtttaatcaactgatagtcagaacagctgggttatagccagcagcaccccactctagcccagaggatgaggtgtcaagggtttccccccaactcctgagttcaaatcctgactctgcccaatctggctgttttgtcctggaccgtgcacctacctctctgggattctgtcttcccagacctcacagcaggggaccagggcagcttctgaacgagactgggaggatgaagtggggtctcagagttggattggctcaggatcctctgtggatgagcctccgtccaccccacctgagaaccaggctgacgagaatggtataaggctgcctctggttaagtcatctatctagggaactcctcagtgagccagcaccgcaaaggccggatgaagttcatgtttagtgatgctagaggcagttgccagcactcaagaaataccactgagccaagctcagggggcaatagcagcacgtgggaggctgaggcaggaggacaggaagttagaggttggcctgggctgtataaagagaccctgagtgagaggtggcagggaggcggggattcgttagtaactgcagctgtcacttctgggccttttgcagtcacccttccctctccccactggccgcgcttgctttcttgccctctttgtcccctcctaagtgcccacctgggcaactgtgcctagcgggcgtgctttttatgcagacttctgcaactgcacggttcgggaatgaaagcttggcgagtgattgcttcccattcatagcaaccctggcccggagtcgcggccgttagggcataagtgttcagagcaaggcgaatccacacgcatgggagggaggtggagagcctggacaggtgcaaaagtgggtgatacggaaaacccaaagagtcagggggaagctacgaacagggacggccatcccacagccatagtttcaaactcgcaggtttagccagccccccggggtcacgcccgtgcgccgcgttctcgcatgttcggaggtcccctccccctcctcccgcccagcacgtgcctgcagcgtccgcccagcgagcttcttggggcggggccctagggaagcggaggggcgtggctgggcggtggcaggggcggtgctgggacttgtaggcgaggagccctgaagctaaaacagtctttgccaccagctgcgctatgccacactggggaaactgaggccccaggaaggaatcgaggtggctcaagacttcagggccaggaagtctcgacgctttaggaataagtaaaaaaaaaaaacaaaaacaaaaacaaaacacacttcaacgagttttcaaaaggcgcttctttaaggggtctttggtctggagccccctcctctttacgttccaccagggattcactcaacagacgcctctcttgctaatccctacgctacgccttgagcaacacttgctagagagctccgtcagcagcagaagaccttagaccagaaagaagccccggttgggtagggtctggggagaacaagccttacagcaaaggaaacttgaagcgaggaaggtaaagccaagagagtgaggcgctgggcaggggtatccccagcaggctcggagttctgctctgtgtgaaggggactagactgactggggctgaacctgcccagaggctgcctgccttactgtccgccttgaccagtggggccaggccagttttagccccactaaaagctgtaggtcttcaggtcccagtgtgataaccaggaatggggacatgagggacgcaggatcagggctgcttcctggcccggaggctaaagcatcgtgcctgcttctgtgctgaaattcccattttcttctttctattttatggtttcccatcatacaggctagcttctgactttctgtgtagcagggtatggacccggaaccctcccaccctcccaactcctcagtattaggatcaccggtgtattccactcggctgtttgaaatttctgtctctaacaagggccccacgtttgcatttgcgctggtggggaagagttctgcagactggcatcatggtcccagccttggcccacgttctacacaggccatgtcatgccttctgcttgttctcctgctaagggtgaccccacaggcggtcccatgtcagtgacatgggagcccagccgcctttgttcttcctcacagtagaaagtagaaagtagaaagctcttagctttctacaagactgtaaaaggtgtattcactatcgattagccctcattttcacagactacctagtgtcccggggtatgccattgttgaagtcccagcagagaatccctgacaccacaggaccgccaaagtacgtgtgatgtattatggtgtgcgtgtgaattatttttataaacatggcaaattcactttgccctttatttttattttttattttttggagacagggtatgatttagtccagctggcctcaaacttagtatatagccaagggtggccttgaactgactctctttcttgagtgttgggtttacaggtgtgtgtcaccagccaggtttttgtgatggggagatcaaaccacaagggttcgcgaatgagtagctgaggcactccttcggaccttttttttttttttttcggaccttttaacaagtacgtttgcacccctagtcgctcgggtgtaaaccactgaatcaagcaacgcttggaatataccggaccgtgcgccccgcgagacagacaagctgataccggcgagcacctaggggctaagtcacctcattcgccggacccgcgtcctggcacgcgggacgtacttagaactacaattcccggcggcccccgcttccaaaggcgtgtcttaaacgagaggggcgtgaccgcggggcgtggccggctacaaaggcggccggcagctcgcagggcgcggagtagacgcttcgcggcggacggagaagcggcgcgggacagcgtggggaactcggattcggcctgggacacccccgcatgcgccggccggctcggtagcggcggccccgatgctgctgcagcccgcgtgctccccgagtgtgtttccgcggccgtccgccgcccccagcgccatgcacggctcacagaaggacaccacgttcaccaagatcttcgtgggcggcctgccctaccacaccaccgacgcatcgctcagaaagtacttcgagggcttcggagacatcgaggaggccgtggtcatcaccgaccgccagaccggcaagtcccgcggctacggcttcgtgagtgcccgcggcgcgcgcacctgccgccgcccctcccccaccgcctcccagacccgccgcgcgcagccgggactccggggcttcccggggccgtcggcccttcccccacactttccagctgccccaaagaagcgtaagctgttagcgccagcgacttgaagacggtttcccacttccttccactctagtgtccccaaactaattctctgagaaagttaacggtacttactgatggcctggacagcggggggtggggaggactccccttgaggttccctttactccacttcctaggggattgtcgctgtccttgaaggcactccgcacttgaactttggggaaggagctgcagccctggaggcagagaagacagtgccccaagggtcctaaataccagatactcttctgggaggaaagacccagagatggcccgatgcccgggcaaaacccccttcccttctctgccttgttttcctcagccagccaccaaagcccctgaccctctgtgttcctgcaggtgaccatggcagatcgggcagcggctgatagggcttgcaaagaccctaaccctatcatcgatggtcgcaaggccaatgtgaacctggcctacctgggtgccaagcctaggagcttacagacgggtaagagctttgagttttctttccagccctccttgtttctatattcagctttggtatctgtctgatggaaaaacgctgcccccgctccccctttgtccccgagtggcagccagcaatcatgtgcctgcagaggcagcccagggcaaccacccctggcttgggagcttgctcctctttctcggcagtttatggtcccagggataatgattttttttttccaaagtctcctactcttggggagggaagaagtcagatgccgaccaggcaggggatcatcccgaaaagctggtacagcctgtggacttaatgtgctttgaccaggagagtggcgcgtgttatttgccctccctgtgtgtggccctgggaccttacccatgcagtgtgctgttcctaactgctctcttgttttaggctttgctgttggtgtgcagcaactacaccccaccttgatccagcgcacctacgggtgagtggctgtagctggctgtgggtgggaaggaaggccttgaggtgggacagctgtggacctctcagctcttctcagggctggggaatggctgttttcagaaattagattgtgtattgggggtgtggagggagagataagacccactgcatttctctaacccagaggggagcacatgtcttcgagcctggtgtgtaccttgcccccagttatgcgacacctcctcagccaggtgtcacatgggcatccacttcctcacctgtgcagtgaatgaatgtggggacagcttttctaactctctcgagttggggagtttggcacacacctagtgcgggcagctcttctgaagtgtatgttaaggctggacctggtgggctgggctcttcctggagtgctctctgatgtgggcagatgccacgaaggtcgctactgtgggtctgtaccagctgaggtttgatgtttgtgaatggcatagtaggtgactgccactggttggctttttgtgtgagtcacttgctctgtatccccctccttctatcttgaaaagactgataggcctggtagctacttagggaaggacttgcacagttaaagagacacaaaagttggaccctggtacttggtctgtttgttcagtgtagactagctgtgaatgagccggtgggtggggactctgacacggaccctaccttctgcagtggcaatcttgtcaaatcctggctgctgggttttgtgtcccaggttggggggtgggtagagtggggtgtctgttggggctggagctgaacttggccagcacagtgggtcagatgactggagagggtgctgcttgctgtctctaaatgtgcttgtcccgtagggtggcaccaggattcttcacagtcatccttggggactgatgggagttgagcaggagctgtcgatggggaactatggtttaggccccagcctgtgtttcctgccatggggttctcctggggaagttcttggggtgctactgtgacagattgttccagatcgcatttcccctgggatctgtttcctatgtgtaatggctgcctggacagagtgtgggaacatcccagccttggaagcttcgtattagcttctccctgctggctgtgaggagagtgcttgctctccagtagcttgctcgtctcctgctcgctcttctcctggggctgagcttcaggctggtgctgggctgcgctgagctatgtacagacggactggaacagggcctcccactggctcagacgcatagttactgcctcagggacactagtgcttggcctctgtgacccctcagatctgggttcacaggtctaatctgttactctgactagaccctctttaacttgccttttcttacctggaaaatgggggacagcatgctctagtctccagggaaaggctctcctcagagagctagtgacttaggagtgaggtttgaactcacagccacacatgttgtctttggggttggaaagtttccagaagccctggtactcgggcgaatctgacattggtccacagtgatttgtaactagattagggggctggtcatctaacactgattacacagtggccttacagtgttggttgggttgccaaggagtgtagtcacatatggacagacaggtgggcacgagggactggccagcctacattgccagtgaaccttgggttcctctgaggaacatcccacctcctgagcttgccaggctctggggagcccgggtggtgtggtcaggccttgctgcctgggccagttgctattaatggccagctgggaggcagagctgagctgtcagcaggcaagccccctttgtttttataaacaatctggcctgcccggctggcctgactcagcggttggttttgtcagtcagcctggggctgccctggctgagggcctggtgggagctggaaccctggcagctcagagcctgcaggcacctggctgtacattttcctaggcctttgacatgctgaagaccccacagcccacctgtaggccaaaccactgggcctcctctgtctgtcaagaccacccctcagcttagaaagacgctgaaagaatagccagctttgtgcttgcccgagtcctcacctgcttgcggaatgcctgcttgtggaataggccctgttggttgtacagcctgtgcttgtccgtcatgtaactgtgtctggtgaagtctcagccatggcaatagcttttcccagcctccaggcccatctggtaatctctcatggggataggtgacccggggccttctggcaagggggtctctgccagccctggggcacagtgatgcgggtgagaagggaggactgcacagtggagatgggtaagcgttgattgggtttgtcctggcctcccagggtcaagggtgtttatccactctcagcctaagactcatgggagctgaggtttgtctccagcctggcagccattggagtctctcctggccttttactccagaaggctgctctctgctcttagggagaaccttgctgtggcaagatgcctgcttactcccatctcactttctcctcatgttggagtcaggtcctgaggtctgagctcaggtcatggtccccaggtgctgggtaacaggctacacctctgcagagtagagatgtgaccgggccacattaaggactaattgatcgtggagtatggaacatgttgatcccaaggccgtggaaagttgtgtgtggggtttgtgctgggtgttcctatgacaggcccagcagcaagctttgctggcctaagcttggagccacatagatgagtggcctgccctctaccgagggccactcaggcctatccctctcttcctagaccctcatggggacacttcttggatgactgtgttgtctctgagaccaacactatccagggatcctctccttggcttgggctttcctgcaggcattgttttagagagtgtgttctctgtgggatggacctggtacacacatggaggtgtctgtcctgatgccacatcatgaggaggcctatgcctatgcatgaggattgaggagaggagttggggaggagtctgtcccccagagactggaggcggggtggtggtggtgagaatgtgtgtgttgcctcagatgctctgggtgaaatggccattcccaccccagggcccagtgtggcaaggactacatggttaaacagggtgcctctgggctgctcctcggggaagtggccagagctttgttgaatctgaccggctaggctagttgtgccacacacaggcaccggtataagcaagtgccatagtgtctaggtcccataagggccccacactgtaccagacatttcctgcacaggcacatggagtggggtgaggctgggggaagggcattgtttctgtgccttcagagggggaaggttgggggagggacattgctcctgtgccttcagagagagttactagtttcactgagcacagtgaaaagtgaggcctctgtggggcaggtgtgtgacacactgtctcaggaggcctgtctagggctgctggcaggcacatggccagacccagagcagcaggtgtgagcactctcaccccagcacctgaggggtgtcttaggggtggccctgcttgctcccccatcatagcttcctgtttggcaggctgtctgaaggcaagcgtgggctgtgtcttgtctgaccctcccagagggcgtgtagcttatgctgctgcacctgttgtttgtccctgtctgctgtgatagaagctagcctctggcgcccttaggttcctctcagagttcagttatggccaggtgcctgaggggcctattctgaagcctcaggctgaggggccatggctcgtatgttttagtccatggcatggactggcctttggtggatcttggcccaggagtttagacatcccttgggacagtggccttgctccctgcccagccctcctttggctccatgtcagctgggaatgcacagggaatctgcagagtcaggccagagaccccagctctgctgctgtgaccacagtgccccccctcccccaccaggaggcttgcagcaaggtgcaacaggactcaggatggtaaagagctgttggaaggactgtgggtgatgtgagggcagggaccaaagcccagtgacagacagccatcccactctggaggagctgagctaaggtgaaaactggtctgtcttgattttctttctttctgagacagatcttggtatgtagcccaggttggtcttgagcctgcactgagcctccttcagcctctttaagtgctgggatcaaaggcgtgtgtgcgccatcactttctgtttcctttctaagatggtcttagagcccagcagaccctccactccctggttctcctgcctccgctctcgctttctctggaggtggttcttgaacacagccttttgcacgctggacagacgagcttctccatccctggctacagagcaatccccctgcttcctgagggctagactttggacttgtttgagggtgtccctctagtgctgagttgagccagaaggccttttcttgggacagcagccatccagcctgagacagtggaactgcctggacccctagccctggggaggagggctgagatgccagagtagataatggatggccttggccttggaggaggccatcatagaggacaactttgaaagtagcggtggagtttaggcaggttcaggtgggtgggcctgctgctcccagctgcctcccacagtagcctgtcctcaccctgtcttcattcacctgccaacactcaccagctgtcaccagagaacctggtgcccccatcacaggacattcccaggaggcctgccaggctagctcactctctgtctctgtctctctctctctcacacacacaacccacacactaccacttcaccccaaggccagggctgctggtaggctgccaggttgcctccagcatcgtggtataaggcccccagggagaagaaaaagtgaaatgggctcatttgcctttttcatttttattttcagcagtggctttgtgttcgggaagtggccccctgggctgcagccaatgaattttttttttttcctgagtttggctactcacagggccagggcctctactgactgctcactgtcagttccagtagtagccatggtggggagacagatgtctcaagtgtcactgcagagttcccacccctcttctgggcagccaggagcccaggggatgtgcctgtggtatcttagtttactggttgagaaactgagaccagggaaagctcaaatgggcggtggaatctggaccccaaatctcttggaggctgagtgagccaggagctcttggctgctcatttgccaccctgatctggacttggtgtaaggagaggccacctattccaccactcccagtgggttagatctcacggcacagctgtcagccctggccagcacccatagcaaaccactgtgggtacatcccttcaggctgtggtggcttgggtgctacccagaaccgaggaccagtgggaaatggaacctcagtcacccttccctggtctcacatgagtctccctggcagaagggaactctaggatttagactcctttggtggtctctggcctgggaactctgttctgttgctgctacagagccctgggcttattgtcctggggccaccctggcttgagaaagggcaaaaggttccctgaatagagtgaggaaatggaaccctggttgtgatgaggagacactggcttctgctctcatccgaggcctgggtgggactgagcctgacaaggctgatggcagagccccctgagctgggagtggcagctaccctggagtttgtgggtcacccagcctttatattctagcccccaagacttgggtgtggaaggtgtccacttggccttcgccaggccccaatgctgctaagggtttgggttcccacagggccatgataaggatattctagggctgaaccaggcagctgttagtggactaaggacagcaggtcagattacctgttgggatcttgacaagcagaatccagccttctgtctcatcacactgactggtgtctaagcctgctgccctctctgctctctcatggctgggccttctggcttgccccgggtgctcaggtatccacaaaggcttgtgctggacccttggagatcccacatacaagcaagctctgcaccgttggtcatataggtatacacagagtaaaagatggggtagttttgtatggaaaagaaaagcagggtcaagaggcccctcaggatggtgttagggggagaaacctttaggctgtgtgccacaggtgccaacacttgggagtgggtatagtctagggtaacaggcattcaggttgagagtcaagtggagaggtaggtgtgggctgccatgtagggaagcacaggagcaatgtggatttgctgccaggtccagtaggaaggtgctagaaagttctggtacctggattgatgcagtcttgaaatctacagagatgcttcgaagcagtctgtgagaggctcagtgagctaggcgagtgagtcagggggcccagaaggctggaaggagggagaacaaggcagcattggagcattttcaggtgggtgggcacactgagacacagggacattgagtcctgcagagccctgtgtcgctgatgtgtggtgggtcaagaggctgaagcccttgctgggctgggcatgatgaaggtcaaatgtcaagtggtggctggcattcttacctctctgagtctgaatgagcagcactaggaaagtctctgaacattgtgcgcacgggcacatgcacacagcagttccaggtttcttcaggcaggtagagttggggcttgcagtagtgtgcagcctgggaccagggccagctttggacagggcacagggctaggactcaggtgggttttgaagtgcaggctgtgactgtacagagtgttctctggtgtgcaggcccctttcccagctgctgctgccaccattggcctgaggacctgtggtagccatagtgtgtggtctttgctgcccctcaagtagtagtgtagcctttcagggagcgtgctctgcactgcactgcatgtggcactggaagctggatattctgtgttctgttctctgctggttccgttctgcaaaagtgtccgtacgtgacggtttagagccacgttccattgcagcgtgccataggtgggggatttagtgggccactcaagactctgagccttcctgcctgtcctatgtcttgggatgacacctggccaggacctcagagatggtacatgtgattaggcaggcgtgggtgacactcagcgttcagggcatacaggaagccaggctctgcttgcatgggactgtgagctggccttgcaaggagcctcagtgttagcaaactccacccctagaggtattgggtaaaggtgtgtctccctccctcttactcatgtttagggaagttcagggcatggcactcccaaagtctcgaactgctgaatgcttctgggtcttagggctgcgggtggggggacccctccccctcacacacacacaggcacacacgtacactcactcacacccaggtaggggcaccaagatagtctgcgctgctctgggaaggcctccaacccagcgaggcccgtgttgtgactgtgggcagggcgtaggcagcagcagcactctagcacagctctgctttcaggagggtcaggcttgtgaggagagcagggagtggccctggccccagacgtaggcaggggggtcttgggtgctgtggagtctgctgctgtgcaggttttggggatctcgtgggccagtggtgctggagaggaggagtctgtcacagtcctgcctgggctcctccctgtagttccctcagaccctactttcctacagtgtcccctgagctctggtttctgtccttcagagcccagccatgtgtctgttgatggctgtgtgctggcctgaatgtgagaaggtaccatgcagctcagagatagtgcttgcatccacatcagtgccgtttcaatgaagggagtaccacagccagccaaggagggcgcgcacctactggggctcctgctgcaagctgtttgacctgcaagttgcagtcagtgcccatggatgtataggatgctaatcactgctgttgcagtgtccgggcaacacctggccagctgcctgtgcactttgaaaatggagaggggagttgtgagggtgatggacacagccgtgtcaggggtgcctccttgcctgcagcccagccttgcctctgtacctttggtaaatgtgctgtcagaggctgccattggggctagggaggtggctcaataggtaacatggttgccgcacaagtgtgagaaccacagttcagatccccagaacctaggaagtactgggtaggtatggaagctcacctgtaatcccaccatgcgaaaggcaagaggccgggtccccaaagctagactatagaatctgtgagggctgggctcaagtgagagaccccacctcagtacatataatatggagaaggtccaggaagaccccaggcccctgtgtggcctccctgcacacacactgctccagcgctcctgtgtgccacttgttcttgccatgctgccctgccacacacacaggccacaggtcacttgtctggatgctgctctgggcgttctctgcaccataccttcctaggatggccttgggctgcccttgtcgctccacctgtgtgtaaggtgtacttggccctggctctgcactgatctcacccgtcccatgtttctctttaggcctggcttggggtgtggcacctgtactttggagggtgtaggatgccactgcattggtcccctgagtgaccttgattacttctgctctcacacgagctgctgggactcacctcaccacatctctgggaaatgatctctccacagagatgtgcacatcctgctgcagataagggctgtggagccgctgactttttcttttataacacagcctccctggagtttgactggattctaggcctatcctaagatattaagggcagctgaggccccagtggctcagaggcagagctcagacaaagcatgagagaaacctgtgtgctgacgctttgtggcattttgctctgacagtggcactctgctgctgtcggtactgcctactgtatcgataccgttgatacacacacggggtacatagggtggggatgctgctgcagacaggtctgaggcccagcgaggctcagccctttacccaggcctgctcagcaggaggcttgccattcaagcagagccagcagtaggtccagtgccctctatgtcagtgtcaggcagtcagtcccctttgcctgtttcctcctgcagcagtgctgggcttcctggggggaggctacagccaagggcagcaagtggcacccgatgcatttccacagtggctggggtgtggggaggagctccagtctacaggtgccttccagtataagctgcaggacctgtgtggtcacctggcagagggcgcttggccttcctgacttgtgaatggatgtgctggcagggcagtggatgaggcctctagagcactttgtgcccagtagggcacaagcataccaggagccctgactgtagtgggtgggcctgccctcctgctgtcttgtctgtaggggaggtagtggatggctaaggagtataggtgtctgggaggggtgggaggtacctggcatgtgcgctgtaccattccccaagtgctttttccacaggccttgagctctgtaggctaccctgtcctcagtctcccagtttaaacaaaggccatgtgttatacattgggcaataggtcctctgggagatatatgggagagtgggagtcaagtctaggaggagggtaccatgagagctggcgctaagtggcctgtggagtgatggcactgtctgtgcaaaggccctggggttggtgcccacctgaggtgttgctgcatctgttttgtagatgggtacacaggcttggacagggcagggcacagacctatgctctctgcacccctggccttccccactctgccaacagccactgacactctgcttggcccacaggctgactcctcactacatctacccaccagccattgtgcagcccagcgtggtgatccctgccacccctgtcccgtcactgtcctcgccctaccttgagtatacaccagccagcccagcctacgcccagtacccgccagccacttacgaccagtacccatatgctgcctcacctgctgcagccaccagcttcgtgggctacggctaccctgctgccgtgccccaagccttgtctgctgctgcacctgcaggcaccaccttcgtgcagtaccaggcacctcagctacagcctgacaggatgcagtgatgcgcgtcctgcccagggccacagctgccacctgccagcctctggagccaccaccatttgggtctcctcaggcccccgggcccacctgccctgaaggcagcagcaagtttcttctgcagccctgccgtgcttgaggaagggcctgaggaggaagggacactcactctggaagctctgcagccactccgtgccaggtgccttaactctgggacgtgtacagacgtcctccctcctctttgggaactgtcctcttggtggatccgggttcctgaccccacctccccccagttgcccctcagtcgaagcactgtgccatgtcctgctgggaattttctgccatgcaggcaagaccatcagcaccgagaaccccaaacctgttttgtacttagagactggctttggtcagtagttcactgtggagacaatgacagtattctctgtgccagtgtcgctgatggagctccccctccccacagggctgccattaccagaccacggccctgcagggccctgggctcctgtctgctgatgctgcccgcctcacctgcagaggtgcccatcagggcgagttctcaggtgtctgttgctgtgccatgggggccttcttcctggccctgtgcccctcaagcaggctctgcccacccaccctcccgttgtcacctgtgccagtctgacctagctgcacagagagaaggtccagcccacgtctaggaggggaggagtgggtatctctggcagcatgggctgcccgcaggctgggcagtgggtccctccacacctacctcagggagccagtgtgcgggcgggaactccacagcatgcctgttagtcaaggcctggaggacagagggagtaatgttataataatatttttattagaatgttctgattataaaaaataaaacttgttttctttaaagaaaaaggtggtttgaggtttttctcaatggcaaggtggtcctgtgtccagggtttttggcagctgtccatggaacccttaccctgcttcagcctctgctgatcactagcttcagtgaccagcagggcttgctccagtgtgccccttctgaacggaagggctccagccccataaggtaggtatctgcagcagcagactggggacggtcactgttgacctgatgctcgtctttagacgggggcctgggtctgctctcttgcactgtccctggtttccctctgatttgacttagagatgtgccttctccctgctcctgtggcccatgcccgtttgggctgacaggcctgggtttggtttcatcccaggcctctacctcttaagtgtcagtttgcaaacactgaagggtcaggaggtcactgtggggctctcagcccacagctgacatttgctgctgaagataagagtgtggggccagggaggggtggcgggcactgccagggttatcaggaaggccattcgaagccagtatacttcctgtctcttatcagctggtggcagcacaagaacaggcccgcaggaagccccctggtctggacagtgccctcctgggtcttgacagagcaagcctaagagactttaaagttggaggtgcctttttgagccaggggcacaccacattaccatcagtgagggtgatgacacctgctgttcttgctacaggacagtttcccagcagagtcaccattggccctggtacagcttggtgaaagatctggtgtaggagaggccacgtcccagaacagggatttttcccaaggacaggacttctctcattcgtgtctccaggtgccagcacagacctggtgcacagtgtaacccaggggacacacacgcccatgcatgtgcatgcttacagactgatgctccaccatggacatgtgcatttgtacatggcctggggacacacaggatacacacaaaaactccacacacaactgtgtggatacagatatctggctcggctcaggtatacacttgcagttatctgcaaagcaacacatgcgcacgcataccccatggccaggtatcccggataatatgaacaggacccatgcgtgccatctgtgttgtgtggtaggtaaggactctggcagctgcagtttgagttggagtcacttggggaggggccagatctggttgggaggaacaggaagggaggacccagggccctgggctggacttctctctgcagggacagtacttgctactccctgctggagctttttcttctagctaagtgcaggtgggcagcaggcaagagaggtgagctgagccctactgctatcctatatggaaagttcagttgggtgtcattcgcagtgtttgtccagagcccagagcttaactaaggtccagttgccacattggtcggccacgcagtctccacctttctctggggacctacctctgttcacccggatctccatccctgggcacccacccctgtgaatctctcagggctcaagatgtgcgagtcactgtcagatcctatttgttgttcaagcatgaagactgcctctagccagtgtctcaagctgaggactctcaggagtggccttctgcagcctgaagactggcaggggtgggaacatgcaggcccagagagtcctgagacctgaatttggagcctgtggccctaggtactttccttagccccaactcattagtgtcctgcactccaatgcagtcatggcccctaaggaggggagccatacagtggttgtaaaatcacctccagaggcctcaccgggctcactctgtcccctgggctcttgcatgtgtgtgttcccaggtccttcctgggctcagtttcctctgcacaagctaggctgactccactctgcctagcagtagcttcagtcttcctgggcccagtggttgggtggggtcaaggggccccctcctgccacctagtgtccccagctgagcagtcattcacgctccataccccagcaattgggtcaggaatggatgtgggccctgtctgggtcacaggagccacaggagctttctggaggaaggggggcttttctggaggaagcaggctaggaacagataaccctgagttttgtcagggaggcggggcagggcttgttgattgatggacaggctgatgagggtgagctgggagccaaacggggtcttggtaacatctgtgaggctcttaggatcagttgtaagctggtcctcaagtgtgtgtgtgtgtctgtctgtcgtgtctgtctgtcttttgtggctttttttttttggtttttttggttttgttttgtttttccgagacagggtttctctgtatagccctggccgttctggaactcactctgtagaccaggctagcctcgaactcagaaatccgcctgcctctgcctcccaagtgctgggattaaaggtgtgtgccaccaccgcccttgtctgtctgttttaaacaagagccaattgcttccccttgcactagaggttggtcctcagatataaatctcccttgtctcagagggcagagtcccagtgtaggcatttgtgatcctgggcagggttggggctgtagctgcccatgcttctgctcccactgcctcggctcctcactgagctcccgcccagggagtgtgatggacagctctctgttgaagggagctgggttggggcagagttgacctgcctatacatctatgttgtggtccactggccagctggcacccaagagtgcccggtgggacatggtgaccatccttcctcatgtctccatttctctatcaagtatacagacctactgcagtcaggctacagtgggaggggccaatgtgcaggccgtctctggctctaccactctagagcttggacatgagggctggagccccagcagctgtcctgatgcttggtgattgacccagccatagttctatctcctgtaaactgactagttaccacgtcccacctccctggatcatcacagaaatgaaaggagatggcttaggtaagctgcccagtagaatctgaggtgaggtcggtactcatctcacagagccccgagaaagactgggcagtcagcagaagtgagatttacacccgattcccatgaaaccatttgagcttaaggcctctgctcccctgagagagtagccatagttccagatatccacagcaacaccaccagttccaacctcctgtctccagaactcaggctgtccttggagtctgaggactggtgagctcatctggcatgtccctgagaccctggcaccccacgggaggttggccattcctgtgccagataggcatccaaggcacagaagatccagcagtgcccagatgctgccagagtgctggagagtggctgggcccgttgtagcccaagcaccttgaatctagccatgtgagaccttaggtcctggttcaggccaccaccctgtgtcttccacctcacccacagccagctgggtgttgcccccactcacaggcctccctgcctgctgagtcacactggtgtttttcctcagacatgtaaacactgagccaggaccccaggaaacaggttggtgtgtctagatacagcttcggagagctctgtgttctgggtgtctcctcgggctgggggaggggctggcacctgccctcccagtacctcctggggctgctgataaagagtcgggctttgcctatcagcctggtattctacctctggctgctcacaggggttgagaacagagatggggagcttataccaccccacccccagctcctgcatgacccacggctcagaaagccctgggtgccacctgctggcccctgcctggtgatgggggcattcttagaggaattttaagaatagagattgggttttgcaatttaagcctataaataatctcagtactcaggagactgaggcaggaggattaccttgagtttggagccagcctctgtttcacagtgagaccctgtctcaaagggaatgtaagtaaatcaacaaatacttgtcacttgcaatacagataaacatactctgatagagaatcagtggggtggttttgtgcatgcgtgtctgtgtgcgcacagagagaagtgatgggggctggagagatggctcagcggttaagagcactgactgttcttccagaggtcttgagttcaaatcccagcaaccacatggtggctcacaaccacacgtaataggatctgatgccctcttctgacgacagctacagtgtacttatatataataaataaatctttaaacgagagagagagagtagagagagaagcgctggaatgatttgtgtgcgcacagaagatattggctgttttcttagttaagtttttgagacagggcttcactctatatcccaggttatagcctggaacttgagatcctcctgcctcagcttccaaccacacaggatgcaggattggcacttggggccaggccctgtgcagagacaaaggagcgtataacaggaagccacaaagtttgggggagttccttatataacaactgaagccgaggggcagaaaagcacctttcagaattgaggaaactgtacacaaaagtattttagaacccctccttggagggctgggaatgcacctcagtgttagagttggggtggacaaagcccaggagtccatccccagcaacacacacatacacacacacacacacacacacacacacacacacacatctcctgcagccaggtttacataactgttcaaggaaggtgggtcataccctgtcttttacagccacactgaccccctgtgaggctgagggctggctcagtgcaaaggtggacccccttaccactgactgcagatgatgagccccagaacaccccaggttctgcagagaggacttcacactcgccatcaggagcagagggcagcggatgccacctctgagcaaacagtgcgccagtgtgtcccaggtccccaacaaatgcatcatttctacctggacatgaactgcactttcctgagcacatgacttggacccttgtcaagagtggcaggaaggatggaagagggagcgatgcgatggtgaactcgcctctgggtcttatcaggcaggcctccgtgaagagccacggagaagtgcatgctaagagcatgcatggggcagaaggaagcacacaccacacacacaggtcctggtgggatggggtttgatgtattggagggatgtgtccacagtggctggaggggaggccaactggaagtgaagaggtcatttgggggctggggagatgacttagtatttaagagcactagctgctcttccagaggccccaggttcaattcccagcacctgcatggtatctcacaactgtaactataactccagttccagaagatctggcaccctcagatacacatgcaggctgaacaccaatacacgtgaaacaaaaatagacattcatgaaggaggaactgaggggctaggctgatgggtcacttggggtccaggaacaacaaaaagtgatggggtggcaccatctagccctgagtcgcaggaatctagctagggtgggggcgtggggcctgggcatggcagacaggtgacatgtcacacccacactcacctttgtctgggaagcaggcacagcctactgtgtgtctgggagcactgtggcggggggagcacctcagaatctcccatacataagtgccactatctggggccatgcagagtacctgcagagagatcctggctcagggtgggtggacggagctttgtagaaagtgtcaggcttaaggaggggctgaggaaggcctcagccagcacttctttactgagtcttggagggccttactggccttggagggccaggagtgtgactcagctggaccctgtgatcccaatgcagaacagggttttgtcattccagaacccaaataccatgtctagaacacacttggtgcttaataatgtctgtggagagagcagtcaggagggatgtgctcctggccagagcacctctcaaccacaggacctttgcacatgcactttcttctgccctcagtgcccttccctgacaatccctgccaccccaccaggcactcccttgccgccttctcactgctcagcaagcctctgggtttgacccctggtttaggtcatgagacccattagttgctctctctccccatcctgaacattgagctcagaggaggtagagtgtttctgtttctggcccaccatgacagtgccagcttcacttcctctatgaatgagtcctgaagaactttataggctggggccgtggcataaggaagagcctgtacaaccaggttcaatccccagccctgtataaactgggcgtggtggtacacttctgtaatcctagcacccaggaggcaggagcttaagaagttcaagattattcttggctacagtttgagttcagggctagcctgggctaagtaagaacccgtcacaaacaaacaaaatttaacttaaacaattctccagccatagaagccccccgaagcaggaacatctgctccagaactcctgcatgaagactgatacttcacaagcctaggcaagggcgatgcagctcagctgtggcccatagaaccagagtgcaaagtgcctctgctcccgggagtgtcctgagagaggtcagaggtgacccctgggaggtggagtgggccccctgggcctggctgtctgtggacttgagttttgaccatatttgtccagtgacatgtggccaccccaggctgtggcataaataccagtttatcaggcttatttgctttgtccccgcagagcacacagggagccagcagcctccctgggtggtgtccttcactcagatcgcagccctggactggaggctgggagccatcctttggggccctgggacaaaggagacctggcccagtctgctgagcattctgtcagtctccagaaggcaaaagagggtgtgctcttcccccagcagattctgtttgtttgtttgtttgtttgtttgtttgtttttccagacagggtttctccttgaggccctggctgtcttgggactcactctggagaccaggctagactctactcatctttccgtctcacctcccaggcactagtgttccaggattgcttttctttttcctttgttctttgtcttcctttttagtatttttggttttagttatagagacagtcttatgtagcccaggctggccttcaactgtaccagaggatgacccatgatcttgaacatctctgctcctcctgtctccacctccctggggctaggattgcaggtataaagcactgctctgggttgatacagctctgagcctgctagataagctctcagccaatttaccagcgtaccctgcttgctttccctctgcagcaatgtagatgatacccagggccttctgctccctaggcaagtgttctgctacaggccatgacacaagtatagtccaggatggtttctagttttatttttattatttgtggtgtgtgtatatggtgtgtgtatgtgtagtatgtgggtatggtgtgtgttgtgtttgtttatggtatgtgtgtatggtgtatgtgtgtgtgtgttgcgtgtgtatgtgttgtgtgtgtgtgtgcgtgtgcatgcacgcgcacgcacgcaagcacacatatacgtatgtgcggatgtccacagtggccagcagcaggcatcaggtcccccagagctggagttttaggtagtagtgagcccctccgagtgagtgctgggatctcaaccccagtcctcaccacagagcacagctcttagcctctgagctctctccagcccatccattggcctgttgttacaaattgccaccaactgggcttaaagcatctctcatttgatgtcatggttcagtgaggagaactccaacacagtatgactcaacttgggctgcagcctgggctcccacgaggacaaatcaacaaggctgtgtcccttgcagagggctccaggctggaccccatcctctgtcttgtggaccagggtctaggcccggtcagctgtggatgcagcaagcatctgcccgaggtagccaccctcctcctgtctcctaggtaacctttccagagaaagtgaccggaggccctcaagcttccaatcagcatcttccctctctcgctcagtgcagaccatatcagtgcctccttcgcagtcagggctgggactcccaggccctgcaggcttcgttaccatcctggaatgcagacagagtttgtactgtggataggaccatggggcaggtctgtgtggccctgccctttatcttagcagcacttacagtgtggtgtctgttgatggagcatgtgggcacgcaggagcggtggtgccgggggtggggggtgggggggcacatggaagcatggaacacaggcactgggctgtgctgacttcatgctcaccccgttcaagttgaacacaactctgggtcttggaaacctcctgttgttatttttcaggttgcagacacacatgatggggctcatggggtgcccctcccctcccctgctccctcatgcctgcggctcctggcccaggacacctgtgcccacaccagcgtctggcctgcaggtgcccgaagaatctggcccgcttcatgaccagttcctaaccctcccatacccaactcactgatccttccagagagctgcttctccctaccctgagggtacacaggctgtgcccactgtgggcaggaatgcatctggggcctcacacgagacacgggtgttgtcagttccaggcggctacgcactggggattcattaccttcaaaacttgcctacaacttagtgaacagtaagtacatggtcctagtggggaggcaagagtgtgtcactcctgggaccacagattaattttagtcccatagatgccacggtgaggtggtcctcccccaccagcagatgtctctgccccaggactttggcaccgctgttctcatctctggaatgttcttccctccatcctgccttctggtggccagaagctcttcttcttacttcctctttggtgctgaccatatccagactgccatgtcccttaccttacctgctagctgactgctcagcaagtgcccctgaggggggatgggtcacttcgggggtctaggatgtgcccctgcccagttctcctggagcctagcatttagactcttttggtcaaaagaatagtgagaaccaaaaccaaaaccaaaccaaaccaaacaaacaaacaaaaaagccaggcatggtggcacacgcctttaatcccagcacttgggaggcagaggcaggtggatttctgagttcgaggccaacctggtctacaaagtgacttccaggacagccagggctatacagagaaaacaaacaaacaaaaaaaagaacactgagtcacatatacacaccaggggccagggtttgccctaagcagccgcaagcatgcgtggggaacagagcccggctcccaaagggaacagcattccaggcaagggctcagcaatgagggagttctgggatgcaggggcatcgagagggagagtggggagggggaggggtgtgtcctctgtggctgaagcttggtaagaggagccaggcagactgaagagtcagtggggccctgccggaagtgatacatgtgacatacatgtgacatacggtagctctggtttgccagggactcaggaagaaagcccatgacagttcccaaaggactctgcccttgacagccagagtctccccacttgtgcctggtctcctttcagctgctgggaatgtatcgcctaaccctggggtccctgctcaccctggccctccaagagcctctcctggctggtgagaaaaggctccttccttcccaagctttattcggactaaaagcaccgaagacctggctggggaccttcccttccacaagaggccactgctcacaagagtctgcgtcacaggccagactgggacgagc

SEQ ID NO: 757 - DNA, 1754 bp, Mus musculus
gcagggcgcggagtagacgcttcgcggcggacggagaagcggcgcgggacagcgtggggaactcggattcggcctgggacacccccgcatgcgccggccggctcggtagcggcggccccgatgctgctgcagcccgcgtgctccccgagtgtgtttccgcggccgtccgccgcccccagcgccatgcacggctcacagaaggacaccacgttcaccaagatcttcgtgggcggcctgccctaccacaccaccgacgcatcgctcagaaagtacttcgagggcttcggagacatcgaggaggccgtggtcatcaccgaccgccagaccggcaagtcccgcggctacggcttcgtgaccatggcagatcgggcagcggctgatagggcttgcaaagaccctaaccctatcatcgatggtcgcaaggccaatgtgaacctggcctacctgggtgccaagcctaggagcttacagacgggctttgctgttggtgtgcagcaactacaccccaccttgatccagcgcacctacgggctgactcctcactacatctacccaccagccattgtgcagcccagcgtggtgatccctgccacccctgtcccgtcactgtcctcgccctaccttgagtatacaccagccagcccagcctacgcccagtacccgccagccacttacgaccagtacccatatgctgcctcacctgctgcagccaccagcttcgtgggctacggctaccctgctgccgtgccccaagccttgtctgctgctgcacctgcaggcaccaccttcgtgcagtaccaggcacctcagctacagcctgacaggatgcagtgatgcgcgtcctgcccagggccacagctgccacctgccagcctctggagccaccaccatttgggtctcctcaggcccccgggcccacctgccctgaaggcagcagcaagtttcttctgcagccctgccgtgcttgaggaagggcctgaggaggaagggacactcactctggaagctctgcagccactccgtgccaggtgccttaactctgggacgtgtacagacgtcctccctcctctttgggaactgtcctcttggtggatccgggttcctgaccccacctccccccagttgcccctcagtcgaagcactgtgccatgtcctgctgggaattttctgccatgcaggcaagaccatcagcaccgagaaccccaaacctgttttgtacttagagactggctttggtcagtagttcactgtggagacaatgacagtattctctgtgccagtgtcgctgatggagctccccctccccacagggctgccattaccagaccacggccctgcagggccctgggctcctgtctgctgatgctgcccgcctcacctgcagaggtgcccatcagggcgagttctcaggtgtctgttgctgtgccatgggggccttcttcctggccctgtgcccctcaagcaggctctgcccacccaccctcccgttgtcacctgtgccagtctgacctagctgcacagagagaaggtccagcccacgtctaggaggggaggagtgggtatctctggcagcatgggctgcccgcaggctgggcagtgggtccctccacacctacctcagggagccagtgtgcgggcgggaactccacagcatgcctgttagtcaaggcctggaggacagagggagtaatgttataataatatttttattagaatgttctgattataaaaaataaaacttgttttctttaaag

SEQ ID NO: 758 - protein, 273 aa, Mus musculus
AGRGVDASRRTEKRRGTAWGTRIRPGTPPHAPAGSVAAAPMLLQPACSPSVFPRPSAAPSAMHGSQKDTTFTKIFVGGLPYHTTDASLRKYFEGFGDIEEAVVITDRQTGKSRGYGFVTMADRAAADRACKDPNPIIDGRKANVNLAYLGAKPRSLQTGFAVGVQQLHPTLIQRTYGLTPHYIYPPAIVQPSVVIPATPVPSLSSPYLEYTPDAYAQYPPATYDQYPYADAAATSFVGYGYPAAVPQALSAAAPAGTTFVQYQAPQLQPDRMQ

SEQ ID NO: 759 - DNA, 37898 bp, Homo sapiens
tgctgggcacggtggcacctgcctgtaatcccggctactggggaggctgaggcgtgagaattgctcaagtgcttgagcccaggaggtggagattgcagtgagcctagatcacgacagagtgagaccccgtctcaaaaaacaaaaaaacatgtacttgaaattggactgcccaccttcaattccaactctgtcaccaactttgctaacatgtgatttaccctttgtttaagcctgtgatttaaccctctgagcctcagtgacctcatctgtaaaatgggagacattaaaagtagctatcataatggttgtgtgagtagtcaaagagttaaagcgtaaaagtgcccctgtggctggcccgtgatgtggagtttgaatgtagctgctactacgagtgccagtgaggatgacatccatgagaagtctcctgctcaatggggctgtgctgtcggtatacaggcgggacaaaaaggtccagagaccaagtgactggagatcttgcttgtctctaagattctttccccaggagccgggtgttgtgcttaggtctggccagcagatggcgcgaatggccccaatgccaacattggagcatgtgtttctgtgttcagtttcacagacttgagttcattaaaagaaatgaagtgttggccacccccttccattttttgttgtgttgctaagcttttaggatatttgggaagtagaatcaaaacattgcttatgctgtcagaagaatcgtcttaaaaataacacacttagattgaaggcctccttggaaaatgctaaaggagataatttgtcagaggtgggaccctgatttttctgtttcaaacttaatgtccgcgatggtttcctcgtggaacactgaagccttggcgcccgcggtgtgggggcctctgagcactcccgtgccccatagcatcatccctgccgtgatatgggaaacacaaatccctggtggtggcaaacaggtcactttaagactcgtgttagtaactttgaggctctgtggcccgttggaattgagatgtaaacctaaaacagcagatttcaaaggcttagcgccaaaaaaaatgaactaaacacatgctcttgaaattaatgtaaatgccattaattttcataccaattacacattcaaatgatactattttggataatttaactttcccctgcttatatttgttaaaatgtggctactggaaattgtagattccattcgtggctcatgttgtattcatctttctctgggacatcactgcactaggtcatctgacttttggaggtgtcacccaccactccacaccaaatattaaaatgcacccacatcctgctttaaatacacattgttttgaaggcaaattctttgaaaaactttcctattttacttctgaaatgatttggccgtaagcgtacactccatgttgatttcttaatcatgacctcgaataatagggaatttctcacaaagtgcagcgtttcctacaaagctacaaattgttttcaaattgattggatattagaacactaaatagtttgtgaggtctccagtattacatttgtaggcctttacttaaacggattaatttggggatttttcttgtttgtttttggtttttttggggggaggatagcatcttgctgtatctcccaggttggagtgcagtggtgcaatctcggctcactgcagcctctgcctttcgggctcaagtatcctcccacctcagcctcctgagtagctgagactacaagtgtgcaccaccacaccaggctctgttttttatttattttttatttttttgtatttttggtggatacagggttttaccgtgtgtgcccaggctgatctcaaactcctgcgctcaagcagtcctcccgccttggcctcccaaagtgctggtattacaggtgtaagccaccacacccaggctggggttgttgtttttaaatatcttcaagccagttctctttttctttctttctacctctctgcccttcaacatttttgtaggctcttaaaaagctgtataagccccagaccccagggcctggctatagtgtttaggaaaggcagtctcaacacaagcattgtatttccttgcaaggtactggcttgttaatcagagcctggcaatgtttcacagctctgcgaggtcttcctgctcactgcggttcccctatctcacggcctacatttatcccacggagatgggagaagccaggagaggttgtggctgcacctttgagggttttattatgacaggtgttaggtcactgtaaggcaaatatgggcagtgtaaacagtttcgtagccgactgtgtgagtttttacactttattgaagtgtgacatataaaaggctgtacatatttaacttatacaacttgatgagtttggagataaacatacacccatgaaaccatcaccacagtctaagagcctattgtgaattttgcatcaatctattgaaaaatattttttcaggtgagggctgtttcgaaagccaatgagaaacacctgttgcatacttgcttaaaatgtaaatcggctcccgaaaaagaactgacctgcattcttaatcttttattctttttccctcctgactgtggtgcagaggaggcagtatgggaggagacaaagctcaaagaaggcactgacaatccccagcatcctacgggcccgaatccacactgcggattccgtcagctcactggcggcagcactctctggtgtctttttttttttttttttttttgagactgagtctcgccctgtcgtccaggctgcactgcagtggcgtgatctcagctcagtgcgccctctgcctcccgggttcaggcgattctcctgtctcagcctcccaggtagctgggattacaggagtgaaccactgcacctggccttctcttgtgtcttttgtctttcatttctcttcttcactacccgtcagcatgataggtttcttcctcctcttatgaatcccagtgtcaagatacagcctgatcgccccttaatacggtgccgccattactccagacccctctgcaagcattggtcattcatcagctttcacgaggtgaactggggacgaggcaggggcttggaccggcttcctggccaggactcactgccttcctcagctgagaagactgcatttccaggttgaaccctgacccccactgactttgggcatctccatgtgtcctgtgtttgccagcctttccactcccttgtaaatctttctgcctccaggactggctgctaaaacaggtgcactggaggccgctccctgtgttacttgaagcatggcacttgccactgtcttcggtgagggggcgtttccctctggtgctggggagccagggcatccatttggggcttcatgtcatctcttgggacttcacgtacctcgaatccaacctgtgggccccttcggtggggctttgctgtgagagtaccttgactggtgtggaaggcccaagcatggttctgcttagcacctgacggttgcctacaaaaggaaaatcagtattaatatttgttatgggctgagctgtcgtcctccagattcatatgttgaagtcctcactcctagtacctcagattaggactgtattttggagacatggtctttaaacagtcaattcagataaaatgaggtcactaggctgggccctggtccaataggtctggtatcctagaccaggaaatctggacacagacaaggacagaggaagggccgcatgaagacacaggaagagggcgaggtccgcacaccacagagaaggccttgcaaggagccagccctgcagacatccagatctcagacttgtgccctcagaactctaagagaataaacttctgtcgctcggtctcccggcctgtggtagtttgtgacagcagctcaaggtgaccactacagtcttccgcagtggccacttgcatttgggctgcatgacctggtgtctgcaggatccacagcaccagccaccgcgcaccgggctcccagggcaggcagtgttgagcgtcttgtagcggcgctggtgggggcaggatctccggcctgtgccaccctcacagccactgcagaaacaaactcagccttccccagcgccacgtgcagctcacagctcggggattcgctgccccagcgccacgtgcagctcacagctcggggattcgctgcaggcttcccttcacctgctaacctgcaaggtgccagaaaaccagaagcagtagcgtccctgagagagttggggcgtttgtgccccacgtttcctgccagcagtggctgctttccttggcttgatcaaggcgctgcctgcagctgtccagcttcttacctgacgtctcggccgcccagctcagctcgcaagaattcttgttcttcgtggcacttccttttcctagagctttcatcaccaccattttgtttgtttgtttgtttttgagatggagtctccctctgtcacccaggctggagtgcggtggtgtgatctcgtgatctcagtggcgtgatctcagctcactgcaacctccacctcttgggttcaagtgatgcttctgcctcagcctcctgagtagctgggattacaggcaccacgcccaacaatttttgtagagatggaggccaggctggtcttgaactcctgacctcaagggatccacccgccttggcttcccaaagtgttgggattacccaccagcacccagcctctcatcaccatcttgaagccaaaggatgaggggacaccgagcccaggggcaagtgccatcatgcaggctggcgccagcacctgcctaggccccctatgcagcccctgccctcgcagacacacctgtccacactgtatagcaaggccacctccctcttcatgagaaagatcctggggcaacgaacaacttttggcacaggagaccaatcaggtcatttggttattgacagggagtagcaggctcttccccactttctcattcttctgcacccccagtttgccacttggactacactcctttccctaggggatgagggctcagctttcaatgtgagctgtgttgtttcccgaggttgcagtaacaaatggccacatgcttagtggctcagaaccacaaaagtgaatcctcttatagttctggaagcctgacatccaaaatgactattaggggactaaaatcaaggtggcagcaaggctggttccttctggaggcctgaagggaggatccatttcttgcttctcctggcctctggtggctgccagcaacccttggcttgtgaccgcatcactccagcctcctgttctgggctcacatctattcccgttccttagtcaaatctggagccgtcctcagatggagactcttgtgatttcaatgggtccctctggatgaccctcgatactctcctcacctccagatccttagtcacatctgcagagtccctgtcaccaagtagggtgccatgttacaggttccagggattaggatgcagaggccaggattcggccatgcacacaggccagtgtctttctgtctttgcagctgaaactgaggcatgtgcactctgctgctccaggagctgtccaccaatgctgctggggcggcctgtgacagcatcgactgagcctgtcattgccacctggagaggggctgaacctttcctctccccagtaccagtgcctgctggtgcattttggcctctgtgcccagtagtatggggaaactttttttttttttgagatggagtctcactctgtcacccaggctggagtgcagtggtgcaatctcggctcactgcaacaacctctgcctcccaggttcaagtgattctcctgcctcagcctcccgagtaactgggattacaggcacgcaccaccacacccagctaattttgtatttttagtggagacggggtttcaccatgtcggccaggctggtctcgaactcctgaccttaggtgatccacctgcttcggcctcccaaagtgctgggattcccaggctcactgctctgcacctggcagatgaaaatggcaacctggggctcccatggattcaaaggagctgggctgcaggctgggggtgtacaggccacctgcaccaagctcagcccaaagctgagtccccgaagagccttgatataaacaccaacacgacaaacaaaaagaggaggcccaagagcgcggggcctgaagactcaaaccagagccctgcctggatggggctgtgctgtttcagatcgcagtggccggcctcacctgctcctctctgcacatcctcatcagggtaaactcactctccctcctctgcagggcagctggagccacagctgggagcagagagcaggcctaggccaggcagttctgcatttgtgccctgcacacatcacacatttgcgagggaggcaggagaggacctctctgagcatcagtttcctcagctatataatgggcatcatcgtagtcatctcttcctagggcttttgtgagatgaactaagataacacacagaaagtgctgggctcatcctcacactgagcaggaattctgcgttccaagctcctgcaatttccattttctcacccagcacacacagttgccagtcctccctcccgctccccagtgaggcctgagggacccaagtcacctctgcccagcctggctcccagcctagtctcacaaaactgtgttccctttccaggggccctttgtgggccatggaacccttggcagtcagctgatacctaaggtaatagtattaaacacttaaaatgcttaccagccaggcacggtggctcacacttgtaatcccggtgctttgggaggcggaggtgggagggttgcttgaggctaggagtttgagaccagcctagacaataaagggagaccttgactctacaaaaaaaaatttaaaaaatcagctgggcgcatgcctgtggttccagctactcgggaggctgagactgcagggagctatgatcacaccactgcactccagcccggacaacacagcaagaccctgtctttataaaaaataataataacaaataaaatgcttagattagcaaaggaaaacaatcacattaaaatataggctgggtgtgttggcatgcacctgaagtcccagctactcaggaggctgaggcaagaggatcaactgagcccaggagttctgtatcagcctgggcgacatagagagaccccatctctaattaaaacaaataaaaacggctatgaaaatatttaaaaaacaaatacgtgatgtagcaatgtagacaagcaatgtcttcttcatcaatgcgttcaacaacaaggtcaagtagtggcgctgatgagactgtagtttttttttttttttgagacggagtcttgctctgtcgcccaggctggagtgcagtggtgcacataaatgtgtgtttgaggctgggtgcagtggctcagcctgtaatcccagcaatttgggaggccaagtcaggaggattgcctaatcccaagagttcgagaccagcctctacacaaaatataaaattatcccggcatcgtagtacgcaccggtaatcccagttacttgggaggctgaggtaggaggatggcttggagcccgagaggtcgaggctgcaatgagctatgatcgctacactccagcgacagggagagaccttgtctcaaaaaaaaaaaaaaaaaaagtgtgtgtttgggtgaatgactgattgtcaggcagaagctggtgacccgtggagacatggggccgccggagggggggagggattggtgatccagatacccaagggggcccgggggcggggggcgaaggagtgcgactggacccgcacctgggcaaccgcgtctccagcctccacggccctgtcccgcccccttccgggcaggcagaggccccggggctgccctgccgcctgggcccggcccccgcggcagcagccgagcggccgcacccctttgtggggctgtcgtgccgggaggggcgcgggcgaggcgggcccgggcggcgctgggacttgtaggccgggagcccgggcgcctccgggctgaagcccgtggccacgccaccgacgcggctccagcctgcccaggcaacgcgacggctggggacagccttggaaaaactgaaggggaaaccgaggcctggtgaagggatccagctggcgcaaaagcacgcggccgcgcagtggccgcctcccccggcctctagggggcaagtgaaggtcacacttaaatgaaagttttcaaagtcgcttcgaagggcctccggctgggccagagctttcccccaccccaccttgttccatcgtggatacactcaacaaacatatcccagagccctctccttgccaggccctccagcttgggcaaaacatcccaggtccctgttctcgcagcgcccaaatagcaggggaggggctccaggcaggcgaacacacagggccggggaggtgggaaactccgcgaaggaaggagaggaaaccacgcgggatgaagggcaacgggggccgcaagcgggggcaggagcgccaggaacgaggaacgaagggggaagggaggaaaggacgcccaggcttccggaagactcgggggtcccatccccactgtgcagagggctagagcgggagctgggggagggagaggtcagaggtcaaggctgccgcgtggagcgtgggccgtggagtgggggagggggcgggcagactcctccccgccggcagccagggcagagggctggaggaaacgcggagaactcctcggtgctggaggaaacgaggggaactcctcgccggccttgcggtcccccacagcccacggagtgccactcccagtccccacagaccccacctgcgtcgccctgtgctgagaggaggccgcagggctggggccgggagtgaccccaattagagctgctgtttcccagctgcataggtcccaaccgcgggggctggagatgaggcgggcttgaggcccctagtcccggcttcagaggtggagggtgtgacccgcaggtccgggatcccggggtctgtgcagtcacacggcccttcccttcgctcaggaaagcccggggctgagtttcatgctcaaccgctgccaacttgaaattcctagcttttgaataaggggccccgcgtttgcattttgcactgggccccgaaaattctgtggctggccctgcctggtgtgaagctcacagagccccactatgcgccgcctttctatggctgggggccggatgagggacccgggtctgctcttactcgccccaagggtccctgacaccagcccagaacggggtggagctggaaagagcccacacctgcttcctctgcccacctcatctcccgcggggcctctgagaccgcccgggacccgcttctatcgcggcaccgtggtgtagctccctccggggtcgtatgctgtatgtttactagccgaattctcagtcctggacgctccgtggggccagggaatatgatctgtgctccgctgcagcctcgcgcccagagtaaatatcggtcggatgaactaatcttacatataaaacagaaatcatttcccttttttaatatggcacgtggctcttccctaagtcgccctgggttaaataccgactcaattaacaagatgctaaaaaccgtttacgtttttttacgttttttacgtttaattcaccagacggtgcgctccacgagggaaggggcctggcctccctagttcagggttgtgcttagtgcctgcaaccggccgggcccgcgggggcagccaggagagaaaggcgcgcccagcgcccccaggcccggatccgccctcagcccgcgtgcgctcccctcccccctccccccaatcgccgcgcgcccgggtgcggctgggcggggttagaactacgcttcccggcggtccccgcgcgcccggggcggggcggggccggctgggggcggggctgagctggcgggggcggcaggctacaaagcccgggggcggtgccggggcgcagagtccccgcagcgccggtcgggagcgcagcgcggcgcacgtcggcgcgcacggcgggacgggcgccggagtggtcgggcctggcggctggacgggcgcccctcgctgccccgcgcgctccccgccgccccccatgagcgcagccccgcgcggcccgggtccgtaggcggcggggcgccccccatgctgctgcagcccgcgccgtgcgccccgagcgcgggcttcccgcggcccctggcgcccccggcgccatgcacggctcgcagaaggacaccacgttcaccaagatcttcgtgggcggcctgccgtaccacactaccgacgcctcgctcaggaagtacttcgagggcttcggcgacatcgaggaggccgtggtcatcaccgaccgccagacgggcaagtcccgcggctacggcttcgtaagtggcccccgcgcccgggcccgcaccccgccgcacaccttatcgcggcccgggcgccgagtccactccggggcacacgcccagacggcccgctgccgcccccgccccaggcgcctccagccggcgcccgcacctgccgcctctcccgggcgcgctcctgccggtcccgcccccaccaccccaggccccggcccccacccccacccccacccccacccccacccccggtttaaaaggaagagccgctgtgttcaattaggactcctaagttggtggggaggttttggagccagagggcactcgggatttcctggagcagcggggggtgaggagcaatggctccaccccggggtgttaggagctcttcggcctcccccatatttttaacagccctctcagccgccccaaataaacatcagcttaagtaaaaacgtcttgaagacactttcctgcttaccttccaagcatagcgtcgcaaactccttctcagaggaaagtctcggccctcactggtgggcaagtccaggcggccccccaagctcccttcggggttcatttttgccctatccccgcaggggattatttttgtccttgaaggccacatttcccaggccttgaactttgacgggaggagctggaatccaggaggcatctttgtgggagagccccaggtagggttcagaggagctttggctcaaggaccctgggtcacaggcaccctcagaggaagggaagagaggggtggcagcatccggtgccagggcggagccgtctgcccctttcgcccctggttccccccacggcagcccctgatgtgtctctgctccaccaggtgaccatggccgaccgggcggcagctgagagggcttgcaaagacccgaaccccatcatcgacggccgcaaggccaacgtgaacctggcatatctgggcgccaagccgcggagcctccagacgggtgagagcttgtgttttcctgcctggctcttctcggtttctatattgggtgtcggtatctgtcgggtggaaagaggccccccctcctcgccccagcagtggcagtcggctatcatgtgcctgcagagccggcacagggcagccatccccccctcgaggatctagaccccttctcacagcgtgtggcccaaagaagggggcggggggcagggagggtactgcaccccagttgccagctgtcctcgcaggagggaggaagtggccatggggcctggaggttaggagtgccgacaccagtggctgctgacacctgcgtcactcactgccacacttcagcggtgtgccttggggttcacaagggggaggcctgggaggggagaggaagcggatgatcccttttgactagaggtgtgtggcttgtgggattctgccaccctgtgtgcagcccttgagacgtggctcgtgcagcaaggccaagtccctgattgttctctcgttttaggctttgccattggggtgcagcagctgcaccccaccttgatccagcggacttacgggtgagtggacatggctggcttggggtgggtagtccgtggagatgaagtggagagggccttgggcttcctgggtctggaaggctggggaaatgacagttttcagacatttgattgcgtttaagccaagggagtgaagagaaggcagattgcacttctccatccctggcagaggccataccacctaggggatggtgagccttggagcctgcctgccttggtacacaccccagctcccttcgctaggtgtgtggcctcagtttcctcacccgtaaaatgggagtggtcacagcacatctgagttctctgaatggagggcctagggtgggcctggtgcaggtaacgccctcttgaagtgtttgctgatgactcttagggactggcaggctgagttcttccccaggcactcctctcacctgttctagtgctggggcaggtggtggcagtaggtcattgctaccaaggtctgatgtttgtgaacgttgctgtagatacgatgtgtttggggtggaggccacctgcctgagtggcctggcctatgggcttctagtctgactcatttacaagcagcgcagcccactcttctccatcctaaaacgcctcccacctccctgcccttttttaaaacatctagtaagtcctggcagctgcttggggagggacacacacacttaagggatacaaagagtcctgccttgcggcctgcctccccacccccatgatggatggaagctgtctgccctagcgccgtggcatattgatggggttggagttggaggggaaggcagctcagagaccaccacccctttcagggcattggcacttcatgaactttctgaatccaaatccctaatgccagttgatcacgtgtgtgtgctcacgcatgtgcgcaccacgtagattccattgagagagacacagcttgaggagtaacctgcctgactggggcagtgtggacaaggatcctgtggaacccggctgagcctggctcccaggtgaatgggtcagaggccccagcagaagttgctgtgcccactttttgggaacgcttggggtgactcgggggctccctgctggcttccgtgtgtattggtggatgtgtgcaagtgtagcagtgggaggagccgctggctgaggggtgctggagggtggccggggcccttctagcctgtgcgagtggccgggcagctcaggttcctgccggggtgcctctgtcctcctgggaagggagcgtgtagggtggtgggagcaggcggccctgtccgtctcgtcctggaatgtgttttgtagatgtctagagtcgtcttagagggtgtttggggacactgtagccttcatgccttcaccgagattcttcctatggggttcaggccacatgaagagggtgttccttgttttccagaaccttggctccattccccaggcccacagcaggcgcctgggggcatggactgggcgggagcagctgcccagaggtgagggtgtgtgcctccagtgcctgcagctcttttctgcttacagtgggataaggccttcccacgtgcgtctgggctcgctctgatccacacagctacctctgggactccatacccatcagtgcttggcctctggggcctgcagaggtgggttcgaatcctgactttgccccttaccagctgggtctgtcttggcagtggcatcctcatccggaaaacaggaacattaactgcttaaaacagtgcgcaggcatgtgggctgggtgctctggcctcctcagaagtcctctcctgtcctcatagcaggcctctgaggatgggactgaaaccattcttactttatagatggggaaactgaggcagagaaaggctaaccacctgtctgggcctgggggcgggtggcagggccagggtggggaggcgtgaggtaatagacgtccaggaggagattggaacacaggtggtgggtgcctgaacgcatgctttcttggtgggggacggtgggaagggccctggcccgacctttcccttgctgtcctggagtcctgtgaacaccacccatccagaagcagttgggatcggtcacagagtttgccactgtgtgcccccgacttcaggcgacggtgttttgtaactaaatctgctggctggccatttaatacttgtgacgatgaagaggccgcagactctatttgttggttgccaaagggtggagacccaaacagggacggtgtcagaggggccatccgctcttggcttcctgggagatctgaactcaagcctctgagaatcgcgccgcctcctgcccctgcctgggccttactgaggtgggtagggggaggctcccgggtgcagctccagggaggcagcggggcaggctgcctgggtcagctgtctgcccccagcccccgcccgctgacggagctggagagctgggccggagctggagagctgggccgtcagcgtcccttttgtctttgtgaacaatcaggccccgggagcacagccgggcctgactcagcggccagttttgtcggccttgggctggcagcgacttgctgttggctgagggcatggagggaggtgggagccaggagcccaggcagctgagggttgtccaccagttaaccccttccgtgcctggctgaactcttcctcgactttctgaccccgaccttttataccttgccctggacaactctgaagatcccacagctctgcttttaggcaagaccctgtggaatcttcttcgcctggctgggtcttaaatgttagtttagaatgatttaccaaagaactttacactttatgctatttgccggagtttccttgcctcttttcctttttttaagttgaacaagctctgtgagacctaactcacctgtgcatttctgacctaactgtatgtggccactgtccgcggtttggaggagccttcctcggcagtggcaagcacgtggtagtcacagcaggagccggtggccgtggcccaccaagggtgtctgccagctgagtgtgtctgtcacctgccggtgggaggggaggtgcagcagtctggagagggtctgtgtccaggcagagcttagtctggcctggaagggtgccctgagtcaaggggtgtctgtccattcttgggctgagggcaccgggagcagaggtttgtcctgggactagctgcacccagagcctctccttgggttatttttgaagggccagctgcttccctgggtgcgggtctccctgcctgttaagggggcctggctgtggccttgactcccgttcacagagtgcctcatatgtacattatagaacgtttgaagggggtggaatatccctggcctccacccctagaagccagtagcattgcctcgcccaagtcatgactaccaaaaatgtctccagacattgccaaatgtcccctggatttagtggcatgaggaccagtatctgtgagtctcttggaccttgcctcatggtcacaagatgactgccacggctccagacatcccacccacgttcagggcagaaaggacaataagggccagtacgaactgcctctgtcttttttagcagaaaaatggaagttttcacagaggccacaacaggcttccacttaagtctcactggccacaactgggtgacaggacacggccaccacaggggctctgagatgagaagacaggctcctcggactccggagtgtcaggtacaggctgtatccaggagcaagagccctgggggtctgcctgggcttaaggccaggcccagcctgtctctgcaggctcctccccatctgtgagtgagaacggtcacactgccttccctacagggccaacttgactgtgtgtggagggcctggccctgggaagtcacggtttgtcagtgacgcatctcttgccggccctgcttcagggtctgttgattgattacctgtgcaaaaccgaggcttagagcaactgagagacttgctgagttcacacatcccaggatggtggggcctgagctgtgggctgcgagactcttgtccctcccacaaggactcaacgcctccctctggctagatggcagctcttggatgattcagagcacaaggcctcgagactgatgatgaccgtgagaccctctcccaggcatgtgcctgccccactgcatgtatagtttcagggacccctacgtcctttgtgtgaaggtctctggtgcccactgggtagtagatggctgcccttaccatcacggggccttggtgtgtgcacaccacggggcctggacagagcacctgggtccccagagcaagaggacgtactggggaggcagtgatgggaagatgtctgtctccttgagagcatgggatgcacaagctggggagaatgtcaacagctactcccagcatcattcattcatcaggtgtttattgagtgcttgctgtatgccagacctggtgccagggatcctttgaataagaaagacacggtccccgatctcgtgctcacattctgtttgtgcactcgtgggcccacatggtgatgcgtgcagttaaacaggaagctggcggaatgagtgcctgcgtggggacggaacagttccgcgtctcgagtacagtggtggggagatgtgtctgtgtgtgtgataaagcttcacagtttgtgtgtaactacacatgacatgtaagaatgttggtgtgtgtagaagatgatgcagcgtgctgaaggcctgcagtccaggtcatagcagtgtgcctgggttagtgtcctggttttgctcatgtccttagttactctgatgtgcccttgggggatggaggaggtagggtacacaggatctctctgtactgtttttgcaacttcttgggagtcttttattattttataatacaaagtgaaacaaagccagaggagctgtttgcaggtgatggcgtgtgtgtgtgtgtgtgtgtgtgtgtacgcacgcacacgtgtgcgggcgtgctggggaaggctccactgaggatggcggaaatgggccctgttggcttctggggaagagcgagcagcccaggcccagggtgacaggccagctgcaggtcgccgtggcgggcacagggtgagcaccgcagggcaggggcagaagctgaggtcagagccaggcggcatgggggctgggaggaagtgactccccccaacactgtggcgtcacgttttcaccctcagggtgtctcgtggtggccccgccgcccccctgcccccccacaaggcttcctgtttggcagctcatctggagccaggcgtgggctgcaccgtggccctcctgggcgggcgcccgtgccgcacctgttgtttgtcctgtctgctgaaacagaaagcagcctttgggtggcgggggctcttctccgagcatgagttctcaccctggctccctgctgggcttggggagcctcttctggaagccttgggccaaggggcacagctttgtctcagggtagaagcctgatcacagactgagtggaggcccaagctcgagctttcctcgtttagcctcagtttcaccttgtgtccagggtggacaggctgataactctgcagtgtgcttgcgggcatcaggaccttcctgctgatctcatttggatagagtagggagctggacactgggtcagcttgtctgacagatctttgcttgctttgtgccaggctggggatgcctgccatgggggtgaggggagacccggtcccagctcctaatcacagtgctttctgcagcgaggtgctgagaggaggacagagacaaaggaggtcagcatgcctcagaaggcgacaggagctggggaggggaagggagcagccggggaggctcagggcccgacagggtagcctcagctcctagaggactttgatgacccagggaggcactgctacattcctccaagtgacaccggaccacgcaggctccgagcggaggagggatgggtcagtctgcatttttgttttcagagtgtttttgcttctggctgctgggttgagcctggactgccgagggtattgtggtggttggaggcccttagaggatgcccagtaatccaggcatgagacgagggtgctgcctgcaccagcggccctggtgagatacagtgagattctgggtgtctattttaaagaacctgggaaagaaagaggagtccaagaagattctggagctttgggcctttgaaatgggagatgggcttggccctgactggggtggaggcagctgtgcagtacagttttggggagaaggtcaggagttggagtttgggccggttcaggtggagatgctgttccgggcctggcattgccccacagagagggcgttcgacctgtgtcctgtggctggctgccccacagaacttgaatgtccctagacctcccggccctccccctcacaagtcactggggattcccgggaggcagggccatggcctggcttcctgcctgccaggcgcctcggggaccttcccacacccagccaggcgggagtcagaaccctaagagctgcggtccgtctctgccgaggtggggcaaggcccctggagagcagggaaagtgaaatgggctcatttgcctttttcgtttttattttcagaggcgactttatgttcagaaaatgagtcctcctgggccgtggtcagttcttttcgctgcgagttctgctttgagtgtgggcagcatgtgtccccagcaccatctgtacttctctctcccgcccaccacggggttctcagactctgccggaggcccaagccctctgtcttgggggcaatctgttggactctgcagcatccttagtttacagatggggaaacagaggccggaggggctgagtgatggtccatgcgacttggacaggcatggccaggatccgggcttggggctcttcctgcccttggacccctgagtctctgtggacagagtcagctggggtgctcttgactgtgtgctgaccctgggtgtgttggggtgcaaatgctgcctgggccacgtgtgaacgggaagggaggcaggcacctcagatttccagtctggaccaggctcggggtccccctgtcctctcctgggctgtggcagagccagctcctcctgcatgcccaaccctcccggcatggcctggcctttccagccctaatggtggcccgtttcagtggctccgtgatttgggggtttggtgttgcccaggctccggcactagagggaagcagagaacccctgagtcatccttccgcagacaccccggaccccagctaggtgcctgtgcccagtgtccagcgttgcagtggggcttgggtggcatgtggggggtctgtcccacccattcctgtggtttcttccttggctctgcctggactttgcacacgtggtgggattaattctctggtaaacagatccgcctctgattggtgcaagacccttctctggggtcttggtgggaggatagaagttttctgcagaggatgaggaggcacagacgcccggttgttctgaggccggaacttggaaggaaactggaagggaaggaggctcctgccctctcctttgaggttacagctgggctgtggctctgcaaccctggggagcgcgtgggactccagcagcggccgtacagagggccgattccaaagtggcttctagaggagggagcaagtgccgtgtgcccaaagaggccggtgggccctggccaaacaggagcagccctgatgagcattgggtcccccgacctttgggctcctacctgactgcgcctggccgctggtctgttttgctcaccaagggttcttggctgctgccccctgacctggggctgaaagtcctaggagagggagggcctctgtccctcccagcattcctcaggcccaaggaggcgtcgatgctgctgaagtctctggggtgcacagaagcaatagatcctcacagcagccccctggggcgtgtggttccccagaggcagtgatgaggtcacccggggccgccaggcacctggtcggggagcagaggctggcgggctgtgcctgtctagctgtgacttgctgggtggagccgtgcctgcctgtccctccagcctgcccagccctggctgctcaaggctgaactgctttctctgccttcttggggcagggactcttggcctgggaagcagaggccattccacgggggggctcttttgcctcccagctacctgcaaagccggggcctgcctcagatgctcagcactgggcacctgctgtgctggggcacttgggacgcagcagctgagaccctgctcttgtggggaagacattgtgcaaggtagatgatgaaggggcttccgatcataaggaaacagagccgcctgggtggacccctgaggggtgagctttgagctgtgggaagaagcaagtgcataggtgcgaaggtcctgtggtgggaaggagtcgaatctgggaacagaaggagcccagggcagtgggagtgtggccagggagggcgcagtgcaagtggagatgagttagaagaggtaggttgaggcctaataacgcaggaagccacaagggagcagtttgggttttcttctgggtacagtgggaggcagctggagggttctgcttctggaggtgatggggtgttgatgttttcgtttgtttgttttttgaaacggagtctcgctctgtctccaggctggagtgcagtatcttgatctcagctcactgcagcctccgcctcccgggttcaagccattctcctgcctcggcctcctgagtagctgggattacaggcacgcaccaccacgcccagctatttttgtatttttagtagagacggggtttcaccgtgttggccaggatggtctcaatctcctgacctcatgatccgcccgcctcggcctccctaagtgctgggattccaggcgtgggtcttgatgtttttaagacagctccaactgctgctgggtgaaggattcagggatggaggcaggtctccaccaccaccaaggcagggccacgccactgcgcccgcctggagagtcggtgatgaaggagagggaggatcggagaattgagggatggaagcagggagctccctgttggatggtgtgggcataggctgcagtgggggtgagtgggcagggcagtgcctgggtggcctggtgggctcttcactgaggtggagagtgcaggagagtcccaccagggccaggcagacacgtgccctggcaggcgagcctgtgcaggggacacacttggtgggtggggcggcgtgcagctaccaggctgtgcccttgtgtgcagaggctgtggcacctgagctttctgagcatggcgtgtgagtggggatgctgaggaacctgcctggtgcgtgcacccgctccccattgccaggcagtgaagccttgggcctgcggccggggcggggccgcccttggacagtgcagggccggtggtttggctgcatttttctttctcacctgaccactcagtgggttcgcccatgcgtgcgtggctgcatgagcccctctgtctctctttgctcccacctgccttctttgtggccgcccggcgtgggcacctgtggtcagagcagcagtgaggatcccttgtctttgcccttccccttccccatgtggtttctgatggtccacagtcgggcgtctcagccttggcactgcggacctttaggacggcatcgttctttgttgtgggggcaccctgagcattgtaggaagcggtcagcacccctggcctcgacccctaatgtcagcagcacccccacccgcacctcatattcctggttgtcagttgtgacaactaggaccgtccctaggcattttccagtgtcccctgggggcacagttgtcctggttgggaatcgctgttctagtggcacctctaggcctcacagcaagcttttgaggtcagcctctgtaggacccaacttacagatgaggaaactgcgccttggaagttttgaaacctgtttggtaactcagacaagtgcaggggcgaggcgcaaccctaggagggagagaagctgctggaacccagctcctgcctggcggggcttcgtggctgcttctaccttaacttcagccggtgttctcactcccccttggggcttgaggtgtggcccgtgctgtgccttccttttattttgagctgaacctggggccccagccagtccttgcaggcacagctaccagcagcaggccccactgtaccagtcccttgctctgcgatggggcaagtcgcttggggcctctctgaacctcggatttcctctctgggagatgggctaacactagcatcttttctatggcttttttttttgagacagagttttgctctttcgcccaggctggagtgcagtggcatgatctcagctcaccacaacctccaccttctggtttcaagcgattctcctgcctcagcctcccgagtaactgggattacaggctcccgccaccacacctggctaatttttgtatttttagtagaaatagggcttcgccatgttggctaggctggtcctgaactcttgacctcatgatctgcccgccccagccttccaaagtgctgggattacaggcgtgagccactgcgcccagccttccgtggctttgaaaatgcttcgtaagttatcccaggccctttacgtacagaaagatgagtagataccgacatgcagtgtctgcaagggtcaggaaacaggagagccccgccttcctccccagcctaaacattgctcacccacgcttgtgtttgagtgtccctgagtagggcagctccttggtggccaaggcagcgctctggccccgatgatgtggggcatcagaacccgatagaaatgacgcagccctcgaggtgagtgtggccggaacccagctgccccacagccccaggcacttgtgttctgtgtccctggtctgggcagcggttcttgaatgcagctgtggatcaggaccccggggcctgttcttgcacattcctgggccccatctgcctttgcagtctgcatgggatccacatttttagcaaaaccttgcggggagatgtctgaggcaggggcatcactgcccatgtttggagaaggtgtgtgggttcaaagcttccatagcctccaactaaggaatgttttcgaggttctgagagctgggtcgggggggcactgatgatgccagggacagcctgctgggcacagccccaagacagtccttgctgtgtctccactcgcccccttcccaagggaggcctccgagacccttctggggccccctgcctccgctggccagagctcctcatccttctcagtggggtctgtgccacccaccgggcctttgttccgtcagcaccatgtgcccagtgcctcctacaggcctggtcctggcagagagctgggagtccagacagagccatctccctgacagaacgccatccagtggggcatcgggcagcgtagcgaggtgaggggctggcctccatgtggggttgggcctcgccaggttaagggctccaggcagaggcattggcaggtgccaggcccaggtggggaggatgcgagggattgaggcgctgtggggcatgggccggcaccagggtggacctgggtgtgcagtggaagccaggggtcagcagacccggccgcccccatggtggaggtgccacgagagggttgtgcacagaggctgccggctgccctcatccactcttcagacactcagactggcgcctgcctccgcccttgtgccgccatgctgctcccctgtggccagctctgcctcatcattaggtctctgcaggcatcccctccttcaagaagccaccctggcctttcccccatcgctgtccacacatcacagccctctgctgtcttgacttcccctgagccccccactctggtttatgggttggtgcattttggtgcctctcccatcctagaagctaagcccctcgagggcaggggctctgtggtctgctcctctctgcatcctggcagatatgtgagaaaggcgtcacagctcgagagtcagaattcaaacccaggcctggctccgcgcgaggcccttgttcccatggaggatgcagggtggacagcagaggcttctaacctggggagagggacaggaggcgccactgcggggttcctggcaggagctgcctgggcctctggacagatgctgtggagggttggccgtgtgggctgcaggtgtggccacagcagccactaggatggctcaaccttggaaggtaaacagtagtagagagggtgacgcagtgtagaaacttcccacacacttcccagatggggtggggggagcaagaggccctgtcgtccaggttttcctggttcccaccgttgctgtagggctgcaggatccactgagtgcacctgcctttgtgctggaagccagggctcctctctgaccctgagggtccctggctctggggagggagctcgcagggctcctctctgaccctgagggtccctggctctggggagggagctcgcagggctcctctctgacactgagggtccctggctctggggagggagcactgtgttttcagtgcccacatgttgccaaaccgcgctccagaaagctgcccagtttctgtccctgccgaacgcaggagaatgcagggaaggatgttgtactttttctccagagctgcttcccttgaggggggcccctgcctacaggtcagaaggaagctgaggttccaagtcaccccccaggcgggcctggcctgtgtaacacgcaggcgtgcaaggcagaggagatactgatgcccagggcacagtgccgtgccctggaagaccactccgtgcctcggactctgcagcagcttctgatgccgcggaggtggctgttctgttgcagacgggaaactgaggcttagcggcttgccccaggccaccgagcagctggttggcagagcaggcacacgccaggagagctgcctccctgagcctcatttccccctgtgctgagggctgggcatgctgttgtatggccagcccacagcaggcaggaagtgttggcctcaatgcgtttccacagtggcctgcccaggtagggttaagagcacagctctgaggccggctgactcctggcccctccacctcatcagctgtaggaccttgggcaactcacctggccccgtgtgtgaaatgggcctcatgatgggaagaccaagccgacggggtgacgcacccagtcacagtacgggtctccccccagcgtgggcgctggcgagtatggcagctgttggcgccatcatctctgtggtcaccgccattgcactcctttgctccagcattcacgcagtcactctcacatcctcacggagctgctgcaggccagagtccatgctggcagggacagaaagaaaccctgtgagggctgggcacggtggctcacgcctgtaatcccagcactttgggaggccgaggtgggcggatcatgaggtcaggagatcgggaccatcctggctaacacggtgaaacctcatctctactaaaaatacaaaaaaattagccgagcgtggtggcgggcacctgtagtcccagctactcaggaggctgaggcaggagaatggcgtgaacccgggtggcggagcttgcagtgagcggagatcccgccactgcactccagcctggggaacagagcgagactctgtctcaaaaaaaaaaaaaaaaacaaaccctgtgaggagcaggtgttggctgggagagcaggcgtgtacatgagccaagtgtgcagtgtcacttggtgggtgttgagtgtcagggagatgagcagggaagggggacagggctggcctcccagacatgcaaccaggacattcgtaccgggccctgctcttgatcgcatgctccgccgtcgtggcttcaaactctcaatcatttgaaaacaaccattcaagatttttatttttgcaccagctccggggatgtggggtgtagggctgggatgcgggggtgcagtctgggaaggccttgctgagaaggagacatggagtggaggagggagcctggtggttagtgcagacagtcagtgcgaaggccttgaggcggcagcatctggccaggtgctgtttctgtgcccatctgaccgatgaggaaagtcggggctcggggtggggggcggcacgcatcgtgtaccccactgttctcccagctgtattccccaactccgttctggccctaacctgctctgcttggccccacaggctgaccccgcactacatctacccaccagccatcgtgcagcccagcgtggtgatcccagccgcccctgtcccgtcgctgtcctcgccctacattgagtacacgccggccagcccggcctacgcccagtacccaccggccacctatgaccagtacccatacgccgcctcgcctgccacggctgccagcttcgtgggctacagctaccctgccgccgtgccccaggccctctcagccgcagcacccgcgggcaccactttcgtgcagtaccaggcgccgcagctgcagcctgacaggatgcagtgaggggcgttcctgccccgaggactgtggcattgtcaccttcacagcagacagagctgccaggccatgatgggctggcgacagcccggctgagcttcagtgaggtgccaccagcacccgtgcctccgaagaccgctcgggcattccgcctgcgccctgggacagcggagagacggcttctctttaatctaggtcccattgtgtcttgagggaggactttaagaatgactgagaactatttaaagacgcaatcccaggttccttgcacaccatggcagcctctccttgcaccttctcctgcctctccacactccaggttccctcaggcttgtgtccccactgctgcatcgtggcggggtgtcacagaccctctgcagcccctggctgccctggactgtgcagagatgcctgactccagggaaacctgaaagcaagaagttaatggactgtttattgtaacttgatcctcccgagctgtgagcgcagtctgaggtgtgaggacacggcctcctgttggagtcccattttctccatcagggcacgtgggcggcttcctcaagcccggaggagctcccaggcgcacaggggccgccggtaacaggggccgccggccaaaggcccctttccagtcatagcactgaagttgcaacttttttcttgtaattgttttgctactaagataatttcagaagttcagtctattttttcagcggatactgccgccaccaagaatccaaaacctatttttgacttggagagacttgcttttgttggttccgcccgtggagacgacgatagtgtttctgtataataaagtgtctgccggctcgcgggccaggatcctctcggtgggatgggcaccacagacaggaggcccctcaggcccgtgcgggccactgtctgctgccgcctgccggggtggcagagtgagttgtctcaggaccccgtcactgcgacgttgacactcctctcccttcccttcctccccaactccccaaacactgtggaaggggagaaggaagtgatccacagcattcaggccacttggggtctagaccatggtggtgccagcctggggggggcagtggccctcagctctgcccgctggagcggttgagtgcagaagggtgcgcctcttccctctacccccgcaccacctgctgtgtgccagcctgagacggttcctgcctgtcttgggggttggtggagggtggaggcagttctgccagccgtggcagggctgctatggggcatccagggctgtgggggtctggaggaggggacatgaggtgagaggtatcctggccgagggcggggggcagcggggggtctccctccggacctacctcagggagctgagcgtgcaggcgctccagggcaggcctgggacagagtcaaggctcagagaataaaggtagctaatctcatcataatatttttattagaatgttctgatgataaaaataaaacttgttttctttaaagaaaaagttgatctaatttttctcaaaacgcagagctcccctcgtgcctgtgggcatcacccatgccccgccctcctggctcaggaacccaggatttcactggcagccgtgcatagagcgcctggcctgcaccggccgctgagcctcagtagcagaacagacgcagcccctcttcacacccgctaatgcaggggaggcctggcgtcccagccgccgtgcatcatccagcatcagcttcagacccggagaggactgcgcttgggttacttcttggcgctgtggctggggaggggcctggacgtggattgtgattggcagccccaccagatccctgtggaataggaggacagttcccccagagaaggggggttgccaccagaagaccctgaatgtgggttcctgagaggacgttggcaggtgtccaggacagctgcccttagggtagagttgggagggaagccttggtctggggctggatagtcccagcatctggaactcagagctggggaaatcacaaggccttcatagaggaggtgtcagggctggagaatccatcaactccttccttgaattgctcactcactgtgtcatcccgagacgtgtgctgggtcacacgcaaagcgctggggatagagcagacagggctgccctttgggtttatcatctgctgggggagacacaacaatgccccagggtgatggagactgacaggtttacggcagggaggggatagggattctgtgggggtctgcgcttcttcccaggccctgccggctggcccctccctcccactgtctcagtttgcaaacgcttgtgaggggtcagggagggcagcatggggctttcagcccggaggaggagacttgctgcagctgataagaacttggggatccacggaggggggctacgggtactgccagggttatcgtgaaggccactcgcagcctgcaagtttcctgtcactatcagctggtgacagcctctgggacaggccttcgggaaggccctgaggccttgaaaacatctcctgggtcccaggattgaaggctctggatagtgacaaacccaggagagggaatttctaagtcaccgagttgggtggggagaggggccggctgagggcagcagggatgcagagcgcggccaccagccccagcaacaagggtcataaaccccagcactgcagcaccaacatctgccgccactgactcaggtccccacgctgtgccacgcactttcatggatggtctcagttaccctccaggtatctccattatcagaccggtgaactaagatgcttaggagtggagcccacattgcctgggcccccaagagatgcggtgagaggggcttgcctggagctgaagggcgtgggcctgattgaggtggccggggtgtgcccagacatgcaggctgagcccagccaggtcctccccggccttgagcctcactgtgcaagacggtcgcaagtgtcctcccaaggcagggactttctgtcctacccactgtgttcctagcagccggcacaggcctgtgcccagagggccagatgtcatacacacatgcatgcagatgtatgtttgtgtatgtatacacgttaacacacattatcccagacccccatatgcacagacacatagacacacacacacacactgatacaggcatacctgtgcatagatacacatatccacatggacatgcatccacagacacattagcacaaacatgtatgtgctacacacacactcccactcgatattcagagatacatgcacacagagaaacagacacacactcagacacaccatcacacatacacacgtacacaccctggctcccacacagtacatgcacatgcacacggagatacgcttgcacacaaaattaccttcaaggcacacacagatgtgcacacacatatatacatgtggagatagacgtgcacacaccccatgtacctacacaaagatacacacatatgtgcacccagacacacatgtgcacacacgtgttgagtgacagtacaagacccacccccatcgtttggctccacaacaagtgagggtgttgcggggggcagcagccatggttttgagggttcattggcttgggagagagggaagtggagcaggtccaggccggaggactcggggggagaagagacgggcacagtgagggagttgccgtacctggccgctcacttggctgggcggcagatgttggctgccagtgtcctttggcgcgggggaagaccgctcattgccagccccctagtcctcgaaaaggtttctgtctggacattggcccaggctcggccagtgcacaggcaggcaggaagggccggggagctaacaccccagggcagccctcagcaggccagagggcagttaggggatagacgcccctcccttgccaccctcggcagtcactctggggtgtgtgccctgcgctggtgccctgagtccatgactcccccttctcttcactgcctcacgtcctcgatcccctgctgtgcttccagggatcccctcctgaagcagctgcctgtggggtttgcacacccagctgagacggccgtgagagacctcaacgacggcagcgtgggccaggcactcaacgtccccgggagtggggtgcccaagtcctgtggggcctggagaagcgcctgcttccccttcttcaaggagctgacaaagcccagagagcctcagcagtgcagccagggccatcccactaggcgggctttgcccacaggttgatccacctctgagctgtcaccctccaagcaggcaagaggaccaggcctgggagcagaggctgagcgcaacttccggggcacgtggctgctgtgtgagccagctgggggctgggagaggcacgcaggatccagaggggcctgagaccccaccccgccccatggcattgatttggagacttcttgctggggaggggcagtggtgagtgagaggtgcttcccttagagccccattttcatgccactttccagttgagcaaactgaggcccagagaggaaaaaggggctctccaaggccattgggctgtcactccccttctgggggtgtaatcacagagggactgggctgggacaaggtgtgggaaccacagccaccgcagcccacgagaagaagccacacaatggtgaggtcacctccgtgtcacagccctggcttgctctgctctgccctggtggggagcttgcctggttgccatcctccttgaacctcaccttcttccctgcatgcattgagctgacccctgggtagccccgcaggtcctgccggcccagcatccactcccttcctggtgacagcacctgcttttccttagggagctgcccccgcaccaccctcaggccaggtggttcaatggagccacctctacccctggctctgcagctcaaatagtcagcatattctactcccctggaccctcagaatggttcagggatagacgtgtgacccagtgtgggtccatgcgagtcagtcctcctgggggaggaaagctgtccctctgctgaggaagccaagctgggagcagataagcctgaagcagctgggggcagagaggagtttgtgcttatggagaggctgcctgagaaggaagccagcccaggagaaaggagagctgaggaggagagaggagcagagatagggtcttggggacatctctgggggcttttgatccagctatgcctgaagttagatcctggacctttttaatttgagagctaatactttcccccttttacttaagcctatttgatttgatttttttgtccctggcaaccaagactctggacatatacaacctcaaagggctggcattacttagaattaggttcagcaactgcaatagaaagtccaaaattagggtggttcttagctacctgtaatgcatttatttttctcatgtaaaataagtctgaagcaggcagtccaggacttggatgacagctccacagtcatcaggagcttaggccccttccatcatcccagtgaaccatttcaatgcatggcttccttccttaagaccatcttggggaccaagatggctgctggagctccagccatcatgttcaagtgccaggcagcagaagaaagaaaggggaaggctagagtatctcaagccgagacttctcgaggagacttcccagaagttgcacacaacattcctcttccatttcgttggccagaacttagtcacatggccatacttaactgcaagggatggtggggaatgtcggtgtttagctggggatatagctacctggaacacagaaagccttctgctaccaaggaagacacgggaatgtccttatgcagacaacttgcagtttctgcctcaggtccttccagcagtaagctttgagtccatgagagtcatgtcccattcatacgtgctttatggagactgttactgaccaagcctgttacctctttaccttcacaccagtggggtgcgctgggtctatccttatgcccatttcacccagggggagatcgcggctcagagcgctcactgcacatggcctgaggtcacctggttccttaggggcagttccaggaggacagctcgagcttctgcctcagtgaggtgttggaagtttggcaaacagttctcatcggacatggctgcccacgttcctacaggaccggcggcccaaggtgccttcgcattcatggtccttgagtgggagctgggcctggggccaccaggaggtgccctctgatgtgctccagtgtgctggcttggttccttctccttagcatcctcccacgaggagtggagtcatggtcccattttacagaggggaagacaggctcagagcggggaggtggcctggtgaggaatagctgacccatccaggcttcgggcccgggtcggtctgcctccaaagcctgtgttgttggtctttggctatgtggcctctggggagcttgcgtggaacaccttgaccagggctcagtcctgtctcctaagccccacccatgcctccttcaggggtgcagacccccagcctgggccagctgcaggcagggccaacaaggggcagcaggaggggctggatgcttgggccacctcaggcgattgactgagcccggatgttccggccacctcaggtgactgactgagccacggttacatcacctagaaatgggttaataaccaaggtcctgcctcccagggctgtggccgggattacaggggatgagttaggtaaggtgccccgtgcagccctggtgtggagtaggcgcccctcagggagccctcagcccccactgctagcagggtaagcgaagcgatggagggtgggtttgagaagacccctgattcctggaaggccacccgctgtttttcagggtgctgcctgaggatgacggacccatgctgccaatccaacaagacaaaccctcctgcttcagtctccccacctctggaaccgaggttgtcctcaaagccccagaatgcatgaaaactggcatttattggagacctgccatggctttacacctgtcatttccctaaactctcccagcagcctgtgagaagttgactgtgcccatttcacagatgggaaaaccaaagctgagcagatttggccgcctgctccaggccagagagctggacagtggcagggccagggcagagctgggggttggacccatgcatcctgaacctggagccacacgccgctgcaccctgaggactgggttctggccaccgcacccatcctccaccttcctcagccaaagtcagccgggcgtcctccccacccctgccctggctgctgagtcacacttgtgtttgttccccagagacgtaaacatccaaccaggagccccctgggcaggaggttgggagccctccagatgctgagcgaataacaggggcagctctccagcgtgccccgaggctgggtgttgcatagggcacagcctggggtgggcacctgggcttccagatacctcctgggcctcccgcaggggccgataagtgcctggctctgcttatcagccccgttgccctgcctgctcccgcctcaagtcctggtgtacacattggggtgcacggtggcctggagatcatgatggggtgaaccaccctccgcccacagcccggcccaccagacagctgagcctggtgcagcagaaacaactcagagggttcccgggtgcctcctgctggctccctgctccagtgatgggggcgtttttagagaaattaaaataaagatctttttttctaaactataaaattaagactgttggggggaaaatgtgactatttcctttaatttattaaaataatctgcatatgtgtataaaaaggagtggaaggaaagagaccaggtgttaatggtcgtaggaggacaggaggcttttattttttcttaacacggctctctatttttcacagctgagaaatgaaagccagcgaatgaggcttggcgtttggtcatttgctcttgcatctgtgtgtgcgcactccagacgctccagaggttccagtgggtggtgtctgtgcccctctcttctgctgactttctgggtttctctgataggcctgagcctgcagcggggtggggttggggtccaggcgcttgtctatgggaacccgctctgtcttcaaccgtgtgactcagaacccagtttcccggcacacacacaatcacacaatacaagccctctgtgactctccactaaatcccacttccttgcacagcctccacggccagggcgaactggccctgccacctgtctgatcctgagagagagagagagagatggagggagtcactctctccttgttgtccctgaaccctaactcaaatgtcagccttggagatgccttctgggacctccctatctaagctatcacctccaaccccatccttgttctctcatttgtttttctttccaagcagctgtctctgggataagggcctggcctcagagcgtcctaggcatgagtctgggctgcctcttcttcctcctccctgggcctgacaacctcgctcctgggaaatgggctgagcctggggttcctaccctcccacgcagtggcaggaccgtgctccccagcagccagcgtgccctgggatggctcgccctgcgcaggtgtggacagcctctgcccagcttgcaagcacaagccctcctgaaccacgggagagcggaacgtcaccaaaggctgcttggctcccacaggcctaggtggaggtgtggcccatgaaggccacagtcctgaatctcaagctgaggtttagcaaaagcctgcaaggtaaccgggggcgtggggagctgtagtcctcatcctcagggtgggcagggcagagaagcctgaacttatccagcactgggcttgtgccaggccctgtgcccaccactcagcagcatgggctcatcaaatccacacaacaacccactttatagatgcagacactgaggctcaggctagtcagggagttttcccagggtcacacagtgagtagctggcagagctgggctccaaaccccgggggatctgatgccaaagctgccctcctaacctgcagctggggtctccatgggaggagacaatgacctgtattctggtgtggccacagggagaaaggccacagagccactaagaatgatactgtggaagtctatttcccgacacggagagatggccacagagtacggtggaaggaaaaaagccaccatgaacagaagcttctcacaatgctgggcccagagttcctcacagcagcagtgacacccgtgctctccagtttgctccagtccccaccaatctttactgtgcctctcattgaaccctggcaggcattttaacttgtcggttaggagtcacaggagagccaagtagaggaggaagcaggaaccgtgtacacacgtgctttatcccccttgacgtctttctagaggacagttatgcaattatgtgacagatggagggagggagggactgaagaaagggaaaaagaatgggtggaggaatggatagagatgtatggatggagggtgaatgggaggatagatggatatatgcatggagaaatggttggggaatggatggagggagggagggtgaatgggaggatagatggatacatgaatggagaaacggatagagggaaggagtgtgaatgggaggattgatggatatatgcatggagaaatggttggggaatggatggagggagggagggtgaatgggaggatagatggatacatgaatggagaaatggatggggaatggatggagggagggagggtgaatgggaggattgatgggcagatgaatggagaaacggatagagggaaggagtgtgaatgggaggattgatggatacatgaatggagaaatggatggggaatggatggagggagggagggtgattgggaggattgatggaagatgaaatggagggagggagggagtgatggataaaggaagggatggatggggggatgaatggaaagatagagatatcttcaaccttggtccctactccagcagagttagctttgcctcaggggatggtctggtacaagggttaatcattcaagtgtttggaatcagacctgaatgtgaatctgagtttctttcctgacaagctgtgtgaccttaggtaagtcactcaccttctctgatcttcagtttcctcattattagaaaggaaataataatactagataacaataataatagaataataatccacattctatggatttgcctattctggacatttcttaagaatgtccatgcaatatgtgatcttgggggtttggcttcttttattttgcatcaggttttcaaagttcatccatgttgtggcatgtgccagcccttctactccagcagagttagctttgcctcaggggatgatctagcacaagggttaataattcaagtgtttggaatcagacctgaatgtgaatctaagtttctctcctgacaagctgtgtgaccttaggtaagtcactcaccttctctgatcctcagtttcctcattaatagaaaggaaataataatactttgtagtgcctcctagaacacgaagtagaacaagcacttagggccaggtttgagggagaagttgaaggtgggcccgcctttattaggatccgtgctgctgctacggtcctatcaaccctgccctgagaaagtgccctctctgcttccgggccctttgtgttgagctggttaatcgctcgggagactcgatgggttccccacctccccacccccagctctgaggatcttgggatctcgctggactggtgttaataccaatagcatccccttgctcactgcctccaacctcgaccggactctcagaccccgcccaaagccacagccgcatcttcgtgaccatgacctgagaaggctccttgcagccctgccgcagagcaatcctgttatcagggcttccagccctggctgcacctgagaactgagctgcaggagctgctaaaagcaatgctgcctgtgccccacccggaacccagtctttgggagaagcgcctggcatgagtatttttttaagcgcttctgactgatactaaggcaaagcctggcctgagaataaaagaagctctgtgtttagtttcttttctttttaaaatgtttctattttttctttacttttctgtttagtttcttcggcagtgaaaacagactctgctgtctgtagttggatgaagaattcacgtttgttttcctttcagggttttgatgggtcagtgtaaaatatgttttttgttaatccccttgggttacagctggttagagtagggggttgggagccccttcctcttactttacagggctccaaaatcctccgcagagtacaatgtggggctgaattttattataaggtaaactggtttaaaagaataacactaaacacaaatcaaaggaaagagatgagctaccacttcgcattcactaggatgggatgaaaaagtcagaga

SEQ ID NO: 760 - DNA, 2383 bp, Homo sapiens
cgcagcgccggtcgggagcgcagcgcggcgcacgtcggcgcgcacggcgggacgggcgccggagtggtcgggcctggcggctggacgggcgcccctcgctgccccgcgcgctccccgccgccccccatgagcgcagccccgcgcggcccgggtccgtaggcggcggggcgccccccatgctgctgcagcccgcgccgtgcgccccgagcgcgggcttcccgcggcccctggcgcccccggcgccatgcacggctcgcagaaggacaccacgttcaccaagatcttcgtgggcggcctgccgtaccacactaccgacgcctcgctcaggaagtacttcgagggcttcggcgacatcgaggaggccgtggtcatcaccgaccgccagacgggcaagtcccgcggctacggcttcgtgaccatggccgaccgggcggcagctgagagggcttgcaaagacccgaaccccatcatcgacggccgcaaggccaacgtgaacctggcatatctgggcgccaagccgcggagcctccagacgggctttgccattggggtgcagcagctgcaccccaccttgatccagcggacttacgggctgaccccgcactacatctacccaccagccatcgtgcagcccagcgtggtgatcccagccgcccctgtcccgtcgctgtcctcgccctacattgagtacacgccggccagcccggcctacgcccagtacccaccggccacctatgaccagtacccatacgccgcctcgcctgccacggctgccagcttcgtgggctacagctaccctgccgccgtgccccaggccctctcagccgcagcacccgcgggcaccactttcgtgcagtaccaggcgccgcagctgcagcctgacaggatgcagtgaggggcgttcctgccccgaggactgtggcattgtcaccttcacagcagacagagctgccaggccatgatgggctggcgacagcccggctgagcttcagtgaggtgccaccagcacccgtgcctccgaagaccgctcgggcattccgcctgcgccctgggacagcggagagacggcttctctttaatctaggtcccattgtgtcttgagggaggactttaagaatgactgagaactatttaaagacgcaatcccaggttccttgcacaccatggcagcctctccttgcaccttctcctgcctctccacactccaggttccctcaggcttgtgtccccactgctgcatcgtggcggggtgtcacagaccctctgcagcccctggctgccctggactgtgcagagatgcctgactccagggaaacctgaaagcaagaagttaatggactgtttattgtaacttgatcctcccgagctgtgagcgcagtctgaggtgtgaggacacggcctcctgttggagtcccattttctccatcagggcacgtgggcggcttcctcaagcccggaggagctcccaggcgcacaggggccgccggtaacaggggccgccggccaaaggcccctttccagtcatagcactgaagttgcaacttttttcttgtaattgttttgctactaagataatttcagaagttcagtctattttttcagcggatactgccgccaccaagaatccaaaacctatttttgacttggagagacttgcttttgttggttccgcccgtggagacgacgatagtgtttctgtataataaagtgtctgccggctcgcgggccaggatcctctcggtgggatgggcaccacagacaggaggcccctcaggcccgtgcgggccactgtctgctgccgcctgccggggtggcagagtgagttgtctcaggaccccgtcactgcgacgttgacactcctctcccttcccttcctccccaactccccaaacactgtggaaggggagaaggaagtgatccacagcattcaggccacttggggtctagaccatggtggtgccagcctggggggggcagtggccctcagctctgcccgctggagcggttgagtgcagaagggtgcgcctcttccctctacccccgcaccacctgctgtgtgccagcctgagacggttcctgcctgtcttgggggttggtggagggtggaggcagttctgccagccgtggcagggctgctatggggcatccagggctgtgggggtctggaggaggggacatgaggtgagaggtatcctggccgagggcggggggcagcggggggtctccctccggacctacctcagggagctgagcgtgcaggcgctccagggcaggcctgggacagagtcaaggctcagagaataaaggtagctaatctcatcataatatttttattagaatgttctgatgataaaaataaaacttgttttctttaaagaaaaag

SEQ ID NO: 761 - protein, 212 aa, Homo sapiens
MHGSQKDTTFTKIFVGGLPYHTTDASLRKYFEGFGDIEEAVVITDRQTGKSRGYGFVTMADRAAAERACKDPNPIIDGRKANVNLAYLGAKPRSLQTGFAIGVQQLHPTLIQRTYGLTPHYIYPPAIVQPSVVIPAAPVPSLSSPYIEYTPDAYAQYPPATYDQYPYADATAASFVGYSYPAAVPQALSAAAPAGTTFVQYQAPQLQPDRMQ

SEQ ID NO: 762 - DNA, 2460 bp, Homo sapiens
cgcagcgccggtcgggagcgcagcgcggcgcacgtcggcgcgcacggcgggacgggcgccggagtggtcgggcctggcggctggacgggcgcccctcgctgccccgcgcgctccccgccgccccccatgagcgcagccccgcgcggcccgggtccgtaggcggcggggcgccccccatgctgctgcagcccgcgccgtgcgccccgagcgcgggcttcccgcggcccctggcgcccccggcgccatgcacggctcgcagaaggacaccacgttcaccaagatcttcgtgggcggcctgccgtaccacactaccgacgcctcgctcaggaagtacttcgagggcttcggcgacatcgaggaggccgtggtcatcaccgaccgccagacgggcaagggattatttttgtccttgaaggccacatttcccaggccttgaactttgacgggaggagctggaatccaggaggcatctttgtgggagagccccaggtgaccatggccgaccgggcggcagctgagagggcttgcaaagacccgaaccccatcatcgacggccgcaaggccaacgtgaacctggcatatctgggcgccaagccgcggagcctccagacgggctttgccattggggtgcagcagctgcaccccaccttgatccagcggacttacgggctgaccccgcactacatctacccaccagccatcgtgcagcccagcgtggtgatcccagccgcccctgtcccgtcgctgtcctcgccctacattgagtacacgccggccagcccggcctacgcccagtacccaccggccacctatgaccagtacccatacgccgcctcgcctgccacggctgccagcttcgtgggctacagctaccctgccgccgtgccccaggccctctcagccgcagcacccgcgggcaccactttcgtgcagtaccaggcgccgcagctgcagcctgacaggatgcagtgaggggcgttcctgccccgaggactgtggcattgtcaccttcacagcagacagagctgccaggccatgatgggctggcgacagcccggctgagcttcagtgaggtgccaccagcacccgtgcctccgaagaccgctcgggcattccgcctgcgccctgggacagcggagagacggcttctctttaatctaggtcccattgtgtcttgagggaggactttaagaatgactgagaactatttaaagacgcaatcccaggttccttgcacaccatggcagcctctccttgcaccttctcctgcctctccacactccaggttccctcaggcttgtgtccccactgctgcatcgtggcggggtgtcacagaccctctgcagcccctggctgccctggactgtgcagagatgcctgactccagggaaacctgaaagcaagaagttaatggactgtttattgtaacttgatcctcccgagctgtgagcgcagtctgaggtgtgaggacacggcctcctgttggagtcccattttctccatcagggcacgtgggcggcttcctcaagcccggaggagctcccaggcgcacaggggccgccggtaacaggggccgccggccaaaggcccctttccagtcatagcactgaagttgcaacttttttcttgtaattgttttgctactaagataatttcagaagttcagtctattttttcagcggatactgccgccaccaagaatccaaaacctatttttgacttggagagacttgcttttgttggttccgcccgtggagacgacgatagtgtttctgtataataaagtgtctgccggctcgcgggccaggatcctctcggtgggatgggcaccacagacaggaggcccctcaggcccgtgcgggccactgtctgctgccgcctgccggggtggcagagtgagttgtctcaggaccccgtcactgcgacgttgacactcctctcccttcccttcctccccaactccccaaacactgtggaaggggagaaggaagtgatccacagcattcaggccacttggggtctagaccatggtggtgccagcctggggggggcagtggccctcagctctgcccgctggagcggttgagtgcagaagggtgcgcctcttccctctacccccgcaccacctgctgtgtgccagcctgagacggttcctgcctgtcttgggggttggtggagggtggaggcagttctgccagccgtggcagggctgctatggggcatccagggctgtgggggtctggaggaggggacatgaggtgagaggtatcctggccgagggcggggggcagcggggggtctccctccggacctacctcagggagctgagcgtgcaggcgctccagggcaggcctgggacagagtcaaggctcagagaataaaggtagctaatctcatcataatatttttattagaatgttctgatgataaaaataaaacttgttttctttaaagaaaaag

SEQ ID NO: 763 - protein, 154 aa, Homo sapiens
MADRAAAERACKDPNPIIDGRKANVNLAYLGAKPRSLQTGFAIGVQQLHPTLIQRTYGLTPHYIYPPAIVQPSVVIPAAPVPSLSSPYIEYTPDAYAQYPPATYDQYPYADATAASFVGYSYPAAVPQALSAAAPAGTTFVQYQAPQLQPDRMQ

SEQ ID NO: 764 - DNA, 2385 bp, Homo sapiens
taggactcctaagttggtggggaggttttggagccagagggcactcgggatttcctggagcagcggggggtgaggagcaatggctccaccccggggtgttaggagctcttcggcctcccccatatttttaacagccctctcagccgccccaaataaacatcagcttaagtaaaaacgtcttgaagacactttcctgcttaccttccaagcatagcgtcgcaaactccttctcagaggaaagtctcggccctcactggtgggcaagtccaggcggccccccaagctcccttcggggttcatttttgccctatccccgcaggggattatttttgtccttgaaggccacatttcccaggccttgaactttgacgggaggagctggaatccaggaggcatctttgtgggagagccccaggtgaccatggccgaccgggcggcagctgagagggcttgcaaagacccgaaccccatcatcgacggccgcaaggccaacgtgaacctggcatatctgggcgccaagccgcggagcctccagacgggctttgccattggggtgcagcagctgcaccccaccttgatccagcggacttacgggctgaccccgcactacatctacccaccagccatcgtgcagcccagcgtggtgatcccagccgcccctgtcccgtcgctgtcctcgccctacattgagtacacgccggccagcccggcctacgcccagtacccaccggccacctatgaccagtacccatacgccgcctcgcctgccacggctgccagcttcgtgggctacagctaccctgccgccgtgccccaggccctctcagccgcagcacccgcgggcaccactttcgtgcagtaccaggcgccgcagctgcagcctgacaggatgcagtgaggggcgttcctgccccgaggactgtggcattgtcaccttcacagcagacagagctgccaggccatgatgggctggcgacagcccggctgagcttcagtgaggtgccaccagcacccgtgcctccgaagaccgctcgggcattccgcctgcgccctgggacagcggagagacggcttctctttaatctaggtcccattgtgtcttgagggaggactttaagaatgactgagaactatttaaagacgcaatcccaggttccttgcacaccatggcagcctctccttgcaccttctcctgcctctccacactccaggttccctcaggcttgtgtccccactgctgcatcgtggcggggtgtcacagaccctctgcagcccctggctgccctggactgtgcagagatgcctgactccagggaaacctgaaagcaagaagttaatggactgtttattgtaacttgatcctcccgagctgtgagcgcagtctgaggtgtgaggacacggcctcctgttggagtcccattttctccatcagggcacgtgggcggcttcctcaagcccggaggagctcccaggcgcacaggggccgccggtaacaggggccgccggccaaaggcccctttccagtcatagcactgaagttgcaacttttttcttgtaattgttttgctactaagataatttcagaagttcagtctattttttcagcggatactgccgccaccaagaatccaaaacctatttttgacttggagagacttgcttttgttggttccgcccgtggagacgacgatagtgtttctgtataataaagtgtctgccggctcgcgggccaggatcctctcggtgggatgggcaccacagacaggaggcccctcaggcccgtgcgggccactgtctgctgccgcctgccggggtggcagagtgagttgtctcaggaccccgtcactgcgacgttgacactcctctcccttcccttcctccccaactccccaaacactgtggaaggggagaaggaagtgatccacagcattcaggccacttggggtctagaccatggtggtgccagcctggggggggcagtggccctcagctctgcccgctggagcggttgagtgcagaagggtgcgcctcttccctctacccccgcaccacctgctgtgtgccagcctgagacggttcctgcctgtcttgggggttggtggagggtggaggcagttctgccagccgtggcagggctgctatggggcatccagggctgtgggggtctggaggaggggacatgaggtgagaggtatcctggccgagggcggggggcagcggggggtctccctccggacctacctcagggagctgagcgtgcaggcgctccagggcaggcctgggacagagtcaaggctcagagaataaaggtagctaatctcatcataatatttttattagaatgttctgatgataaaaataaaacttgttttctttaaagaaaaa

SEQ ID NO: 765 - protein, 154 aa, Homo sapiens; identical to SEQ ID NO: 763

SEQ ID NO: 766 - DNA, 2328 bp, Homo sapiens
ccgcagcgccggtcgggagcgcagcgcggcgcacgtcggcgcgcacggcgggacgggcgccggagtggtcgggcctggcggctggacgggcgcccctcgctgccccgcgcgctccccgccgccccccatgagcgcagccccgcgcggcccgggtccgtaggcggcggggcgccccccatgctgctgcagcccgcgccgtgcgccccgagcgcgggcttcccgcggcccctggcgcccccggcgccatgcacggctcgcagaaggacaccacgttcaccaagatcttcgtgggcggcctgccgtaccacactaccgacgcctcgctcaggaagtacttcgagggcttcggcgacatcgaggaggccgtggtcatcaccgaccgccagacgggcaagtcccgcggctacggcttcgtgaccatggccgaccgggcggcagctgagagggcttgcaaagacccgaaccccatcatcgacggccgcaaggccaacgtgaacctggcatatctgggcgccaagccgcggagcctccagacgggctgaccccgcactacatctacccaccagccatcgtgcagcccagcgtggtgatcccagccgcccctgtcccgtcgctgtcctcgccctacattgagtacacgccggccagcccggcctacgcccagtacccaccggccacctatgaccagtacccatacgccgcctcgcctgccacggctgccagcttcgtgggctacagctaccctgccgccgtgccccaggccctctcagccgcagcacccgcgggcaccactttcgtgcagtaccaggcgccgcagctgcagcctgacaggatgcagtgaggggcgttcctgccccgaggactgtggcattgtcaccttcacagcagacagagctgccaggccatgatgggctggcgacagcccggctgagcttcagtgaggtgccaccagcacccgtgcctccgaagaccgctcgggcattccgcctgcgccctgggacagcggagagacggcttctctttaatctaggtcccattgtgtcttgagggaggactttaagaatgactgagaactatttaaagacgcaatcccaggttccttgcacaccatggcagcctctccttgcaccttctcctgcctctccacactccaggttccctcaggcttgtgtccccactgctgcatcgtggcggggtgtcacagaccctctgcagcccctggctgccctggactgtgcagagatgcctgactccagggaaacctgaaagcaagaagttaatggactgtttattgtaacttgatcctcccgagctgtgagcgcagtctgaggtgtgaggacacggcctcctgttggagtcccattttctccatcagggcacgtgggcggcttcctcaagcccggaggagctcccaggcgcacaggggccgccggtaacaggggccgccggccaaaggcccctttccagtcatagcactgaagttgcaacttttttcttgtaattgttttgctactaagataatttcagaagttcagtctattttttcagcggatactgccgccaccaagaatccaaaacctatttttgacttggagagacttgcttttgttggttccgcccgtggagacgacgatagtgtttctgtataataaagtgtctgccggctcgcgggccaggatcctctcggtgggatgggcaccacagacaggaggcccctcaggcccgtgcgggccactgtctgctgccgcctgccggggtggcagagtgagttgtctcaggaccccgtcactgcgacgttgacactcctctcccttcccttcctccccaactccccaaacactgtggaaggggagaaggaagtgatccacagcattcaggccacttggggtctagaccatggtggtgccagcctggggggggcagtggccctcagctctgcccgctggagcggttgagtgcagaagggtgcgcctcttccctctacccccgcaccacctgctgtgtgccagcctgagacggttcctgcctgtcttgggggttggtggagggtggaggcagttctgccagccgtggcagggctgctatggggcatccagggctgtgggggtctggaggaggggacatgaggtgagaggtatcctggccgagggcggggggcagcggggggtctccctccggacctacctcagggagctgagcgtgcaggcgctccagggcaggcctgggacagagtcaaggctcagagaataaaggtagctaatctcatcataatatttttattagaatgttctgatgataaaaataaaacttgttttctttaaagaaaaa

SEQ ID NO: 767 - protein, 98 aa, Homo sapiens
MHGSQKDTTFTKIFVGGLPYHTTDASLRKYFEGFGDIEEAVVITDRQTGKSRGYGFVTMADRAAAERACKDPNPIIDGRKANVNLAYLGAKPRSLQTG

SEQ ID NO: 768 - DNA, 2330 bp, Homo sapiens
taggactcctaagttggtggggaggttttggagccagagggcactcgggatttcctggagcagcggggggtgaggagcaatggctccaccccggggtgttaggagctcttcggcctcccccatatttttaacagccctctcagccgccccaaataaacatcagcttaagtaaaaacgtcttgaagacactttcctgcttaccttccaagcatagcgtcgcaaactccttctcagaggaaagtctcggccctcactggtgggcaagtccaggcggccccccaagctcccttcggggttcatttttgccctatccccgcaggggattatttttgtccttgaaggccacatttcccaggccttgaactttgacgggaggagctggaatccaggaggcatctttgtgggagagccccaggtgaccatggccgaccgggcggcagctgagagggcttgcaaagacccgaaccccatcatcgacggccgcaaggccaacgtgaacctggcatatctgggcgccaagccgcggagcctccagacgggctgaccccgcactacatctacccaccagccatcgtgcagcccagcgtggtgatcccagccgcccctgtcccgtcgctgtcctcgccctacattgagtacacgccggccagcccggcctacgcccagtacccaccggccacctatgaccagtacccatacgccgcctcgcctgccacggctgccagcttcgtgggctacagctaccctgccgccgtgccccaggccctctcagccgcagcacccgcgggcaccactttcgtgcagtaccaggcgccgcagctgcagcctgacaggatgcagtgaggggcgttcctgccccgaggactgtggcattgtcaccttcacagcagacagagctgccaggccatgatgggctggcgacagcccggctgagcttcagtgaggtgccaccagcacccgtgcctccgaagaccgctcgggcattccgcctgcgccctgggacagcggagagacggcttctctttaatctaggtcccattgtgtcttgagggaggactttaagaatgactgagaactatttaaagacgcaatcccaggttccttgcacaccatggcagcctctccttgcaccttctcctgcctctccacactccaggttccctcaggcttgtgtccccactgctgcatcgtggcggggtgtcacagaccctctgcagcccctggctgccctggactgtgcagagatgcctgactccagggaaacctgaaagcaagaagttaatggactgtttattgtaacttgatcctcccgagctgtgagcgcagtctgaggtgtgaggacacggcctcctgttggagtcccattttctccatcagggcacgtgggcggcttcctcaagcccggaggagctcccaggcgcacaggggccgccggtaacaggggccgccggccaaaggcccctttccagtcatagcactgaagttgcaacttttttcttgtaattgttttgctactaagataatttcagaagttcagtctattttttcagcggatactgccgccaccaagaatccaaaacctatttttgacttggagagacttgcttttgttggttccgcccgtggagacgacgatagtgtttctgtataataaagtgtctgccggctcgcgggccaggatcctctcggtgggatgggcaccacagacaggaggcccctcaggcccgtgcgggccactgtctgctgccgcctgccggggtggcagagtgagttgtctcaggaccccgtcactgcgacgttgacactcctctcccttcccttcctccccaactccccaaacactgtggaaggggagaaggaagtgatccacagcattcaggccacttggggtctagaccatggtggtgccagcctggggggggcagtggccctcagctctgcccgctggagcggttgagtgcagaagggtgcgcctcttccctctacccccgcaccacctgctgtgtgccagcctgagacggttcctgcctgtcttgggggttggtggagggtggaggcagttctgccagccgtggcagggctgctatggggcatccagggctgtgggggtctggaggaggggacatgaggtgagaggtatcctggccgagggcggggggcagcggggggtctccctccggacctacctcagggagctgagcgtgcaggcgctccagggcaggcctgggacagagtcaaggctcagagaataaaggtagctaatctcatcataatatttttattagaatgttctgatgataaaaataaaacttgttttctttaaagaaaaa

SEQ ID NO: 769 - protein, 40 aa, Homo sapiens
MADRAAAERACKDPNPIIDGRKANVNLAYLGAKPRSLQTG

SEQ ID NO: 770 - DNA, 2479 bp, Homo sapiens
cgcacgtcggcgcgcacggcgggacgggcgccggagtggtcgggcctggcggctggacgggcgcccctcgctgccccgcgcgctccccgccgccccccatgagcgcagccccgcgcggcccgggtccgtaggcggcggggcgccccccatgctgctgcagcccgcgccgtgcgccccgagcgcgggcttcccgcggcccctggcgcccccggcgccatgcacggctcgcagaaggacaccacgttcaccaagatcttcgtgggcggcctgccgtaccacactaccgacgcctcgctcaggaagtacttcgagggcttcggcgacatcgaggaggccgtggtcatcaccgaccgccagacgggcaagtcccgcggctacggcttcgtgaccatggccgaccgggcggcagctgagagggcttgcaaagacccgaaccccatcatcgacggccgcaaggccaacgtgaacctggcatatctgggcgccaagccgcggagcctccagacgggctttgccattggggtgcagcagctgcaccccaccttgatccagcggacttacggctgtaggaccttgggcaactcacctggccccgtgtgtgaaatgggcctcatgatgggaagaccaagccgacggggtgacgcacccagtcacagtacgggtctccccccagcgtgggcgctggcgagctgaccccgcactacatctacccaccagccatcgtgcagcccagcgtggtgatcccagccgcccctgtcccgtcgctgtcctcgccctacattgagtacacgccggccagcccggcctacgcccagtacccaccggccacctatgaccagtacccatacgccgcctcgcctgccacggctgccagcttcgtgggctacagctaccctgccgccgtgccccaggccctctcagccgcagcacccgcgggcaccactttcgtgcagtaccaggcgccgcagctgcagcctgacaggatgcagtgaggggcgttcctgccccgaggactgtggcattgtcaccttcacagcagacagagctgccaggccatgatgggctggcgacagcccggctgagcttcagtgaggtgccaccagcacccgtgcctccgaagaccgctcgggcattccgcctgcgccctgggacagcggagagacggcttctctttaatctaggtcccattgtgtcttgagggaggactttaagaatgactgagaactatttaaagacgcaatcccaggttccttgcacaccatggcagcctctccttgcaccttctcctgcctctccacactccaggttccctcaggcttgtgtccccactgctgcatcgtggcggggtgtcacagaccctctgcagcccctggctgccctggactgtgcagagatgcctgactccagggaaacctgaaagcaagaagttaatggactgtttattgtaacttgatcctcccgagctgtgagcgcagtctgaggtgtgaggacacggcctcctgttggagtcccattttctccatcagggcacgtgggcggcttcctcaagcccggaggagctcccaggcgcacaggggccgccggtaacaggggccgccggccaaaggcccctttccagtcatagcactgaagttgcaacttttttcttgtaattgttttgctactaagataatttcagaagttcagtctattttttcagcggatactgccgccaccaagaatccaaaacctatttttgacttggagagacttgcttttgttggttccgcccgtggagacgacgatagtgtttctgtataataaagtgtctgccggctcgcgggccaggatcctctcggtgggatgggcaccacagacaggaggcccctcaggcccgtgcgggccactgtctgctgccgcctgccggggtggcagagtgagttgtctcaggaccccgtcactgcgacgttgacactcctctcccttcccttcctccccaactccccaaacactgtggaaggggagaaggaagtgatccacagcattcaggccacttggggtctagaccatggtggtgccagcctggggggggcagtggccctcagctctgcccgctggagcggttgagtgcagaagggtgcgcctcttccctctacccccgcaccacctgctgtgtgccagcctgagacggttcctgcctgtcttgggggttggtggagggtggaggcagttctgccagccgtggcagggctgctatggggcatccagggctgtgggggtctggaggaggggacatgaggtgagaggtatcctggccgagggcggggggcagcggggggtctccctccggacctacctcagggagctgagcgtgcaggcgctccagggcaggcctgggacagagtcaaggctcagagaataaaggtagctaatctcatcataatatttttattagaatgttctgatgataaaaataaaacttgttttctttaaagaaaaa

SEQ ID NO: 771 - protein, 156 aa, Homo sapiens
MHGSQKDTTFTKIFVGGLPYHTTDASLRKYFEGFGDIEEAVVITDRQTGKSRGYGFVTMADRAAAERACKDPNPIIDGRKANVNLAYLGAKPRSLQTGFAIGVQQLHPTLIQRTYGCRTLGNSPGPVCEMGLMMGRPSRRGDAPSHSTGLPPAWAS

SEQ ID NO: 772 - DNA, 75782 bp, Mus musculus
  misc_feature (1)...(75782): n = A,T,C or G
gtggtggggatttaattaacttttttaagttccaaaaatgaacactagatggcagacaactcacagggaatcgtggtattgttccagcatgcttatttctgctctgttttatatctcattcaaataataacaagccaacctttgacattaatacagtattcaagccagtagtgctggtgggtatagtgctggtggtatgggtgcctagcaaatgtcaggccctgagtttgatcctccatccctgtaaaattaatttttttttaagatttatttatttattatatgtaagtaagtacactgtatctgtcttcagacactccagaagagggggtcagatcttgttacagatggttgtgagccaccatgtggttgctgggatttgaactctggaccttcggaagaacagtcgggtgctcttacccactgagccatctcaccagcccctaaattaaattttaaaaaataaataacacaagggaaatctttctgaattgtgctcacattcccttaaccagagctggggtacccatatatgtgattcattttttaaggtagttaatttttcatgaacatatgcaaaatacaatagctgtcctttgttatcgtattgagaatagtttccccattaatatattttaatatccctccaaagtaatcgacccactttggaaagatttacagggctagctttcttttcttgggccgtttgtggcagccccagcagtatacagcagagggcgctagtgcaccatgctccaccacttcatggaagaatgaggtggtgaacacaaagaattatactaaagaatactggagtaacatcatcatcacttctctggtctcataacatccaggcaccccaggtcccacaccgccagatggctgcagcttgcagagccaccctagctgtcgtcagggcaggcaggctgtgcagtgcatcgggtagagtgggggtgggggtggggtagcagcagtgggggtggtgcctgtggctcttctacaagcaggggaagagctctccttccgtgtttctttactgtcttctgttttcacatcatacatcaaaatgatctctcatgaggaagggcaaggtcccccgttctcctaaaatacagtctaaacttactaatgtggactgcacggccattgaagatggtacctgcaccagacagaggtgggctggatgcttttaacctcagcaatataccttattttctcttgtaagctgtgtttggacttatttttattttgttaattctaaccttcacttttcattgtgagccccacctgaactcatattctactgacattcccgtgtctaacttctgcttacacattttatcttagtttacctgttacttcttccaggaagcatcacttcttcctctgagaggtctgcctttctctgtcagttgtagactatgtgctgagccctcacaaggccctgggttcaatccccggaagccagaagaacactcaaacatggtgaggtatgtgtgtaattccagctgtgaggaggtatgctacatccactccaatagtgacaagcctgggtgctgtcccgaggcgaaaagttcacagaaacttagtctcctggaaccgtggcatcctgtataacgaatgctccaatgtccttgctttagttggtaaatggatctgtgtgctttcccttaatattgcttaattacaagtgctcctaaggattgatattttgacatatagctaagttagattctaggcagtccttgatccgaccttgggcatgaatagctaagtcactgccctacacagaaatttaccattatctaggaagatggaagtttgtgacctaaagaggaaccagagtagatacttagaactatagatagctgagttacacccatacacaggtatttacaatggcctagggggaaggtggactatacaatagactagagtaggaactatggcaagggcacgaagcccttgcccctggcttctaagattaagctgaccttaggtggggctgcctttgattcccagttnnnnnnnnnnnnnnnnnnnncacccactccccctttttggccctggcgttcccctgtactggggcatataaagtttgcatgtccaatgggcctctctttccagtgatggccgactaggccatcttttgatacatgtgcagctagagtcaagggctccgggatactggttagttcataatgttgatccacctatagggttgcagatccctttagctccttgggtactttctctagctcctccattgggagccctgtgatccatccattagctgactgtgagcatccacttctgtgtttgctaggccccagcatagtctcacaagagacagctacatctgggtcctttcgataaaatcttactagtgtatgcaatggtgtcagcgtttggatgctgatgatggggtggatccctggatatggcagtctctacatggtccatcctttcatctcagctccaaactttgtctctgaaactccttccaagggtgttttgttcccacttctaaggaggggcatagtgtccacacttcagtcttcatttttcttgagtttcatgtgtttaggaaattgtatcttatatcttgggtatcctaggttttgggctaatatccacttatcagtgagtacatattgtgtgagttcctttgtgaatgtgttacctcactcaggatgatgccctccaggtccatccatttgcctaggaatttcataaattcattctttttaatagctgagtagtactccattgtgtagatgtaccacattttctgtatccattcctctgttgaggggcatctgggttctttccagcttctggctattataaataaggctgctatgaacatagtggggcatgtgtccttcttaccaggtggggcatcttctggatatatgcccaggagaggtattgctgggtcctccggtagtactatgtgcaattttctgaggaacccccagactgatttccagagtggttgtacaagcttgcaatcccaccaacaatggaggagtgttcctctttctccacatcctcgccagcatctgctgtcacctgaatttttgatcttagccattctgactggtgtgaggtggaatctcagggttgttttgatttgcatttccctgatgattaaggatgttgaacattttttcaggtgcttctctgccattcggtatttttcaggtgagaattctttgttcagttctgagccccattttttaatggggttatttgattgtctgaagtccaccttcttgagttctttatatnnnnnnnnnnnnnnnnnnnnacagggctagctttcttttcttgggccgtttgtggcagccccagcagtatacagcagagggcgctagtgcaccacgctccaccacttcatgggaagaatgaagtggtgaacacaaagaattatactaaagaatactggagtaacatcatcatcacttctctggtctcataacatccaggcaccccaggtcccacaccgccagatggctgcagcttgcagagccaccctagctgttgtcagggcaggtaggctgtgcagtgcatcgggtagagtgggggtggggtagcagcagtgggggtggtgcctgtggctcttctacaagcaggggaagagctctccttccgtgtttctttactgtcttctgttttcacatcatacaccaaaatgatttctcatgaggaagggcaaggtcccccgttctcctaaaatacagtctaaacttactaatgtggactgcacggccattgaagatggtaactgcaccagacagaggtgggctggatgcttttaacctcagcaatataccttattttctcttgtaagctgtgtttggacttatttttattttgttaattctaaccttcacttttcattgtgagccccacctgaactcatattctactgactttcccgtgtctaacttctgcttacacattttatcttagtatacctgttacttcttccaggaatcatcacttcttcctctgagaggtctgcctttctctgtcagttgtagactgtgctgagccctcacaaggccctgggttcaatccccggaagccagaagaacactcaaacatggtgaggtatgtgtgtaattccagctgtgaggaggtatgctacatccactccagtagtgacaagcctgggtgctgtcccgaggcgaaaagttcacagaaacttagtctcctggaaccatggcatcctgtataacgaatgctccaatgtccttgctttagttggtaagcggatctgtgtgctttcccttaatattgctttattacaagtactcctctggattgatattttgacatatagctaagttagattctaggcattccttgatctgaccttggacatggatagctaagtcactgccctacacagaaatttatcattatctggaaagaaggaagtttgtgaactaaagaggaaccagagtagatacttagaaatatagatagctgagttacacccatacacaggtatttacaatggcctagggggaaggtagactatacaatagactagagtaggaactatggcaagggccttgcccctggcttctaagattaagctgaccttaggtggggctgcctttgattcccagttgttgacattgatttttttttccttttccattttttattaggtatttagctcatttacatttccaatgctataccaaaagtcccccatacccacccnnnnnnnnnnnnnnnnnnnntgtagactatgtgctgagccctcacaaggccctgggttcaatccccggaagccagaagaacactcaaacatggtgaggtatgtgtgtaattccagctgtgaggaggtatgctacatccactccaatagtgacaagcctgggtgctgtcccgaggcgaaaagttcacagaaacttagtctcctggaaccgtggcatcctgtataacgaatgctccaatgtccttgctttagttggtaaatggatctgtgtgctttcccttaatattgcttaattacaagtgctcctaaggattgatattttgacatatagctaagttagattctaggcagtccttgatccgaccttgggcatgaatagctaagtcactgccctacacagaaatttaccattatctaggaagatggaagtttgtgacctaaagaggaaccagagtagatacttagaactatagatagctgagttacacccatacacaggtatttacaatggcctagggggaaggtggactatacaatagactagagtaggaactatggcaagggcacgaagcccttgcccctggcttctaagattaagctgaccttaggtggggctgcctttgattcccagttgttgacattgaattttatcccagttggttcctgccagtccttccctgtttgcattcctctgttttgtgtaagaatccagtaacctctttgtaccttgttggtgtgtcacctaacttccctattttcttctgtataaaaagtttgatgctggatttgacaaattacattcagatccagcacactctctcgttctgtgtctgtctgtcaattcccgccgactctatgcccgtctgtctgaacccctgattcccacgaattgaggggggcctactgggcccggtcggtggcagaggtcgaggcaggaggagcagggagtcagggttattctttatcgtatgtgtatgtagcaagtgtggggtcacctgggatataggaaaccctgtcttagaaaaagaaagagctgggtgtggtgggaggcagaggcaggtggatttctgagtttgaggccagagtgagttccaggacatccaagggtacacagagaaaccctgtctcggaaaaaaaaccaaaaaacaaaaaaaggaaggaaggaagggagaaagaagtacagaagcccatgtatagcgcttctggcactgcaattctgattgtctctgatttgtgactgtttacacattgccacagttgcttatttgcattctcgttatctaaacacagttcttggaaaacaccaaaactctcagtgtttgttgactaggaagggcttcagcctttaatggtatctcttatgccttctaagacttgagatcagaaattttaagcatgccagcaaacttgtttgcttagaattccaaattgtccctctcccagaaacactaagaccatgatgccatttagtgctctatatgtaaaaactccaaagccaacaaagccttatgggaacctccagagccttgcagatcacttcagcttcaaagtgagaggcaggagatgtaaagatgataacaatctctctcttctgctacaaaactgaagcacactatgtgactgtgtaacattcatggatactgagaatttctctacaccagaactttgggtgatcaggaccctaaaacccagtctttgatcctcccagggagcggtttgcataagccccatcccctcctgaccctgattcctccctcagatgcagctcaaggagggaggaagaacacactttgaagataagattaaactggattatgtgcctccaaaacagtcctgagggtgcccagctaatcctccctccgtgctgacaggctctgaagcctggctgctttgttgacctatttaccgagaacctcctcactttctgtttgatataaaggcagctaggtccttcctgtcctagctcaggccaaactgaaagcaagatctggagactattattatggttttgcttcactttcacccaatctcaacaaagcacttaaccgtctgaaagcctgacctgatgtgtgtgtgcgtgtgtgtgtgtgtgtgtgtgtgtgtgtgtgtgtgtgtgtgtgtgtgtggtgtgcttgcagctcttgctgccttgcagggagaaggcgattggacatgtggatgaatagactacttatttattaattatttttaaatttcccatagaaggacaacgttactgactggacatggtgtcaaacccctgtaattctagccttcaggagtctgaggtaggaatagcttgagttcacaggcagcctgggttacatagaaaattctaggctggtctgagtcataggtcaagattctgtctcaaaacactaacccccaagacctatagcagtggtagggggattgtatttccctatttctcttcactgtgctaattgtacatgaagcacctagaatgctttcagaaatagaggtttaaatgtttgggaagagatgtgccctgttttgtgccctttcttaggccacagaccttttcaccttaatccggtattattgttcatcccctggccactagttccacgaaaggcactaattgtgggtgcttcattgtgtagccctcaggttttaatacacttctatgagggaaaatgtactctcccttccatggtgctgcaatcatccagcctttgagaattccagtaaatggacccaaatgagctcaggacagttccagacagtgtctggatctggtgtgtgtgtgtgtgtgtgtgtgtgtgtgtgtgtgtgtgtgtgtgtgtgtgtaaaagacacagatatcaattacttgactactaagaagaagaaaacagggaaagcaagctggaagtagagtgaatgatgcaggagcttggaggctaattctctcaagagactgaaggtgaagtatctagattccaaggtcaacctgggctacatagtgaagccctgcctcaggcacacatgtatataagctagacacattaggtatcatctgtttacacacatgtacagagtggattgtgagagctctgctgtaaaacccattcttgagcctagtcgctttccagagctcctgtgctggtgactctgccataccttcctggtcattttagggcagagctataacctgggcaaacatttgttccagccagaagcactacaaatggcgagatgactccttcagtaaggactaccccaccactggcaaacggggctagaatgtttcaaatacagaaaattgtgagggacacctgccatcctcttgggtcacctgactggtagcaagggataggaataccatgatggggagaaactagcatccatccagcaaggacaatcttgtggacactgccttcacggccctggaataggtttctgggggccaaatgtcaggcaactgaactctgtgcttcccactgtcaccccacagtaccaatgcactatgagggaaaccccaaggaattcaggaacgatggcaaatgaatacatgctaaaagaatttgattttcctaaggaatcaggttgtttcctttacactcatccttcacattctgcaaacaggagtctcgcatctctaaagtgatgtctttcaacagctgacatttcaaagcctgctccttccccccgccccccctgctttccagtacacagcggactttggagtcaaatacaccagcatttagctcggcattgatttactttattctctaaggtcatttggggggacagggggtggagagatgacagtgtgggctttggctgctggtgctgtggggatgacaagcttgcttccccttctcattacacttggagggacacagttgtagaaaaggccatggtgatgctccaagcaggcccccagctcagagtgctgggcagtctccttgaccgagtgactgtggggaaactcctgatggactttttgtctttctctgccctgcatggtcatcttcctcacattcctggctgttttccacctagtgttggtggcttgcttcaacagtaaccaatgacgtcacagtgtggccagtatcaagccaggatgaggtcctctgatgtttcaggctcccgagaacagaatttgaaattgtttttcttcacctgcatctctgaacttcattagaaagacacaacttcattagagacagaagtaagtactttaatgacaaagaactatcttagaaaaaggacaataatgcaagtaaaatcaagtcacagaaaattcacaagctgataggacctcaaaaattaaaagtaaatttttaagaaaatctaatccatgaaacagtcaatgctctgaagttataattctatcctcagaggaggaatcaaatgccgccggctcctcctttctccacgagagggagcatggtattcacatgtcagcttttctcaagtgtttctgagctcctttgaaggatgagagctgggtgtggtggctgactttggaaatgccagcaagggggaaactgaaggagaagtcctgagttccaggccagtctggctctgaaaaccaaacagaatgaccaaagaacattaccgtcccttcatagttttccttagacagtttacatcattggaagcaatagccaaaagaaatgatccacatgtgagtcctatcgttaccaaactttgtaacacaagaatcaaaatccgagcaatggggctggtgagatggctcagtggttaagagcgccgactgctcttccgaaggtcccgagttcaaatcccagcaaccacatggtggcacacaaccatccctaacgaaatctgatgcccttttctggagtatctgaggacagctacagtgtacttacatatagtaaataaataagtcttttttaaaaatctgagcaatgaatttgtttggattttattcaaaaagaataacatatgtcgcaagcatctgtggattttaatccctctgctctcagattatgagatcctggaaatcacatagaagtgttgacactttcctgtcttagacttcagtagccagcggtcactttgcttggtgacattgggtgaagggcactgtgcgtggcggccctgcgtgaggagcaatgtttgctgttcactctggcttacttctctccgtcgcgtacttttctttgtactttgtaagcacacttgttcatagtgaaatctgtgaggcacctgctgagatgatgaggtgacgcagaagcagggcagtaatcctctcacagagcacggaaatcctctaaccccggagccccgggactgcctctgaagcaggagacactgggacccagggtccttcctcagactctcaggtaggagacacttgtgcctaaatgcagattactttgtcatcatgagagtaattgtggaaatgcctgttaagttgattatatagaaacggcaaagtgggtgtggtagcagaagcctgtatccaacactccgaaggctggagcaccaggaactggagcttgaagccagtcggggccacagaacgccaaagctagctctaggccagccggggccacagaacgccatagctagctctagaccagccggggccacagaatgatattctatctcaaaataaaaaataaaaaatagggaaggaaaaaagaaagggagagagagaagagtaagagataaaggagaataaaggcagcaggaggaagaaacgatgaggggcaggaaataaggaagacgtatggagtccagttttccagcttgtttgaaactcagcaatctacagaattcactctatggtttagattgaaggcactcacttcccaagtacccggaatcacatcagatctagacaataactttgaaacaaatagatgctcctccttagtataacatttcagtttgtacatgagcgtctattttcccataattcattgttatcatgtgtactatgcttaagattagcttgagtttgtcacatggacaggaatctaagtttggccaacttaccacatctgttttgacatccttttccttgaacatatggaccaaattttctgagagttgcccttcaccctgacctctgagctctctctgggctttcactctggttgcttggcccctctaatagaatggtttgtaatcccctagttaacacaaggaacacatgtgtttcaagttctgctctgttcaggagacagccactctgaggtttatcagaccaaggatttgctgtatataccacttatcttttggattcttttagctacttagttctccaaaggcttctctttccaccaagcccctttgtaagctttcttctcttacattccactgaagtgtgtgtgtgtatgtgtctgtctgtatggtgtgtgtctgtgtgtgtggtgtgtgtctgtgtgtgtggtatatgtccctgtgtgtgtttctatgtgtggagggggtgtctctgagtgtgtctgtgtgtctgtctgtatatgtgtctctctctctgtgtctctgtgtttgtctttgtgtctatgtgtgggggttgtgtctgtgtgggtgtctctgtgtgtgtgtgatgtatctctgtgtgtgtgtctctgtgtgtatatctgtgtgtgtgtggtgtgtgtctgtgtgtgtggagggagtgtctctgagtgtgtctgtgagtctgtctgtgtatatgtctctctgtgtgtctatgtgtggggtttgtgtctgagtgtgtctatgtggtgtgtgtgtgtgtgtgtgtgtacaagttttaataaacattagatatgccgggcgtggtggcacacgcctttaatcccagcactccggaggcagaggcaggaggatttctgagttcgaggccagcctggtctacaaagtgagttcgaggccagcctgagctatacagagaaaccctgtctcgaaaacccaaaaaaaaaaaaaaaaaaaaaaaaaaaaaaattagataatctgttttagtcacttgtggttcctgtagcaaattctattaaactgtttgagtcaaacagccaaaagttcaatcatgtaattctgaagaccagaaaactcaagtgcattattatcactataatttaaaataccagtctggtggctgtgttctcagtggggcctccatgggaagctggtctcttgcctcctcccacttccaatggcctctgtctgtattctttggctttgggttcagtagcccagcctctgttttcacatggccttcttggttctgtgaaactttccatctgtctctctttttttgtttgttttttgttttgttttgttttgtttttgtttttgttttttcaagacagggtttctctgtagccctggctgtcctgaaactcactttgtagatcaggctggcctcgaactcagaaatccacctgcctctgcctcccaagtgctgggattaaaggcatgtgccaccaccacgtctagctccatctctctcttaaagggagcctgtgataacctttaatgcagctcagaaaacccaagagtgattacctcatttaataacagcttattctcctgaaccctgtggagtgtatgtgtgtgtgcctgtctgtctgtgtctctgtttgttttgtggtgtgtgtgtgtgtggtgtgtgtctgtgtctgtgcctgtagtgaatgtcctgttgattaagtcttgatgtgtttatacagtacagtggctgctaaaccctgtgtgctctgtcccccaccataagcctgttgacatgcccctcaggtctcttcccctgagttgctgtcccctctgtgaccccgatttcaccacgtgtttcgttgttggactaattaacattgcagtgtttgcccaaatacttgacagaaacaacctaaggggggagaggtttagttgaatttcagttttcatccaccaagttgaagaagacgtggtgggcttagtgagggggagaacacggtggaggaaccagggcccaggaagttaccctcagtgacccacacaaagtgacctaattctccagccaaggtctgcctccattgcctccaaaaatagtgacaccagataaggaacagagtttaaaacatgagcctgtggagaggtttttgatcaagcttgtaacagctgcttactctcaaatcggaaaaccaaacaaaaattaatttttgttgtgaaatttccgagtgcagagagatccttccttaccttacagggactgtcaaacaggatttcagtaaccgcattcacaagctgctcatgtgccaagccaggtgacaaggactgaagtgtattacaattgcagaagtagagccactgtgctggggcatgtctataatcctggcactgggaaactgaggcaagacaatcatgacttggagtccacactggcccacaaagtgaaaccttgtttcaaaagtctgtaaaagaaccagtagccaagaactctgcagcatggcttcgggcatatggtgacgataaaagatccaaccttcaccgaaggccactgtgcaatgagtgccaaaacaaacacagttcagcctaaagttcgggttataagtggcctgacctgcacataactcgtgtctgtggtgagcccacacacacctacttctaaagtcccaggtaaggtaaatatgagcaagatatactataccactaagtgcctgagggctgagagaaggtgcgatggggctcagggcccaggacacaggcagatccaagcaactaccttaaggagtgcgtttctgttctcatgaggcttacatgatttctagttgctccaccaactcacacctgacattgtctactttgctgcttggagaggaatggcagctacagcaggaaaatggcagcttcagcaggaaagcagcaggaaagtcatggccttcattccaagctcctcgggacacggacgcttcctttcttccccggttccaaaatgtctacaattttttgtttgtcttgtttccatttttttccaagataaaattatctgtgtagtcttggaactggctctgtaaaccaggctaggcttgaactctgagatcgttatatgtgttaaagtcagttaagagcagtattgtttgtaaagggcagaaatcatgggtatggataggcataagatactctgctttcaggaagtgaaagttcattgtgagccaagcatgactgaccacagcctgtaaacatggatttaaatgacctgtgtggcatgtcccttcatggagaaggtaacacaaactccatatgcacaggacaggaagcaaggactgtgtgtgtgtggatgaatatgcaggtggctcatcacaagtgttcacattaaggcagaaaacctctgggattagaagtcctctctgtcaccttctacagggctggtgaaggctagatgagtcaagtttagggagacgacattgcatcaggtacacaggttagtagcaaatagctatttcaagtattgctattattctgcacaggtaacctaccagctgcatgcataaaagttgtctaagaaattctgtatatagtctaaataaaacacactgagaatagtattacaaactcattgtaaacacaaggaatgcttaagggagaaaacatggaaactttacacatcttctagtcactaaaatcacatatttaaatttttgtaaagttttcttcctaagtccaaccatttgtttatctttggaacataaaagagaaaaatggagccgggcgtggtggcgcacgcctttagtcccagcactcgtgaggcagaggcaggcggatttctgagttcaaggccagcctggtctacagagtgagttccaggacagccagggctatacagagaaaccctgtctcgaaaaaccaaaaaaaaaaaaaaaaaaagagagagagagagaaatgagtttgcttttgaaattgatacttgctctatttctgcctttccagtaagtaaaaagatcaagaggaaaacaaaaaaatcatgaggtctttgttggattccaggtgtggtggtagtgacctgtaatcctagtatgtaggaggcagaggcaggagaatcactatgtccatggcagcctgagcttataggaccttggaaaggtgttatttaaaacttccctggacttcagtgtcttcgtatacaacatacactagaacagtaaagatcgtacaaagttaaagtgcaaatttgagtcacagaggcgcttagtaattcttaataacactttcttttagtttatgacagttttctttgtgttagatgaattgtccttttcatttaattaattaatcaaaaaagaattgagacagtatcttcatgtagcctttctgttgtgcctcccaagtgctgggatgtttgtttcaccaccctcgactcccattaagttcggagctcctcaaggcaattgccacggttcccctgggtctagcgttgcacgtggtagatacttaagaaggatctgtaggggtttttcttctgcgctcagagttgctcccccgagagtgcatgcacgcgcgcgcacacacactcacacacacactttcattgacactccataactttagtttgggtattgttatgaattgtaaagcaaatatatgatatgcaggatatctggtatgtgaccccaaaaggcatcacgcccagcaggttgagaactgttgatttaaggggtttgtcagtttcctctttaaggacctctatcaccttcgtatagctgggtttaaggtcttctttcttgggcttcagctatgttgaaggtcctgcttcaggtagactatctgggctccggtgacatattgctttgttattaacttgtgctcttaagctggtgtctagccatttggcttaggggtgattatgtgtctaggggctaatggctgggtttgtctttgttgggtggctttttgttccttggttcctgtttcctctctggattttcagagggcatgatggctgcgtgttgcctgttttactgactgcttagctggtgtgatcacaagcaattcctgctgatgttggaggcagggatgcagccatgagtgggtgaggccagccagaagggatccacaggacacatgggcaatggggaagggaggctgcggctgatgttctgttgcagcaagcaggaggatcctgagggattgtggaggcatttctttttattgaggttttctcttctcagatgactttagcttgtgtcaagctgacataaaactatccagcacaggactagttactattttcatcactgtgacagaacagctgactgaaacaacttaagggaagaaagactgatttttgtctcgtggcttagaggatacagcccagcatggaggagaaggattgcctggtagtgactttttaacaagtgtattacagctttcctcttacctaagtagcttccaaataattgagactggactgtgttatttacttaacaagtttaaagcacaatgctgagcagttacttctctatcctagtcttctaaaccaatctggccacttcccagtcaaaattcctgagatatttgcattttatgtctttctggagcagttttctcaaggtatctcctggcttctctctggggcggaatcccctactttctctctctcccacccactcccctggctggcaggaagtccatcactattctctcctctgctcagacattggctgttaagctctctttactgacacatcagggaccaaatcgggatctggtgttcacacaagattgagagaaaagattctctgaataaggattgcaaccagatacaggggagagaggaaccagcatttgaatcatcatgcagtgcacacgagcattatgttacacaggcctgtgtgagttgcctgtgcctagccccagcagaggggatgtggaatgactggttactttggattgacagacagtgagcagagggcttggagcaagccctggctctatggcagaatgcctgccagcacagtcccatgtacaaaggttccttcccacacacatgagcctgtgaggacatgaccctgaaaccaaaccgctgcaaaatgcttgttgttacaagattaccctttgtgccagtgatacagcttagaggcagaacactcccttagcatgtctccagaacccaaagcaaaaagagtgagctttgcttagtctgatggctccaaatctaattagaaatcataatcactgaatcatatttgggtataacatgaataaatttcccattggactattgatgaatttagtaaaaataaataatgagagcgaaaggcatctctgatatgagcccttagttgcaacatcccggactgcgattatgatttgacaaaatttaaaaataattagactaagaactaaacccaaaatgtggtgaccactcccagtcccttctccatctcagaggaaatatcaactttatcttccaaagacttctgaaagaatgtgtgtgaacagcaaagatactgaagtggctaacggacaagaacacatgcagaatccatgcagtcaaatcaaaattacacgttactatatgcgatcatgtctcaaagaagcaaaatcaaaccaaacagcaccagattaagtgacctcaacaatcccagtacttgggagacagacatacgggaatcacgagttgatggccagcctgggctacatacagagaccttgactcaatcaacacaaagcaaaattgggcaaatatttagcatcacgtagagatttttttctcccaaaatcaaaacagtgagcagatttttgaaaatccattatgtcagacttgggaattgttaggcgataacaggaagttatcaatactattgtcaatagtcttgggaattgttgggagagagcagggagtaaactttaagtcagggtccttctataaagcctagtacaagttacgcacactgccttgggtttgttaggagtttcatagaatacaaagcaatacttgaagtgaccttgaggttttgctggtatttgcagggagcagagcagcatttagaagagcagagctttggcaccaagcttagcatctgtacatttccagctgtgtgacttttcctctttgaaactaagttgctccaaaaatagggtaggctctttgaagacagtttgtaatggtaaattcaaagactagaactgcccagagagaatctggatagttctgagaggaacaatgggctgtgattttttttttttttaatcaagggctaaaagaacccatctagtttccagaagtctttgcagtaagcattggtggtccactcccgtaagcccagtagctggaaggtggcgacagggggagcaggagttcaagcttatctctgagaggtcagagagttcttgaccctcctgggacacacacaactgcctgccggtaaagaccagatctcccaaatcaagaaaatcccaagggaactcagccttcggagtgagctggtcaggaaaaagcctgcctggttcctcccgccttgctctgcccatacacagatagatggcagcaccattttagtttccttcacaaccaagaagaaatgaaggcccgaactgcccagtcacctgctctctccagaacatggcagagtcacatggctcctactgtgggtgccagctcctgtgcctccaggcttaaagccgaattaacctcaccacttttgaatctggctgcactacagagcctcaccataaaccacagggtgaaaaacctgcttgacaaccatctcaaagctacgcaaagcctctttttaataaatcagcattttaaataccagtacactttagaatctaatctacagtgagtgccaggagagggaaagattcgcttccctttttgtcagtagctctgccaaaactcaagcctaggctagtgcggagctctgatccactttcagagaaagttcagaaagagaaataatcactctgctttagagcttgggaattcagaacaattatgatttgccaaagacaaataatgaaaatagatcggaacttgggaggaaaaaagaaaatctgtcaaactctactaaactttgtggcttgcaatgtctgctgaaagataacagtgttctcagaaaagacagaggttgaggtgaacagccccctgtgatgacgtgtgtgaccatcccctttgccattgtgacccagtgtcactgcaaaggagtttggcttcaccaggccatgtagatggcctggggagttactgttgcaggggacttgttggggtttaacatggactgggatgtcacagtgtcctgctcttggagcccccatgcccttcccagctggggctcctgtggaaactgacctagttgaaatctgagtttctgtaagatggagagaatggttctttgttacattgttgaggctaacccagacaatgaccttgaagcccaggacagggcctcctgtgcagctccaggggtgcaaggaacagataggagtgggaggcagggacaatttggacttgattttttttttttctcaaaatgagaaattgagtcactcaaatggagaaaaaaaatcgactgcggtttggctaggatgagagtggcgggatgaagagatgaacgagcacactatttcccatacactagtgtctgagccttgcattccaacaaccgtcggaactctgcaggactccactgtgctcctcagttattgttgggccatatagcaatgaaattcttcctcctgctgtggcgtttaggagaacccttctccttttcccgtccagggagcaggaacggtggtctcacggggcatcggggactctcaggaaccccgcagccggcgctgtctaagaggatgaactctgagagcaggaaggacttctctgggtcagctcaagtagggctggttaaggccccgccacccacagccactgtacgcagaaatcaaggttcctggcaaaaggagaggagcctcatgggatcatgtgacagagtctgtcctgtcatgttcccctagcctccatccaacccatcctcctagcatcttggctgaaggacagaggcagggcctagatctataagaaaactgagtttggccatgtcaggaaacctgggcacaaaccagcaaatgaacccataaacttgcttcccagggaagaattgctaagtgtcccaagagatatctaataaaactaactttgtttagtttcaatttgtagtatttttttacatggtgggcatgtaaattcaactctgtgtactgaagtagtaaaaactttgcattcctaaagaatccaaagtgcgctcttccagaggcaaaacgtttgggcttgccttttaattccatttatttcagtagaaataaaacatgactagttactgaatatatgtattatatcaacccacttagaaaaagtgtttttaaaatttgttattggcagagggactttgaaacttgaaaaaatgccccccacttgcttccatataaaacaataccaaattactctattacagtattatttcttatgtaaatcgtattacaatatgtaaaaataaagcatggttttaaaaattaattaaaaatatttggggccagaggaggatggaatttgaggtaagaacacaaaagagaatgttaaaggcacaagctatatttgctggcttgtctgctaaggtggaggaagcttcttacatagtaggggttttgttgagtggatggtacaagtttccagccaatgaaatcaccaggacaacagaatcatccttgtactatccaggttcttccatttggaagcgcttttctagctcacacgccccagctacctcagccttgtgatcgctgaggctgtggctaacttgactcagagcaggtacatggcacagggcagctagaggggagagagagaaggcaggcccagcttagagtggaacacacacacacacacacacacacacacacacacacacacacaccaatggcacttcccagagtggcaaacagcacagactcccaagttatcatagcgggaactggcagaactctgaccctaatttctctctaaggtgtgtacaagactccctctgacttatatttctccagtgtgtgagagggttgtgtcctcctgtactttatggcttgggttttgttttaacccaacccccacactctcttctgggaagactctagcatttcccctcgtttcagaacccaagacaccatagaaaggagcctgccatggaaaccaattctccattagccaagaataaaaatgcctgtgcaattcttgtgtccatttggcccagagggaaacttgtgcaacctcatccttctgtgctcccatagctcctgacctaactggcttctcagactccccttaccaatgtgctcctcctgcccatggaggcccaaggccacggggtgcccagggtattcatctgctcgagcctactcaggatttaaagaccaagttaaataattctaggacataactttttacttataataagtgcttcattttctatcttcctgctgattaagaaaaagacttcctatagaaaacaaaatgaaaagctatgatcttatcttttaattagcatatccaaccaagaagagacagaaaccggtggtttaaagcttcctcctgagagcagagcggtaacccgtccttacagcagcactgtactccgtgccttgacttctgtctgcggagctgtttagttcaaatcaagaggaggagacttgtgagaataaccaagagaagaggaagcccagtgatgagaaggaggtttgagtcttaatttccttccatctgggaaaccaaacaagagcccaaatacttgaagtataaacattagctgtcttgaaacatttgcaagacagctagtggtatcttgtccacctcagaaggcacaacaatgtccaataaagggagagtttaaaaaaagatatcagaacacagaatctcctaaacagaagaggcgattaagagaggagtgagttccctatgctcgaagtcctataatcaataaagactgattgcatatataaattagaggcagtatttttagtatagagatattcaagtgaagttgagaaaaggctcaatagccagtggctgagatgttttccggaatctttggctctgaagaggaaagttctattttttcccttggatttttttttaattctaagaatttatgttttttattaattataactcttctggaaaattaagactatttatttcctcttggctttatgagagaaggtgtcactgtgtagcccaaggtggctttgagtacaagatcctcctgccttagtcctccaagtattggggctacaggagggtctcagtcacacctagctttaatcagatactttaaagctaaatttccttttcaaacatctgagcttttgcttcactttctgcatatctgttcactaacctattttaattaaacactaggttgtttggttatttatttattacttcttttgaggctggctctttctctgtagcctaggatgacctggcactggttatgtggctccggctaacttctcactcacagcacccttcctacctcagcttcccagatgagatgacaggtgtgactagccacctgacagtcaggcatgacagtctactgcataaccatgcatttaattacatgtttctcataccttcgttcagctcactggcagagagggcatagagaacaagaaagccacaaagcatttctgctgctttccattcaacacgagtcagttctcatgaaagaggaaggagaattgttaactgcagtgctaaatatacattcaaatgagcatgtgccagtgctcccctcttattgcaactatttccacaactcaaaacttacgttagtgggaactaaaaggggaaggggaaagaggggggagggaggatagcccacatccagccagagttcctcctatgctctgggcaggcagatgcaggagagctgccagacactttccactcagccccgggtgggcatctaagtcactgaccccactcaacagggggtggacaaatggcagccccctaccagggccctgggacaacaccctgaagctctggggttatgagacagaggttcccacacaggagagagtctgcacagcgggacttgaatccagagatagtctatagttttagagctttattgtagaaagtcagggggaagagaaaaggtaagagagagaaagagagagagagagagagagagagagagagagagagagagagagagactagccatggccaagaggagagaagggggaaaaaagcacagagagagaagaaaggctagaaagtgagagggagagggagaggagaggagaggagaggggaggggaggggaggagaggagagggaggagcaaggaaggcaggctcatagatttgaatgcttagtcgccagggagtggcacttttcaaaaggattaagcattgcaggaaatgtgtcactggaagtgttttgaagtttcaaatgatgaagccaggcccagtctctcttcctgctgcctgcagatcagagtgcagaactctcagctccttccatcatgactgcctggatgcccacatgctccctaccatgatgagaatggactgaacctctgaaactgtaagccagccccaactacatgtttttctttataagagttgccctggtcatgatatctgttcacagcgataggacactgactaagacagaaacaaagctttaaaaggtttttttgtttgtttgtttgtttttttaaggacaaatggggttgttggtgtagcannnnnnnnnnnnnnnnnnnnggggagtaagagcaagagagcaagaggagtgagagagtgaggaggggccaaacagcccctcttatagtgggctgctttatcttactgttgctaggtaactggggaggagtttagcttgaagatcagaagcttgggacattgcttatgtgactgttagccatgcttctcctgtgggagctgtgggggctgtgggggctgtgggggctgtggggtctgtaactttgacaggagccagaattccaggagacatgagagaactccttctgtcccacgtaggtgaattatcaccacagggtccaggggttccacctcagctggactggagaccagattgtctttgcctagcccaatgccccatcttacgttatttaaaaacaaacaaacaaaaaaacaaataagcaaacaaacaaacctaagaccatcatctggctcattgctctatttttaatttttctcattgttttatttttttaaattctattaaaatgtgactcaaagatgaaggagatagctcagttgtaaaagtgcttgtgggtagtcatgaggacctgattcaatccttagaactcacattaaaaagttgggtgtgctgacatatagttgtaatcctggcatttggagggtggagaaaaatcctagtctacttggcaagctagtccaaagaaagagcttgtctgcaaaaccaaagtagaccatgcttgaaaaatggcacgcataattgtttggtctccacatgtatactaaatacactgttatggctagtcctgtgtcaacttgatacaaactagagtattctgaaaagaggaaattgtaactgaaaaaatgcctccataatttccaaggacattttctgaattagtgattgacgggggagggcccaacccattgtggtggtgcagtcccgggctggtggttgtagtggtgggtatttcatccacattgagctccgggcaggtctcgaagttctgcactcgcccaggagctctggcttcatgaatgaaacacacacgcatatgcacacgcacagtgatatttttaatatgccttactagctcaacggctgggcatttccacacctccctgcggctagcacacactcccctccagtattcctgagttaacactttctaaatctgcatttttatctttgctgccctgctgctttctgggcagccttcccgtggggtggggccacgttttctttctacctgcatttcagccacttagcctgttccttcacagcatggtcagttctacccccctctcgtgacagaattccttcttcccaccccaacccccaccccaagtttcttgcctggaaattctaaaagttctgcctctttcactctgcccagccactggacattgctctttattgattaatcaaaaatcagttggggacacggaccctcagcatctgcacatgaaaattcccatgtcatttgaggaggtaaattaagataaagttttacaaccagtgccctggttttgggttctataagaaagagcactgagcacgctagtaagcagcacctttccatggcctctgcatcagctcctgcctccaggccaggttcctgttaagttcctgccctgatttcctttgatgaagtgcaagactaataaaacttctctccagcttccttattggccatagtgtctcatcgcagcaatagaaaccctaactaagacacatagacagatgtctaactaagacacaaaatacagaaaaaaattcttttaaggtaaagagtaatagaagagccacattttaactatagaatatgatgttgctctagttggtactaattggcagtatcaagtgtgataacacatgtgtgtgacccaagcactttggagagcagagcacaagggacaagggtcatgaatgtgaggtcagactgagtnnnnnnnnnnnnnnnnnnnnnnnnnnnnnnnnnnnnnnnnnnnnnnnnnnnnnnnnnnnnnnnnnnnnnnnnnnnnnnnnnnnnnnnnnnnnnnnnnnnnnnnnnnnnnnnnnnnnnnnnnnnnnnnnnnnnnnnnnnnnnnnnnnnnnnnnnnnnnnnnnnnnnnnnnnnnnnnnnnnnnnnnnnnnnnnnnnnnnnnnnnnnnnnnnnnnnnnnnnnnnnnnnnnnnnnnnnnnnnnnnnnnnnnnnnnnnnnnnnnnnnnnnnnnnnnnnnnnnnnnnnnnnnnnnnnnnnnnnnnnnnnnnnnnnnnnnnnnnnnnnnnnnnnnnnnnnnnnnnnnnnnnnnnnnnnnnnnnnnnnnnnnnnnnnnnnnnnnnnnnnnnnnnnnnnnnnnnnnnnnnnnnnnnnnnnnnnnnnnnnnnnnnnnnnnnnnnnnnnnnnnnnnnnnnnnnnnnnnnnnnnnnnnnnnnnnnnnnnnnnnnnnnnnnnnnnnnnnnnnnnnnnnnnnnnnnnnnnnnnnnnnnnnnnnnnnnnnnnnnnnnnnnnnnnnnnnnnnnnnnnnnnnnnnntctcccccctccctccctccctctctctctctctctctctctctctcctttatttatctaactattccataagatacctaaaagaagtggctatctaattaatctactctgtgccaggcagtacttgaggcatttatgacaccagggaacaaaatagagtagaaaactcgactgtgctttgtggggtctgactgtagcactagaagccacctggttcacttttctttattgtcaagaccctacttccaatatcatttacttttaactcttccagcaagctaacaagtgtcttccttctcctctgactcgtctgctctgtccagtcgtcccagtaagtgcgttgaggtacaagtctgcagtttaagtctctcccacagcccccctgtgccagaggagtgcatgaactctctaaggcacgcctgtgtgctggccttctcatcctcctgatgacctcttataacacttcccagcttactgaaattcttccaactgccctgagggagctggctcactctctcacctggaactgtgatagtcactttctgattggaatatgcttgcctcattctctgaatagctattgaaatgtcatgttcttgtggaagccttttataaatcccagagattgggcaagggccactgtgttgaccatctctggcatcatgagccagacttcatctagcctttgacacacattactctgatggtgcatttgcctatctgagctttaaatcgaattacaaaagtgctgtgagggggacctgatggccttgttttctgctgtatcatgctctataaaggaaggtacaggaacatgcatacatgggaaaaatgaatgcttggagggacactatccacatgccactgtggaaataggagctacaaagatagtgagaggaaatgcccttttccctctttcttaacaaattaaaaataattatggaactaaagaataaaaatttagttgcatattgtgtttttacctatgcatttcctaggacgtgcatgataaattaatttccttttcattttggaaggagaaaccaacctttcagtagcctttaaatgtttaaattactttttttttttttggtgtgttcatgaaggtatttatgtatacatgcaggtgcacacccatgcacatagaggtcagaggacaacttgtaggagtaacttttctcctttcacataaaggttcctagaattgaactctggtcagtcaggcttggtggcaagtgcctttatctactgacctatcttgctaggcttcttagcaatgttttatcttaagtttccgattcccaaatattggttattcccaagagaacagctagaaaacacactgagtgttatgaagtggattatcttcctcagcactcacaggttgaattcctatgcccaggccgcaaagcgtgatggcattcagaggcaaggccagaataggtaaaggatgctcaacgaggccgttctgtgcacctcaatgacagtatccctataagaggaggaggaggatgccggggatataccgcctggccatgcaagccaagaccatgcaaatttgtctcagaacgtttggcctccagaactgtgagaaagaaatgtcattttgttctttaagctagccaatgtacggagatttgttacataactttagcaaactaatatctaaaatcaaaataggtcagtttatagcttgtaattctccaaactgaactatgggatggggtactggtgcattttgccatgggtgtccttccctgtggcgggtgttagggagtacttgccctgctggttctgagtatgtgttagaaaactgtacttagactcaggtgaatgcacagatgcatcctgagccttccacagggacgacacgtagacttagttattgatcatctctgtgttgccacatgggtcccaggatcttagcaactcacaaggtttttcaggtttccagtgtgtaaatcccccaggcttacagcccaggaataattgtgactcatccttttcttctttaccacctacataattaatagagaatgacaagttcctgtagatgcttatttcaacatgcctctttcacccatgcgtcccttgtttcttttgcagggtcatctgttttgggcttctaagcttcaggtcagccatttcgaaactccccagtcctctgcacctgtgtgtgtgcttctgtcttccccttccagcgtcttccaagaagcagtgcttcacaaagcactcctttcagctccttgctgaggagcctggtgctttcccgcatttagaaattaaaacactcttcacctgcaacatttcctagacccgggaggacagcagattgtcctgtgtgagtgggtagatgacaccagagctgattaagataatgaatggctctctctgtatcaatccagaatgtttccccaggacttacactacgtcttctaaattccatctggccagcttcctccctgtttcttaaaccttctgctcactgccaactccacaccagtttcctcatactctttctccatccccattcctctggacagcccctcccttcttcactttctctctaaggcactgaagcctggatgcttgccacagcccagcctgacctttgtccccagtcagcttttcaggcccccacgctcctgtctctcagatcagctctgtggcttatataattagaagtgctcattttttcagtgaaggacctttgtgcatgtgcatatgtgttcctaaggttgtggccttttcctttgtatttcatgagatgatgctgactttgggatttttttggccatctcattgaagattatgcaccttgatgggtcacaactgaagcttattaagcttgaatttagagaaaatcttaagctttcagcattacagtcccaaattcatactcacttttgttctttgcttgttggggtaaacatgctcccgctgcaaccccagactgagctggaagattcaggtcctccccaccccagccccaagatttaattatacatcccaaaatctccccctccatacatttcaaaaagttataatccttgaaatatgcctaaccagtcacagtaaataacgcgtgcatggtgtagagggtctcagatccagagaaagctgagaccactcttggcagaatccaacttgcaaagtgtacatccttcacaaaagcaggcaatggaattccacacatcaaagctatgggtaaggggcagatgtgaaaccagagtagtctttcccaaatcacacctgcctgatgtccttagtcatcgatgcccatgaaaatcaccagggtgtttcaaacctcaagtgaaccagactcttttggaatgggacgtagcatcagtgtttatgctctctgctgatgccgatgggagcctccactgtagccattaaggcaaactcatggcgtagccagacaccacagcgactctgtggcagatcccacagaaagggattatagtccgttcacaatcactaagcagtgagaccacacaatcgaaaatcagcccctcttgggggatggaaatgggagacagtttgtgaagcagctcggggagagaatcacaatattcctaatgttggctgagactgatggagtaattgcatgattttctgaaagtggagtaaaggtacctgtgtttggtgcctgcctggagtctaagattgtgtgagctttccctgtcctttctgtgtgtctctttccttcactgtccaggctgaagttagatatggtgtggatttgtgtggttcttgtctctttgctataagtctcctataggagtgtacacagtctgatatcacttatatcttgcccttaagcacatctgaaattcaaatgtgctgttaagtagaaaagaagaggtagggaggaggttggagggaaagagggctctgaaacattcatttcacattgaatatctcctatctgtaagattctccacttattgctcagccacaaatggtatatctatatcatcctgtctctccagtgctgaggagaccatctcagaagaaggggtggaaagattgtagaagccagagttgaaggagggctggactggtcttctagacatggcaagaccactctattcataaacccatagcagctggtgctcttgcataagacctgcacgagatcaacccagtcaacattctagcatggagtaggaaggaattcaagagccctcatgccaaagtgaagagctatgaacactttgtggtttctgagagacagggagtctgttttctttgagaatgtggctcctactcagttgaccatgctcaggtagatggccctgcacccagagtatatgggcagcacaaatgggtggtgataggttatccattaaaacaaaaagacacaaagttagggaaggtatgagggggtggagttaaggagaagacagggggcgagtatgattaaaatagatcatatgaaattcttgaaaaattaatacaaatattagattaaatctatactcatgaagattcgactcctatgaagtttctagaaatttgcaataatgcagaagacttgcaatgtgccagtcaggccaatgctgaccatcagaagttggctcagtaatttctggaccatctccccctttagccccctttcactgttggagtatttcacaaattatgagaacaagggtctatcttatgctcaccattgcattccaagcatcccccagagcgtgggacgtaggagggtagggaatccgcactgactgaatgactggatgactgaagtggatctcacaggaggaagagcgtgtggaagaaaaccgacagatgcaggcaagttaaaaaggcaagctggacactttgaagacaggcacaatttgctaccagcaggagggccacaaagcagagcaataaacatacatccctgaaaaaccacttttgaaacaaatctgtggctagcagtttctccttctactggtaacatctgagcaattgctcatccagtctcagctatgagcagtctttgaaaaccaacttaaggctgtacgttgtaactgtagtccctattcctcctcccctcttctaagtcttttttataaatagaatctctagtatacactcttactgccttaggctcctgtgttgggattgcaggaatctatcgttatgctcagcttcttgctgtttttgttttaaccattatttattgttattattattattattaaataccactactatttgttattattttatttatataacttcatcttattaagctttggattaacatacaaagtaatgagtttcattgtggtattttcacatacacttgcacacttgcacactcacacacgcactacaaactcatcacagtttatttttatttcttccctctttctcactggcttctcccagggtccccttcagtcccccagacattttccctctgctttcctatcatagctcttctattaccctttctctgcttcccttctgctttacagaattacttatttagtgttttcatctgtataagtatgtgcctgggaggctatgaaaccgtgtgcgtttcaggagtccatggagggagaagtgggattacaagcagttgtgagcccctgctatgctgtagatgctgggaaccaagccttggtcctctgagagagcattgagagctctcagccactgaagcttccgtccagccccgccctgctgttttaatccttaagtctaaaatcctggacaattttttatggttatttcatcagaagacagatccagagtctaacatgatctcagaacatgcaggtgccttcacgaggacccagagccccattactcagcactatattccaccttttctttgtcttcaaacttggataatttgttggatcttgttgtaacaatgaggtaaccacgcttaggcacacttccaattccaactagttacatgttcctcaatagctgcttctcagggtaggggatatcagcttaaagggaaaaggaccataggagagctcccagcatacactactgctgctgcttcctcttcctctccctcttcttcttcctcctcctcccctccccctcctttttgtggagagtgtccaagggtaagcttttcggtttatctgaaaacatctacagtttccagtaggtaaagactaagttctttagccatcccatcaggtcttccttcagtgtatttggccatcttcctagcatttctttctgtgtattttagattttagacttttctatattagggagaagagttcatttacacaattatgaatgtataagactaaaatttgtagcattatatcagcaagctggaaacacaaaacaaactgaaaaacaaacaaacaaataaaaccaaaacaaaaaccaaataagatcaaaccaaaccaaacaaacaaccaaacaaaaaataccagcagcagcaacaataacaacaacaatggaacctgcctctgagatcagaaggctgactgatggccagaattcctccttgcttggtggaggaaatcagtgttagtcctttgctccatcaagtgattagatgaggtcagtaaaagtaatctgatttatgcaaagtctgttcatttcattgttgatgtcaccaaagagaacttttattctttctaacgctcgctcacacagtgaaggaaagctcttgggtagagtgtaatttcgtgagaggaactattcctgtgtgctccatggggtgacctgtgtgctccatgggatgacctgtgtgctccatgggatgacctgtgtgctccatggggatgacctgactgtgaatcttctaagagaaattcccgtgctcaggctttgctctcagtctgattttgttgccatggtgaataatggtcactcatgtttgaaaaggctttcaggcgattctagcatgttctctgccaggcctgcagattgtgttcacagagaaagaaaggaaaggaaagctcttttcttctttttgtgccgtggtgtatcccagatattgagcgacactggacctgcagacaacccacacgtatctgagtacatccaccatttctctactttgtgcactatggattcttggaaggctcacttccttcactaatctcactcttccagacttataaaatggggataatactaaacctattaatggaggtagttttgaatgatataagaaatgggggaaaacacacactagatgctcataaaagtaaaaaccttctcattccaaactttggcttcagtcagttgcacaagactcaaagcatgtctgaaacatgtctccagtgaatccaggatttatggacaattaaccaatggacacaggagtgagtgagcacaaggggtaaagcctgacagtttctgtcttaaccacagcttttggggtctactattgcactctggggcacaggtaaaacagtaactgtaaattgcaggaagtgttgcaatcaggtttcttaaaatgtttctgccagaacctgctgaattaaacaagaacagtggcctctcttgttaaagagaacacatagtaattaagacgctggaatgagtcagatgaactagcttggttgaagccttgcttgcaagagcatgcttgatttttcactgacatcagggacactgaattcagtgtgtaaggcaggagctaaatgggaggagggagaaagagacatacaaatagtcctttcgtttaactatggagtgtgatatctatatttgtctatggagtgcatgtgttacacacacactttggtaacatgctctgtcacacttgtgatgttaaagaaaacctgatccacatgacaggacccttagcaagtgaaacgttacttctaatgctacattattgctaatattcaattttagttttcttctgccttgataagaaacctggaagtccctgattaccctctttttattcttcctcattgtatgcagaaaacaaacacaaaggaacaagtgagtttctccaacgagcactcatacatctgtttgaacaagcaatcccccagagggaaaatgctgtactctgtggtcttgcttcaaaggaagccttggtgttctgtgactcaaggagggcaagtggaggcaggcagctgtccaatccagaggagttcagtcaacatggaggaggtggggacatccatcacagagagcaggggacgggaggctctgggcttgccatttctcagaggtgtcagctgaatgaaaagtgatgtcaggaactctggaggcacagctgataacatgctggatcgtaggccttactgtagacatggcctagacctgccaggtgagctgggtgctgtgagaattggtgtctggattattttgacatcgtcttacaacctgtgtactacatacattctttgcattcattggaagagtttttcccactcctgggatccgtgtccgcagacagtcccagctcattcccaccccaatgcagttttcaaactgaggtcattacagacccaaatgacttcttccaaagtgtgagacggggaatgcagaaaaacctgattttacacattttttccccatgcctgagaaggataatctagggcatatgccatgtgttgtggtagcatctgggtttctgcttttggtattttaaatttcattttattttagaggcagggtcttgccttatagacacagggtctttacataatatgttctggtctgtgcctcttgttcccctttgcctctgctttctgaggactgaaatgacaggcacaaatcaccacaacctgttgggacatcttgtagtcaacctatttcctcaaagaaatgtgaggcttggatttatctgtagagtgttatgtgttcagaggtgttcagagctgaagtcacaggctggggagtgggaagatggcctgttccttttgaacatcatctctgtaccactcccggttcattctcccaagttcacagggaggggacatctttgcttccttcttcttctagaacttgttcccttgtctcacatattgttcatacacaaaccctcccctgctctaccaacctccattctgacagctctccctgtgtccggtccctgttttaaatggacccctgcttctgcctcccctacagcaaattcagtttgaaagttgctttggaggtggtcagaatgaaaaggagctgggtatgcacagagcacaggtgtgggcgctagaacatctgcatagcagcccaatcctccgtccatggtgacccagcacaggtgtgggcactagaacatctgcatagcagtcccagtcctccgttcacggtgacccagcacaggtgtgggcactagaacatctgcatagcagccccagtcctccgttcatggtgacccagcacaggtgtgggcactagaacatctgcatagcagcccagtcctccgttcactgtgacccagcacaggtgtggatgctagaacaactgcatagcagcccagtcctccattcatggtgacccagcctcaattcctagaggcttaagtgagttcttcagtctgacagcactgaacaacagtattttccaacagatctctattttctagctgtgagtatgtgaacatttgagctctcccttgcatggtttctggcggctgaactagtatctcctcaccacaatcacctgaaaaaacaaagctcgcccttccagtgagcagctcccacctactgcagaagccgacacagcaatcttctatttccatcccccaaagcaactatgaggagtgccatatagcttagcattgactattctgtggttccttggagaaacgatccatttcttttcctttttgtttctaaattccaatacagtatatgatcaaacttcaatgaatttgactgatttcattttaaatatgaaacaatattgttatgccttatgacagttggactcataatttatggttctggattccacctctcccctggggtgtctgaatgccaccattacactagctcagaggggactagaatgtgtgaggtccatggtccagattctgattctccctggggaaagtcagttgctgccgcacaggtggcgagtgcgtgcgtgcgtgcatgcgtgcgtgcagtggagtcctcgacaaaggactcaggtccagctgggaatgccgaaatagtattatggctcttagaaaaggactaaagaggttcccgtgctggggtccctggacaagcctttgtgagctatgggggtctggtcaggcacgtgggtccaaatatccaatgatgagtgctttgggggagagactttccccaagtgttgcagctcagaacacagaccgtctcagatgatccttggtgacacagcttgtgctctttattccacgtgaccagggactctatgagaccagggagtgagatggaacttgggggtgaatgcattctattggctgaggctaagatgctggtgctgctctatttacttggggaagaagtccacatgctgggttacatgactaaggccgtgaccacctggtgaaactctacccctgggcccccaaataaataaaaggaacatcaagtgaaacaattaattagacctttaatttttacattttatagtactgtagacaaaaactaaagaggctagtgttcaggaagataaataaatacagattttcatttagtcattatcacttgaccagagtacattacagctgtggaaagtgagaagtcaaatctagagtttagtcacatatgaaatttgtacaatattttccttgttaggtgaggtctccttatgtagtgcaagatgttctagaattccttatgcagctcaggatggcttaggattccttatgtagttctagctggcctggaaatctttgtatagcccaggctagtctggcctggaaatccttgtatagcccaggctagtctggaacttacgattttcctgctttagtcttctgaatggtgtgattacaggtatatgtcactatgcctggctaacaaatattctgtgagtacctgcagcctgccagatgtgaatcacgatttctgtgacacgtcatttcatagagtctatgctcttgtgtggaatagggaggtgcctattagtcagtcagcaaaccttagtattgtgtgccaagaacataaaatcatctgatggttttgaaagtgactatgggtggggtatggactacttatgtgtaattcctgagcttcctgatggggaaagcatcctaggcaggctggctggcccttccaaggtctgtgaagcttcagacaggatgagtgtagtaagagcaggggacaggagtctgtgcaaacctgcgtggcaaggctatgagacttccaaaggcctttctcaagatgttttgagcgctctgcaatattagatgaatatatttgcaaggttagataacacattctaaacttgcaaacacaatggtcaacattcctacagcggggtagaagttaaactaatgctgtgtttactgtaattgtaattttacaagtaaacaaaccagttttagaagcaccacttttatttattatccatcttttctacttattatttgacagtttcatagctatatttaaagcattttgctcatttgccccatgaccttctcttactaccctctttccactcttaacaaatccttctcctcctttcatgacttttttaaaacaaaaattaccctctgaatttaattagggttgcttccttgagtgtggggttatttactgaaaactgggcaaattatcagttgagtgggcctcattactgaaatctacccgctccttgccaacagtaaccattaatagctcctcaactagaggcgaggcctcatgagtcccgccccacatctctttggaaaccttgtgcaagacttcttcagctgagcccaggtactgggggtccctgggtgtaacagccatattgtgtcagaatgcagcacttgcctccattcctcccgtctcccagctcctacatctttcttcttctcttctgtgatcttttctgagctttgtgtgcaatgtagacgttctctttaggagtgagcggtaggctgtcatagtcttcaccctttggctgactatgcattgactgaagtgactgtacaaagaagcttgtctgaccagggctgagagcagcagtaatgtacggatacaagcatcagtatttaaaacgcagtttgacaacatagttgctcagcagaacagcagtgaaagctcctcccctagagcctctgacctcctgagccctgagcttttttttgacctgttttacagcaccaggcatgggtgtgctgtgtgccgggcctcacgacctgtcagaaagtgcagtgttgtcagaagtgcagcgtcaccctcacaacagtcttgccgatgagcgagtcgtgcttgcctggtctgtgctgtagcacgcagttcactgatgacgtttctcatctggtggcctagccagctagccagcaaggaggaagcttccagtgtgctccactttgctttatgttctgtaataaaactgcatggtcgttttagtaatacggtcttacctaaaatgatcaccatagcttgtgctgtttagcagcattcgggggcctcctattcatgaagaaatatcccacatcaggaccagggattttggctttataacctatgatttctgtgagcaccatcataaaccaatgcagggtacctcagttcaatctctctctctctctctctctctctctctctctctctctccctccctctctctctctctctctcagatttatttatttatttatttatttatttatttatttaatgtaagtgagtacactgtagctagctgtctttcagacacaccagaagacagcatcggattccattacagatggttgtgagccaccatgtgcgttgctaggaactgaactcacgatttctggaagagcagtcagtgctcttaaccactgagccatctctccagccctcaatctcctttttgtttgtttgtttgtttaaaaaaaaaacaaaatgaaaaaccaaactaacttgccaaatactgagttcgcatatgctagtttgtccattctcagttttgcctaactacccggtatccccatcgagagcctccatctcccctaaggccctcatcccacttagacctttccattccctgtatccctccctccgttacatgtgttctaatatactctctacgcttcttaaggcttcttctccttccccctttaggggtctttgttttagcttcctagtctctataagacatgtcaaattaaacacaaaaacttaaaaacttgaaattaggatccacctgtgagagagactgtggttctcgtgtttctgtgcgggggttacgtcactcaatagagcagttttcagtttcatctacttccctgcaaatttcataattttattttttatagatgaaagtatctctgtcttgcatttgaaccactttttcattatccattcattagctgatagacatctatacagattcaagcccctcactagtataactagaatctggatgcatagatatctctgtggtaggagctgggtcatagagtaattctattcttaatgggcatttatttatttaccattaactccggttcatctaagttcatgctttctctctttaaaaagaaaaatgccattaaaaatcataaagtcagccaggcatggtggtgcatgcctttaatcctgcatttgagaggcagagactggtggatctttgagttcaaggccagcctggtctatgggatgagttgcaggacaaccagggctgttatacagagaaactgtctcaaaaacaaacaaacaatcaaacaaacaaaggaacgaacgaacaaacaacccaaaagttatggggtctacttttctttaggcccaccctagagtggagttgatcaatacagtgatcagtatcaatacagtatcactgatcattgtattaaagaaaacttagtttcctccctcattagatatcatttgtgatgagttccttctctagaggtgtgtgctagttagctttatgatggcagcagacttggtgcactgatttgaaggcatgaaagggtcatggtgaacagctgaggtttggcactgtaagaagccaggagaggcaggtataacctcagtagcattgaaggcccaggactgaaggggccatgcagagaagttgaggcttgacaccatgaagaaagcccagcccaggagagcttatcggtgaaagtgctgtcagttacagcagagactctgacattttagagaagccaatgctgtgggatgaccaccaaggacagcagcagctgtggagtggagccagcttgaacctgggagataagccgtcatgtgctatgggtggttatctaagctcttttcaggaccccttctggattgttagtggatcccagatggtggacagaattattcacacattgaaaatttggttttgctttgttcagattgtgactgtacactagttttccttcttgaagtaagaaagtatttggctttattttattttgttattttattttacaggaacccacagtggtaagactttgaacttttaaggagattttagagttttagaagactttgattttaaaagacactagatattttaaagagactgaatttttaatgtgtttgaatatataaagactgggaccttttaagttcataatatgttttatattgtgatgtcgattttttaaaaaatgattttgcgattttataatatctgtaaaatcttggagatgaacaagaaagggctcaatagtgatgtttgtgtgtcaagttgacaattggtcaattgtgctgacaagagtcatgtcaactttacacaaactaaagtcatcgtagaggaaggagccttagttgagaagatgcctctataaaatgaggtgtctgcaagcctgtagggcatttccttaattagtgacaatgtaggagggaccagaccattgtgggtggggcagcgcctgggcaggtggtcctgagttctatcagaatgtaggctgaataagacagtaagtagcactcctccatggcttctgtatcagctcctgcctccgtgttcctgccctgctagagttcatgtcttgattttcttcggtgataaacagtgatatggaagccaaataagtctttccttcccaagttgcctttggtcatggtgttttatcacagcagtagtaatcataactaaggcaggatggggctttgtcccatctcctttcccctgtcatgaggtttttgtctggataacttgatgcatacagtcttcttatatgcgtctgtcctgttatctctggaaagtgatatttcattaaagtctttcaccacttctggttctcaccatctctccatctcttcttctacatagacccctgagccttgagaggaggggtttgataaagacattcatcccattcagggctcaacactccaatctctcactatctgcacattgtccagttctggatttgtgttaattgcttctccgatgaggggtgagtgatgcgctactctatggaaatgtaataaatcattaggactcattttattgccatgttaatttagcagaataatagtagtagttttttccctagggcccattacctatctagtctcaggttcttgtgtgcatcagcagtatcaggtatgggcttaatcttagggagtggaccttaagttacaaaaaggtaggttggttactcttataacatccatgccactcttgtatctgtgggcatattttactagcaggctgttattaaaacgtgtgagtttcacagctgaatgagatttatcattgttggttccctccaggagtttgcacagcatcttttatcactatgaaggcagccagtagggatgcttttaaaaggccagccttgatgacacagtccataatctcattactcagagttgaagcaccaggattgggagttggtggccagcctggtctacatggcataaccttgtctcaaaccaaacttgataaaataggaaaacaacaaaacaacaacaaactccacaatcaggttgttgtgtatacctgatactgtagcattccaaacactgaggcagaaagatcagggcctcaaggtcatgtccagccacatggtgcactcaaggtcacacccggtgcgctcaaggtcacactgggctatatgaaacaccataccaaaaaacaaaacaaagcaaaacaacaacaaaaatgtttaggttttctctggtttttaaaaattaattaattaattaatttatcttatgtattttttttaattggtaaaagccatgcctgggtgtgacttcagctgtactgatctgtaacatgtatggctgccacctaccataacttgtcttgagtgagtaaggacatcaagccactgggctgtggcctggagtcctcggatgctcatggcagattatgaggtctgggtgcttcactaacagtgacgaaactaaagggaaactgcaggggcatgaggctgcctgcaggtgagcatggattcggttttctttctagaggagatttcaacaaacttcacctctgaccaagaagtttgaggatgaatgaagatattgagtcataaaatccctaatataagtagtctacctttatgttcaaaaacacttttcaacatgattttaaattttaggaaatagatcactttccaaagtaattataatcacatctctaacacttaaagagacaagaaaaataattgagggtgtggtttctttgttgttgttgttgtttttttttgtttgtttgttttgttttgttttggtaacagtaagatataatcaaactaatctgtggaaaggcatggtatataaaatttggcagccttttgtattaatttgaaaaaatgcagactgagccagcaatggctcagcagatgaagaccacactttcaagcctggggtcaaagtttaattctgggacacttaaggctgaaagagagaactaactcctgtactgtcctctgacctccacgtgcacaccacatctctctctctctctctctctctctctctctctctcacacacacacacacacacacacacacacacacacacacggggcggggggaggaatcaaacaagcaaatacaatacaatacaatacaatacaatacaatacaatacaataattaagttcagaacttcctgaaacagcaagtacggggttgcacatacccgtgactgaagatctctctgctcagtatttcactgatcagatggattcacttgcaacatggcatcagccaacactggccttctgtcagactcaagttttcatttttatcaatccttcccacaaagtattttttctaaaatgggaattcaatcatatcccttccttagaaaaatcccttcctcagccccagggcctgccttttgttacagccccagagggcaggatccatatccactgtcccctgagaatagtcccagccaccctggcaaactcttgtttgttctgccaggatcctacatggcttccagcctctctagctcttcctacacaccacggagcactctctggacgctcagccactggtcacaaagccacttcctggaaggattctcccagtcttcctcttctctaagttagagaacacttattacattcttgtttgatgctagagaaaaatcagtcagacagaaggccagtgccagctgctgccatatctcaaatggattcatctggtctttgagatgctgcatgaagagattgacagtcaccactgaggaaaacccatatcagacgcaagaagatgcatttcattttgtactatatctatttgattaccacctatgtgtgtgtgtgtgtgtttacttctctttggaatttcataatactttggtcattttatactttagcactttgatagtgttgtgaaattcatctgcttatgatctacagcttggtctccatgtgggtcccctaataattggagcagggactgtctctgcctctgttgtctgccattggattcccttctcctagctggactgcttggtcaggcctcaataggagagggtgtgcttagtcctgctgtgacttgatgtcccagggcaggatggtacccaggggggatttccccatctctgaggagaagggaagagggtaatggaggtggggagggatttttgagggtgggattaaaaggagagcagggaagggggaactgtgatcaagatgtcaagtgaataaataaatgaaaagatcatctgcttacatatacctttccctctggactccggcagccctggggttacaacctacccatctctctacttatattggagaagattgaatcaagagtacccagataaaggcgcatcacccagagtccaatagcccttctttctctagttagccttcagaatgctcttctcatgcctgatgcagacaatgaggccctgtctgctcctaacagtcctcaccagttcctgaccaccttgtccccaggatgagttgaatggacacaccccacattgaatatgtgtccatatctcactctgaaacatgcacatgtactggtatttggaaaaaaggttctttgcagatagaggtaagaatctcaatgtgatatacacttggattttccagatgggccccaaatccaattacatgtgttctttcaaaacagtttgttgaaattgtgtgtgtgtgtgtgtgtgtgtctgtgattgtcagaggacatttgtgaaagtcagtcctctcctgttgtgtggatatgtggtaaggactcagcctatcaggcttaactgcaggttcttttagccattgagccatgttgccaccttcctaacaaagtttcttataataaaacacacaccaagagaagttcatgtgaatgtgggcagatctgggagggaaatagtcacccatcaaggcaaactaaaatctgaaaaaggaaggaatgttactaagtgttctattcctatgaacacacaccatgaccatggcaactcttacaaaggaaagtgtgtaattggggctggcttgcagttcagaggtttagtacgttgtcatctgccgcagaccctctgggtccctatgtctgcgtggaacgggtctctagtcacaggtgggcaaagcattggatgagatgacagacagatgcacacaggagaggttgtgtagaatctgaatgcatttgttaggtggagcatcaaactttttatagtacagaaaattcaagggtcagaagtcacagcaggcaaggtacattgaagttaccaggtacaaaacaaagaaatgacttcaaaaggatttacaggaaccaggtaaatgtttacagtaaagataaagcagtcctgcctagggtcagcttagtgacaggcaaggattttacactctagtgctatacctttgaaccttgtgaaggctagcaccagggggttctgctcttggcaggcctcatgaataatgcaatatcacaacccccatcctcaattcctaggccttgctaaattcttatatgagtgtaactattaagtaactgaagaatctctatttgtcagaagaatttaccaactaacttgcttctaatatgcaatgtagcctgtactgaagatttctatctcagtgagattccctggctctttttgcagaccagttgagccactggctctgtctattgtaaagcttaattagttactgaataggttaacttccttactgccttctcacaggattctaagctcggaggcttctgggatcttggaacactggggaaactaactataacagaatttaatctcaaagggcatttataataaaatattaaaagagagctcatagatccatacatcagactaacgtgggaatagagtatgagtatatggctaaactccaggaggtgagcttccttgaaactctctgcctcgtgagtggcttttaggcttcacagcctgtcaagctgactcgaccagagtatgtggcagtcatcatgatggaaatcataacagtgtgcaggcagacatggggctgtgagttctacatctgaatctgaaggcagcaggaagagaaagtcacactgggcctggcttgagcttttgaaacctcaaagtccaaccccagtgacttcctctaacaaggcaacgagttctaatccctccacagtagtaccactccccaatgactcaccattcaaacagaagagccttatgggggccactcttattgagactaccacagaagattctcccttaaagcctcaaaaacgtccctgattacacacatttggaatttctagagtcccaaactgtgaaagctatctgatgtaagaagccaccatgctgggtagacttgtcacagcaggcccaagaagctaactgagtttgcatctcagcctgctttctaagttcttctgcctctctgtgtgctgacaggtttcccagagttagtgcctgcttcttctttttttcttttttcttttttttttttttttacaatggtgtttctttctttgtctctttttatttgtgaacaatttttaagagttacatacataatagactgtattatagtattttcaaccctttttaccccctttcaatcctcccatgatcctcttcccctgccacttctcagattcatgtttccttcttcaatgatgtatatcacagtaatacactcacacatatgcacatatacatgctatgcctacacacatgcgtgtgcacacacacacacacacacacacacacacacacacacacgagtccaaatagtgttgcccatatgtacatggctttgggaccagcacactcttcctgcttcacactgtacccatagactactgtcatttactttagaccactagatcttacttttcctttttaaaatcttttttgtttcctatgctccagatttatttttctagctttctaccagatacttcttgttttgggagcagaatcgtactatgtaactcaggttggccttgtactcatgatccctttgctctgccttcctgggatggcaaacatgtcaccacggtttgcttctactatatatattagttaactgtccatctgtctattcaaactgtacttctatttccttttattttacaatccttccccactctctggtgctaagggttgaatccaaggccttatgcatgcctgataagcactctaccataaactcaactttaaattgttttggttttgttttcatgtttgttttcttggaagagcactttaaaacagcctcttttacaagctctcactttctatcagttcttcctgaaccttattgaatataatttctttcaaagatagaattaatttttataatccaatacactttcagacacagtgaaatgattaaaaagtagaaagggagaaagaaagaaagaaagaaagaaagaaagaaagaaagaaagaaagaaagaaagaaaggaaggaaggaaggaaggaaggaaggaagaaagaaagaaagaaagaaagaaagaaagaaagaaagaaagaaaggaaagaaggaagaaagagaaaaaaggaaaggcaaacttaccccaaaccacttttctaacacaatttccaccaacaatttagtgtagtttctccacaatcattacatatatgtggttatgatcagagtattttgcatggtcataaataaacaatgagggctggacataaggttaagtggtagaagagttctttgaaaggcgtgaggccctggatttaacagctatcagctcacataaaagccaaagatgaatgaactagctccttttctgttgtgaatatttgattgttaatgtttggatttaggtatcctctaaagacagttcttgatcaaccacttgcaacatcctaagttcatttcaaaatagtacttgatcaccttcaatctgatttgaactgcagccaggactgactggttttctgcctagtgacttgtcaccatgaatggagtgtgagacagtttattctgaccatgtattgcctggacctgctgaaggagaatcccagacaatcgcccctgacatcagcattcctttctgatctcttagttgatggtgatatgggaaggacgcatggctcatacaatgccacgcctgaagattttccagctcataaactcattgatagtcccaaagctgggcagaaatgctctctttcctatgctagcttcttctaatgctggattcctctttacagtttctctcagtaagatggtgaaactattaacttattttcttaagtgagaggcaatattaaagtatctataaacctgtgactccagttgaagggtttttccctagagtgtgtaacaaagtcggtgctggtcactgtcatcctttagcagccagggttgagttcttactctttcccaagtttggcaccttttattttcctttttaaattttaaaaaattttagatttatttatagtatgttgtaagtgtgatgcctgcaagtatgtctgtgtatctcatgtgtgctggtgcctgagaaggtcagaagaggaagtcagatacccgggaactggaggtacagataggtgtgagccatcacatgggtgctgggaactgaacctgggtcctctggaagagcaccaagtactctgaattgctgaagcatcccgtcagcccatcttctcttctcttctcttctcttctcttctcttctcttctcttctcttctcttctcttctcttctcttctcttctcttctcttctcttctcttctcttttcttccctcctgctctctcttttctctcttcnnnnnnnnnnnnnnnnnnnnnnnnnnnnnnnnnnnnnnnnnnnnnnnnnnnnnnnnnnnnnnnnnnnnnnnnnnnnnnnnnnnnnnnnnnnnnnnnnnnnnnnnnnnnnnnnnnnnnnnnnnnnnnnnnnnnnnnnnnnnnnnnnnnnnnnnnnnnnnnnnnnnnnnnnnnnnnnnnnnnnnnnnnnnnnnnnnnnnnnnnnnnnnnntaccaggctggtattaaactccgaatcctcctgctccagcctctcagatgcaaggattaaaggctcttctcaccacatacagcttggtgttttgttgttgcttaattaattttttgtacttttgttttctatattttgagtaatgtcataaaagctgttaattttctatatacactgttcataatgtgagaaaaatcctttctcagcttatcaacaacaagattggagttttattaagagaagattaattgaaagtacaaactggctacataatagtagggtacacttgtgattcatagcttgctggctcagatgtagaatccaccgcaacctgagcaactctgcatgtcaaagacttctaggcagtagtatctaacaggtaggctggtgtcttatttacttttctgttgttgtgataagaccccaggattgaagcaagggtgtcagagtgttagagtccttgaccatcacgacagggagcatggcagcaggcaagcaggcatggctcttgagcagaagctggacatttacatcgtgatacacagacaagaggcagggagctagttgagaatggtgtgggctttcaaaacctcaaagccccctgccagtgaaaaacctcttctaagcaggccacaattgctaaagtgttccacacagttccaccagctgtgggtcaagcatccaagccgtgaatgtctggggccattctcagtccagacattacagctagttatgcataaggtggagtgaaaagtaagtgcaagggttcttggagtcagttgtgctggggcacaggagtattgtgcaggaaggattgttgtcctgaagtggacacaggtgaaaggctaaggcagactcatgaaggaacatttcactgaagcagacacaggagataggatgttctgctaaagcaaacccgtgaaaggacacatgatgaagggttctctgctaataacatgaatgtattgctctgcctgacattgcgtagttgatctccatttgtccagagcccatggactttggctgaggcaacgcacatagaggacacttgttgtttggaggatataaacaggactccatggagtgacgaagacagagcttggctatctgggacagctagctgagcaacacttgtgagtctcgaatcttcactttgcttccccgagagaggcacagctgaaaacttctggtgttcctccaggtccatcctgctgactccagccagggctgaggctgggacgtctctgctagttcctgtctccactgttgctaacctgactctactgaactggactgctggtgtactcgtgaggtgtttgtgagtggatcgagctgccactactattctgtgacctgaactgccgatttccagacagcataggtgggagttgctccaaggaacctttctaaacaggtccacttcaaccatcttttccactacctccagtgggtggtgggctacaaggaaagttaaagtgtttaagaaccatcattgaagataggatttgaaaaaagggaaagttacaggaaagtctggggcacagagcagtagcatggtctcaaacacagatatcatcttaaagatcagaggcaaggcaagattctgtcattttctgttgttctggtttgcatggtggtatggtgtaaatggtggtgatgtttgcaggcggtgtaacccttaggggctggagcctgtggtaggaagtgggctgttggaggcagggctctggtttatcagcttggtcctgcttcttgtctactctgctgtctcctgactgctgtctcaggctcctgcagccatgtcttcctcactgtgatggattgtatctgtctttaagttgtgagctaataaccccttccttccctttgattgcatcttgtagttatgtggtcacggagtagaaatcatgacatgtgatgtagggaattcactcttgggctcttttttttctgggcaagcattctaccatttttgataagggttgacagtgtaatttaggaaggtcttgaaccctgggtccttctgcctttgccttgctcggatttcagatgtgtgatgcccaaattctaggattttagaaaagaaaatgttttgtaaacacaagatacaatttgagctgcgtcagaggagatactgtgcaagggtgggagccggagggaggtacggaagtttggtgaactgagggagtttgcaatgttcagtaaccagaacagatgctcgtttcaagtgctgacaggctgaactgtgctaaattccgggtttatagtaaagagcagacttaatttctatcacacgtgactcatatgggcagcacattcttagaaaagtgggggttagttctgatcacctgctgtgccaacagcttctgggggacaccaggattgctgtctatcaatcacacttctattttatttttaatttttgtcatgttgcttttcgaatttttaaatattgaaatgagtttagatttacaagagaacttgcaaaaacaatatagccttcctgcagttgctcattttgctaacatttcatgtttgagtgtggatttgtcaacacgaaggaggccacacagcacttacacaagtacaggctttccgaactcctccgttgctgctgctgctgttgtttttcaattcacatagtttcctatcctagatcccaaatcaggaccttgctttgaacagaggcattgaaaccaaaaaaccaaatatacctctagcttccgccttgtcatggtatagagaccatggagttaagccttacactaactttgctgaggttctggtcataatgtgagtgggtgcatgtgtgtttgttttctctgtttttgaggaagttggaaggcgctcaactagggaaaagccactgatccttcacttgagcaagtgtctgatagatgacctttcaaagtaagaggcccaaacctccatcctcggggaatgttaatattgctatcttctgaacattcatccaagaaagaaaatggcgcaagttcctaacaccctttacctccaacactttccaaatctcacatcactccgcatctttaccccaccaaaaccccacagagtcaacttgagaggtaggtttgagacttacagttcccagctacatatagaccccatttggtaacatcttttttggtttcctccattttgtaacaatttctcagattttctttgttacaacgttggcacttttcagaagctcatgtggaaattccctctattttctttatgcgtcagctattacattatgactcagtttgggttctgggtaatcagtagaaagacacagaggccaagtgcttctcatgtcacctctgtgtatcaggtcaattggtagcaggtatggatcagatggtaaggtgatggatgtctgctcagtttctaaagctactagttttctctttgtaaatgagactaagtatggggaatgggatctcaaacttcagcatgcatcagcattacacagagaactaagaataccagttttggggccctttccccagagtttctgatttagcaggccatagtagggtctttgtctttgtagatgccgctgttgtggacctatagaccagtgcctgaatatttgtcctactgtgggataaaatatctgacaaaagtatcttacttgataccacttgagaaagagaggttccatttagctcacagttctaatttcagtccatcgtgagagcaaggcacaatggcacagagagctacagatgcctgcttgcagtggcacagctgcccctctcatttcatgcagcccaggatctcttgcccaggtaagtaggacagagattcccacaccagtgaccacattaagttaaccccccacaggtatgcccagagatgggtctctcaggtgatcttaattgtcaagcaacaattaacaccagggccacacccttaaaaccattacacatgttcacaccctgataatccatagtctagagcagctgtttaattgctggaccttagacctgagtcatctcaagagagacactagaggcatatctgggagaaactctagaaatacaatgtacatttccaagcctaacactaaattgtgattaagaagacagggcagcttagagagtcggcatattcattaatgcaagccgtgctggggaaccctggagccactgctgtccgaggacagttgaatgcagagtcacttggtgacaacctatggagagtgcttagctagcttctgctccaggaaccaggccagcaaagtgtgggaacccagcaggtctgaatcacaagcctcaggctcagagggctgactagtcctttcttcaccccagcaggaagcctccacattcccagcgttgtcggaaccatgtgatttcctagaggctcatacatagcaccgcgcagccagttccagaatcagcctgaattagctgagagcctgtgacagaaggaaaccacagccgcccaatactgtttaccagcatccgcaggcttattttactttgtggatttcacatagttcagtttgccaacaccttcttaaaaatacctacttaatctgggctaacacaagaaccatagatcatttaacaaaaacccagtaccaggcttgagaagccccctttgagtcgtttgctacggttgtacaaagttgccccaagcattacaagttgttgctatttcccttggcttcctccaaatgtggaaggttttctgaagataccatatgcatcagaagtaggcccctgagctggaactaaatggaaagcctcctccccaaggactacctctcatggtaacagagggtgccatgcaagcttgagggaagtaaccaagaatcctacctagttaggatgcctacaaaccacatgcagcaagcagcacagcatgacagtcctaaggtgtagtactcctaaggtgtagtagtggcatgcacactttggcagtaaccaacaactctccagttagatttactcagacagagaaaaatcatgcccagtactggaagcctagccaaccacccagggttgtaaagtcatgactcttggagaacttacagtcaccactttccatgtaaccagcacaattcccaactacattctaagtatttgttcctataaccacagattaaatgtagtcctcacccctcatcaaggaaacttcaccttgcaacaaacagatgcagatcatggtagaaacccataaccaaccaaaatgcagagtagtggagtccagttccaactgataaaccacacggctcttgctcctaaggctgagggatcattgtggaggaggggtaggaagaaagactgtaagagctacaaggagggccagaggattttctgtgagaccatgtctctaagaaatgtcagaagaaaaaaagaaaagaaaaggaaaggaaaggaaagaagggaagggaagggaagggaagggaagggaagagagagaaaagagaagagaagagaagagaagagaagagaagagaagagaagagaagagaagagaagagaagaaaaatgtcagaagttacacccatatagtctcaccgacgtggctgtttaaacagggtgaacaagcacaacatgaagaaacttgctgacatggatggggaaagctcatgagaccttaacccttcacaaaaacatagacatgcaaggaatcctgaagggaggagaagtagtcctccctagggaggagcacacaaggtggttatcctatgccaacaggccagccttgagatcacttacacacagcatcacacagactgtgcgggttgagcttatgtatctaggaacacgcacacctgcatttgtaacaatgatgaatgaataaagaggaaggatatgtaggcgaaaaggtttggaaagaggaaaaggaagaaggaaatgaagtaattatacacccccccccccagttatttaaagaacagacatacatttttatagaaatggcaatgaaaatgtagaaatttgatgtaaaataataatcttccaaataccactcactgctgatagaccttacaggtgttataggatccctgtcttagtaaatagacatctattcccagcaagagggagaaagtggtatttttctctaattctttctcctctctgcccctctacagtttgatgttatttactatatctgaaaatgtatatggtttgggagccttacatcctctgggatataataaactgatgctctgctcttaattccctctcataaatgtttaaaagaaagaatccaaatatgactttttgttggatgaattcatgtttcaaatatagtttaaaagttaaaaataaaaatgtttcataatgataatattgtttgatattatgaatgttacaaaccaataattcaatataaattgggcaataaaaatacctattctacaggttcatgcttcgttgttaggcatccatatgaaagcgtgggtccttttagcacaattttaaattcttccataagaattttgcgtgtctccttcaactccccctgtgaaaggaagagtagagtgggggcctttcattctgcaagcactaagtgcacacagggctttcccctgctctacagcacttcaccaggattagatgaaattcagaatgacaaaaagctggaaactcttgcatggtaattaatcatcttctttgccgtaattttaagttctaatgtacatctgtatagtgtctgtatctttctatagaaagagagagagagagagagacagagagagagagagagagagagagagagagagagtgtgtgtgtgtaaaatcaaatgtaagtatgttaagtatgttccctgagtccagatgcgacatcatttatgaggtgataagaaatgcaccaatggaagaggccacagagccactaagtttcagttgctcttccaaggttgcattgagtttggcccattacggcagccctttagtgcccaaagccaagaatataattccctcaccaggggccgtattccagcatctccccaacctcacccgtcttcctgatctggcaataatattatatcaaataatgttgtgtttgggggatttggagtgtgactcaatggtggcatgtctgcctattgcatttaagaccccttgcttcattcctagcagaaccaaaaataaaactgcatttagtaatggtgatggagacaagtgacagacattcatgctactctgtaactggcctaaaacgtagaaagcagtatacagcacataccttatttaatccctgtgctagcttgccacataagccacatacgtactggagggtgaccataggcttctgcaaaatcagattacaccaaaactatggctggatgtgcttgatgggcatttatttctctagcacaaatgaacacatccttactgcagagttgcagacagtggttagtcattcggtatcccaaccaagaaagactggaaaagataatcacaatctacattttaatggagcagacagtatgtgtctgtgccttcgttccggggctgtgttaacctctgctgttgtgatatagccaggtgagatggaagtatgtagacccctggaaaaaatatatatcatacacacactatatatatcaatatcacacacacacacacacacacacacacacacacacacacacacacaccttatccatcagaaggaatgagcacagagagacacgcgcaattcagagtatgggggttaacactggtgatgagctaggtatggtgtcgtatccttgaattccagtgggatttctgtgcattcaaggccagtctggtctatgttggtattttcagacatcagggttatatagtgagaccttgtatcaaacataaacaaaagcaaaccctcatcaaagaaaaacaaacagcaaaacataattctgaggctgaagagatgactcaggggttcaaaagatatacttctcttttaaaggacctgggtttggttcctagcacctatgctcacaattgctcaccctccagatagacccagcaactctgctgcagagggcacctgcactcatgtgcacctaaccacatatggacacacacagagagttaaaaaaataaatcccaaaattggtcattattgagggttcttctcctttcgtagactgaggtgtccagcttagtcaagaccacttaagatcatctctccaaaatacaaattactgtattttgtctctactactaacatatctatagaaacctttaattcaaggtattaatataatcaagtaatgttccccagactgtgttgcagatgaaagtcttcttgctttgagtagagcagcattcatgaagacaatctgcaaaagttggggatacagtaacaacttgagccacaattaacaatccctctgatgctgggttatagtgacagaaaaaaacaaacaaacagtattatcctctatgtgtatgggacaagatagacttctgatgttttaaggcaaggtcattagcaacagacatatgtgcattttaataaaaaaattcctgttatggagttagtagcaatggaattctgaagtagaggagacaacagggatggaactatccattatgatctgggtttctttagatacacagagttctcacctccacaggctcagctatagtccaacataagaattacctgtgcagcagtcccccataagttaactgtgcacccgagcccaagcttagtaacttcaaaagtcacaaggtaacctataaacaagtatccctgactcctttgtcacctatcaataccagaagctcccgccctcagacggtacctaggaaaacatggagacagttataagccaactaaagggtgtgtgtgtgtgaacatgctttgtgtgtaggctgctcagtgttgcggtaagttataaaggccattagtttatcactttcatagtggaaagggacttaagaagtagggagggacattgtttccatggacaaagtggtgtatctgccacctacttcatgtggagggaacagtggcttgggacaggaatacggatgcagtagcaggtagactaataataacaacttaggctgtttgggaatctactagggtggactggagatttgcaaacaggcatggctggtgcagaatggagcagagatgtttgactcttattaacgaacaccagaaagcatccatcacttgaccaaccttgcctgtgagggttagctcctgcttgaacttcagctgctgcctcatgaatagaggagtcaggactagagacagaagttagcctgaactctctgtcatgcttaagtcttccaaaagcctaagttgccagccacagagcaacgtcattcccctgtggtgtcttattagggagatttcatcacaccaggggctatgtccttatggtggagggactatatgaacctaacgcgggcatgttcttcatgggaattttaatgccttctacttgagaaccaccaggtcatttcttactcatggctactgtatggagtggtcataaacttacagtatttatacattagcataaataaaccatgatatcaggttgcctagcttcagaaagaagaactaaccaaaatattttctctttaccatgatagctgggatctttagtcagtagtatacataaagtatcttggtcttcttagccatataacactcgttgctccatttaggtttgttgaataattgttataaaaatagttgacctggttaattatcttcacagttgatgagggttttggaaactgaacattttaatgggaataatagaagctgtgcttcctttcctgtcttaagggattttgtaacacccacctttcttaatgtccgtacaccaacattagacaacaagcactgcttagaacccattgggatggggtagaagtccacggaggatggtggcacagaaggatgctgtttggagtcctgctctctagttgctgtgtttcccgtcccactctggtcacaaattttgagccagtgtaagtacttgtagatagtagagtgttacagtcaaggttgaaaagaagagaagccactctaaggagcttactgacagtgtctggagctgtgggagcaaggccagctgaggagagctgggccacacactggaaaagtcctcctctcacgtttgttagtcctttgcgcagcagcatataatggcggttctgaccaggactaccctcagagatcctcctgtccgagcttcccaagtgctgggactaaagatgtttgctaccactgcctggctcctgactacaaacatttcaaatgtaggtgctatgtatgcatactctctgtcttttagtttaaagtgtcaagaagaatataaaggattataaaaccaccagtcagtcatcctggtggctttttccaaatcacctctggggagatgaagacctgggcacaggaggcttgtggaataagataattttcctcctagtctttttactgttttccgtattcagagttgttttaaaaacatgttcccatttcagggaacagcagtgcacacgcccatatgaagcggttttctctgagatgcaatggtggaccagcttcaaggaacatggaagtctgtttcttgtgacaattttgaaaactacatgaaggaattgggtaagccatgtttacatgtgtattatgcccagcaggagccgtgtttatgcatacattatatccagcatgaatgatactttggtgacatatgacgtgtgtgtgaaataagagtcatctggtccctctaatttcacatagagataaaatgttgattcaccaccaaaatacagttctgtataaaccagattgagattggtataatctccatggacccatagaagataaattcatatacaccatttattaaacagaaaactactttagtaaataacttataataaagacatactttaaaatcgtaactgtttttatagacactggctctaatgtttagggacctttgctttctcacctctgctggctgctggctttccttggaatgtgtccctagcactacccttgccgccatgttccctttgccttttttccttctatagtctatctctttcctttaaaaattacttttactattatttattattgtatgtgaacatgatgtgtgtgtgcacgtgtgtgtgtgtgcatatgtgtcatggtatggtgtcggggtcagaggacatatctgtgaggtattttccttccacattgtgtgtgttctggtgttgaatttaggtcacaaggcttttctttccccctctaagccatctctccaatgccttcattctcttatgggcgtaccatgactacagagggttctttttaccatccaggataatctccttaaaatatctgtgctgcacaccttctgagtcccctcagcaggtgaggtaatatccacagggtctgggagttaggacatgaataatttggaagttgttacccaacatgatatgccatgtttatataccatcaggaaccaggggaaacacattacagctctcttgtttctctcttgccctcttgggctattcactcttcccctattcccctctccctccctccacatgttcatggcctgcctcttcttctcttctcttctcttctcttctcgtctcttcttgtctcttctcttctcttctcttctcttctcttctcttctcttctcttctcttctcttctcttctcttctcttctcttctcctctcctctcctctctctctctctctctctctctctctctctctctctctctctctctctgccactactaccctcttaactccccttcccttgccccaaataaactctattctatactataaaaaaaccacattacaatatttccccaagtcacttgctagactctacattgtttcccacccatggaattgaaacattcctacatggactacaaaaactatatgcacaaggcagttcactgaaccataatatgtagcaacaaaaatagaaatgtattagtcttcaatggggatagaaaaaaatgaactttggtatatgcatctcatagaagatgatgtgcatgcagaaaaaaatatctttatgtactgacatgaaaatcttcaagacacaaatataagaagaaaggaaaggtgaatgccaatatattcaatttaattatatctttaagaccctatctatagagagttgactgtacaacattataatgcatataatgccagttattgcacatttaatggtaaatttgtcttatgaatattttgctgcaataaaatatgtagtactgagttgtataaaactttgtgtctggtaagtttttgtatataatgtttttatttgcaatctttaaataataaaatatataacattaaaaagtgtaatagagaacaaataacccaaactcacatacacacacactacacacacacacacacacacacacacacacacacacacactataccacacaaataagtaaatacaacacaaacatacatacacacataccatacacaaataagtaaatacaagaaaaatagatatttaatttcatataacctgaagcctgcctaactgaagaatccttctccttgggaaagaattgtgcaaatagaagaagtccttgaaatcaacaacagatatgactatttgtccattactgtcctcccaggagtaggaagagccagcaggaaactgggctgtctggcaaagcccactgtgaccatcagcacagacggagatctgatcaccattaaaaccaaaagcatctttaaaaacaaggagatttccttcaagctgggagaggagtttgaggaaaccacaccaagtggccgcaaaagcaaggtgaggccgacagcacaccttcagcgatcctacttatgaatgttaattagagatgctgtattaggatgcaacagccaacttacatttcaagaatctcctagagaaacttttgactaaacactaagcttgaagatcttgaaagcaaatatgcatcacgttccatttggattcttgcattttatccctcagaagtgtgagatgtattttattacttgctctagttttatttctgccaatgagctaaataaacacccagacaagaagaaacttagagaagacgggtttatttgagcacagttccatgttgaggtccatcatttcagggaggtcaagcagctgccacatcatagccacagtcaggagcagagagaaacaaacacatcctcacctgcttccttccatagtaggttcttctcagactgttcagcctcccccacctgtaaagggctgcaatctacgtgccgccactagatggtgctaaacctcattgtgcgcagctgcgagagcacagccagccaaagtcaccagtccgtctccgaggcttttgcccaacccctgggggctttaacctatccccagggtgcatgaggatcatgggtgttgctaccagtcctagtttagacacgtcaccaaaagtatttaagccacacactttctgagctttctttgtctacctcaatatgatatagaagtaaaagttaaccgtggaagaatctggtgtgtcctgtgtttatttcccgcgggacggggataagctcgggatacccacccaggtatttctcagcatagacaatggtaccataaaggggggatggggaggctggggcttcctacatcagttaaccatcagggcaacccctcagacataccaacgggcctacctgatcaagataattcctccttaagattcctcccatgtggctctaggtcctgttaagttggccagtacatgtgcccctgggagaataaaattctttggtgggcacttgaaaatgcacacaagacactggatccagtggtgatgctcagtggaccacgtttggagagcagtctacctaagctgggactcagctctctcagaagcaacggtgctccctgtcattctgtgggcttctcacatggaattttacaatgaacacgattggtattagcggatatgaggttatgaccctgaaacagatgagcctaggtttcttaatggctaaagacaatggagaattaattgtaactcagaatacatatgaagtgtgggggtgaagatgaggagggtgtgagagagagagagagagagagagagagagagagagagagagagaaacagagacagagacagagacagagacagaaggaacatgcacacacagaggagagggatgtttgtggcttttaatctccaaggacccaggccagaggagatttgaacgccttgttcttgcaactgcaccattgcaagcatggtctccttggtgaacaaggtaatgaaagagactccagagtctgcattcatgcattcatagttggtatgttatacacataggttttccttgtatctcatacctccagttgaaatgcagcatttatttataatatatactttccctgtattttattatttgtgttaccagtttacccatagtagactgatcatctcaacaatggaacttgctatttgtttcccagcacccagtggttgctataatagtctatcaataattctttggttttgcttttagtttgtttgtttgtttgagttgatgccctcagttgtacctctgctaagggtaatattctgataaaaggaattattatacccctttgacagaggtttaataaacatgggacttgaaatgccagtacatataaatcgaaggaattttgactgaaacaattaataaaggcatcttagatatctgtgataaaattgtcaagagaaactaaagaagcaagagcaattagtacagacaaagcaactggggaatgctgtctgggaagagcaagagaggggagctttcctcccttcagcctcactgggacctgaactaagtctcctgttgttgaaacagacacttaactcgctgtgcataagagtaagacctcctctagactataaaagataaaattgaacttcttaagttgttcattttattcttataaatcttcctctccccagaagaatcatcccacaaaagcactgctaggaaggttttgaaacaacaacaacaaaatcttgtaaataccatcttaagtctgtagagccgccttgaatttagcacgtctaggacatcagggtttgtatgcgccgacctaaccttggttctgttttacagagtacagtgatcttagataatgactccttggttcaagtccaggactgggatggcaaggaagccaccatctgcaggagactggtagatgggaaaatggtggtggtaagtgctctggtgtgtccttgtcacttgaactgtctatcagaaaagcacccacttacttgccctaaagccagaaaaaaactgagcctggcttctcctctcttacaagagctgaagggaaacattcacagataaccatatctttgtaagaatttgaaactcctatgggttgagaagttgaagctctaaaaagaatttttaaaatagcgtgttccctgatctcccactcacacgtgaagcaagcgcagggttgtgcaatcagggtttcaacactgacagaaggcggtgctcctctggatctgtcattgtgcgggagaaaagaaagctctaagttagagaggcgtgaaactgaagtgttgaggtggttctcagtgtccgaataagtacaagcaagtaaaagcaaggatgtgtttctacacaatcccacgttgttacctcatgctaattccgtgaggtaaggcgcactgtcccacctaagagtccaggagacaggttcatacacttccttacttacacagagaaagctagaaagtgtggagtgttggtattacggccctacccctcctctccccaccccctgcctttttcatccttccttttgccctcaggaaggctctccaggtcacccttcccacttttaaagaggggagaaagccaggcactgattcttatcccaaactctaccagcaccaaaaggaagaaaagaaaaaggaaaaaaaaaaaaaaaagaaagaaagaaaaaaagcaagccagcaagctagctagctctggtgacctctgatgtgatgtaacatagaccaagtaattcaagaagcaaactctgtactgaggaaagcaaagagggatttctgcactctcaagacacaacagttttctttctctaaggaaggttgagttttttttttttttttttttttttttggaaatatatctaattcttttcctgaaatggcaggattaaaaatgagtctatagcttcttataaggacattagccaataggccaacatggttcaatggtagcaactaatgggtagttagttcactgagaagaatgccagacaccaaggttttatctctgaaaatcagaactttgggcaagtcatttcacctccccatgactccaaattccttaaatggcagacagtacttctcagaaggcttcccgggagaactggacaccatgtgagtttgttctttgaaaaccatgcaatgttacatttgtgtaagttagtgtacttatttaaaaaccaggcagtatgtaaggttgcaaaaatgtttcaatgtagaaccttaaaatatttaaataaaagcttcagattccaaactgtatttccttctcttttcatatctctgaatatataattgcaaactccatatatatatatagacccaatatgcataatacacacacacacacatttatatatatatgcagtatatctaataaagatctctttccaaacttgccagaattgtcatatgtggacagcacttagttaatattttctaggtgttagtgctcaactttactgaaatatttccatcttttatcccctaggaaagtgcagtgaataatgtcacctgtacccgaacataccagagagtttaagaactccatctcaaggtctccatgctctcaaattgtcatccaaactaatgatgttgttcgaataaaactcccaagtaagatctatgaatgcttgcacaatatcaccatgttattggcttattgagttatggctgtgtgatagagtctagcattgatcctgtgagaggggatagactcatcggcacaatgcatagctaacatcagatcctcagagagcaccaacgctcagttgcatccgctcaataagcatagtcaatctatcctaattaaatgtaatcttgactgcttagggcaaagtgttatgctggggttgaacacgagagacacatttaaaactaagggacactccaattaaatgttcaactctgttacatagaactttgcaagtgcaggcccattgtggaaatcagccatgatggagtgcttgctgctctatccacagcggacctcacattaggcctggggttatgttcgtcaccttgtggatctgacacctcactttgtagacgaactacaaaggtcccaatcagttcattgtccactctaatcttgggaaattcataagctaaagtttgcacacaaaaaaagtgtaaaaaagtgtttataacacctggacagaatgctctgatgtcactttagtgaattaattttgtaattagcgacaagggttgcattaaaatcagtgacagagacttttatctgggaagagaagcaaaggtacaattctgccttctcttttcaacactcaatgaagtcatcttcccacaccacagccttgatacaatgtgtaggacctcgcttatgtcaataatcattatttagaatacttaagtgacatggaattatctaaagaaattataccagctctttataatccagatggttttatttctccttttagatcatattctgcacgttagatgctctcaacatattaatagaaaagacaggatagatacggtcacgtcacgcagacctgtgataccttcacgccggaagcagaattattgagaatataagtctaggctacatagcaatacctcatctcattaaaccaagaataaataaagaaacaaatcaatggatacaaatttatgtaaataattttattaatgttgaatattttctatctagtggatccttgagaaagtaatgtcctacttgaataattgggctggtaatagcctgaaatgaacaataaatgtcaagacagatgatagactgtacttatcaattagtctggctcacagtctcagaggcatcagcccatgactgaatggttctttttattttaggcctgtggcaaggtaggacattgaggaagggcgtgtgcactaagcaaagctattacactcaggggcaaaggagcaaagagagaaatggggattcgaggggctcaaatcccttgaaaaacaagcccccagtgaccttatgccctccagatggattctagtcccacccttcctatcagctctgcagcctggagactgatccaccataatcacatgcgaatttgggcctaattcacaatccacaccttagcacggattggtttttgagctgtgcttcagcaatagttactgtattagacattttttctgagtaggttcatcttggtgagacatgtataaagacatagactaaaagtcagagagcttaaatacttactgtaaacaccctcagctgatcagtaccagggcagctacaaactaagcttgcaacctgaacattcatgttcttcagtagtgattcgagatgcttcccccaaaataaaactcataattattagagttcttttggtgtctttgtgtgtaatagcagtcatacagttcaaactgtgagtgctggcaaggcagttcagcagataaagacacttgctaccaagccttaggatccctgaaagtctccctctgacctccacacacatgcttgttatatgcgttgtatgtgggtgcacacacagccacatgtatagaataaataattgtagctaaacattttaaaacctgaaagtattaacttggacttgtaatgcctgagaaatccagcgtaacctaaactctcatgtcctggagggatcaggaaaacaacctgcctcagctgcacatgcaagagtagagatagcgaactttgactcatcagtcacccacgtgagacagtttccaggaactgttgttcagtccacctcacagaaaccacccgatcgaagggcgtgaggcatgaaattgggtgcagcgaaatagagagagagagagagagagagagagagagagagagagagagagagagagagagcgctcctaggcgtcagattagcagttacagcagcttagggctttgtctgttaaagactgttgggtgttgcgggtattatatatttagaaagcgattacattgacagagtgtggcatgactcttaacactgggcaggactctggggatctcagagtagaattctttaatcaacagagtagagaactgaggtgtcccagagagaggtgccaggtttccttttgtattgtgagatcttctcttagcaaacgctatcagccatttcacatccttatggacaaaagcaaagaaagatagaaccacagctccagaccactttaagcagaattggtttattattattattattattattattattattattattattattactattattgacagggtctttctatgaggcctcagactctcagaactctcatctcccaagcttcttgtatgtgaggactacagatgtgtatcaccacagctggctagatttgggggcatttggagatggaatctcagtatgttgttcctgctggccctgaatttctggatcaatctattctcctgtctcagtctcctgacaagctggtacacatggccttgaccagaatcgttgatgatacagttatataaataatagtctaaagccagtctaaagtcaggtacaaacaggggtcttgcaagatttatggcaaaagagctgggccttcctcactcaggggatggcgcttctttccctaaaacttgtcgcttaattttaattactaacagttatcacctttctagcaatggacctctcatccagtgtataaggtcagatgccaacaaacaaacaaacaaacgaaacaaaaaaccaaaccaaatcaaacaacaaaaaccaagtagaactccattctgctgctccattgccaatgcaggctccagagaacaccttgaaaattacctttctctcacttcttgtccaatagtcctgattttctgatggctctccacccagtcttttcagactacaatttacctgccacactcattgctaggaattagatatttttgcatcccattgctctaacagtgatgcagacacggaagaagacacaattattgtgtaaagttgtggtgaagtaaggaaataaaaatcacaccaactacttcaaatacaggtaagaagaaagaaagaaagaaagaaagaaagaaagaaagaaagaaagaaagaaggaaagaaagagggagggagggagggagagagagagagagagagagagagagagagagagagagagagagagagagaaaagaaagaaagaaagaaagaaagaaagaaaagaaagaaagagagaaaaaagccattaccaagatacagttcatacccaataaagctcacttgttaaagtacacagtgagatggtatacttagcatatttataaaactgtcaatcataatctaattgtaagacgtcatgatcacgccttctctgcctgcagaaacctgtattactatgaatcgacgtgtattgcttttcttgatttagagtaatagattttgtggttcttgaacactgagcacccagttgtccagggtggagctctgtgaaagactgtcctgtgcttgagagtccttgctttgttgactcctttatggagagactgaagatgtttcaaaacgacgaggttctgaactgttcggaactgcaaacactgttaattcagaacggcccagccagaactccttgtagcgccccctaccgctgcaacattgtcttgcgctgtctgtttcttcctagcaggttaaaaggtatgctcctcacgcccatctggtattagctctcaaacacatcgtaatgaacaagacttaggctggaaacagctcagtggaacaacacttgcctagcagttcaaggccttggatttgacccctagcaccaagtaaacatagcatcctgaggatgtcataaagagagagcctcgcattcctgacatgagcgtgtaccagtgacgtgccccacacacagatgagggctccaggggctgtaccagtcagtaatgtgcaggatgtgaagataagagctttaggggttggggacttgttttcagtgccgttgtggtcacaagggtcagggttttccttgtgtcataaacagctagaacacgggcaaaaatatttgaagcagatgtttttgaagattaggtagtaggaaatccaagactatgatgtcttaggagaggaaaacatttgaaatgggccccaccgtagacacagctttttgcttagccacagccttaatggtagtattgagacccatggcagtttgaatagaattttaaggcacccaggagaggtgggaagggttctgggaaggagtgtggctacagaaaggggaaagccacagtcagtgcctagggttccatgtgtataaacacagtgtcaacttcagcgaagccagggaacaaatggccaaactgctgcggaatgaaccctcaacagacctcagagagggcagggaataaagctgaggctgggtagagcagacagcgcgagcactcaggaagagccagaagtgacttgtcctggcagtagagctaagagtaaaagctatgccagagccagcttaagtaaggtgagttgtgctggaagagttaaatatgatctaaatacagtgcatgctttttatgaaagtctacataactaaaaaggttacaataaaataactttaaaaagaataaagaaaaagaacaatgagcaacacttcttaaatgaagaccataagcatgcaggcagtcaataagactacacttgtacccatcaccaatccaaaactgttacacaagacaagaaacagcaaacagagtctataaatggaaaaccatcttactttgaaacagatccagatatgacagcaatgatggaattaacggacacggactttaagttataaatatgctcaaacactggaggatttagtgaacctaggcataatgagattagtggaaggtgacaagccatctagagctaaagccaatagaatattagaaagaaacacttgcaacataggttaaaaatggttagacccctaagaaagaagtttgtgggtctgaagacacagtaaaagaatctacagagcctggcacagacggaagtaaagactgggcagtgctttgggctaaagagagccgctcattcaggtgtaagcatttcccaggaagccacagtctatgacaatttgatatgaaggtgccctccttccagggtgggattgcagctgtaagtccttagaaacccctgaaagtggtggtgtatcagatagtgtgccacaccagccagcaaaaattcttggaataatccaaatttataaaagtcattagaaaggaaaaataaatatgtgactgcttggttttactatctgtgacacagaaaagatttctttaatgtttctctacgtttatagatagtttacaaattaatttgcatatgaccttatgttattttaaaacatcaataaattccaaggaggagaagaaggtcgtttggttttgttttgggttcactgagctctcaggaggcagaacaaggctttgcctccggtgaagtgctatacaaatactggatatgtggatcaaggaatttctctcaggcttccttaaccatgaagtagcatttcccacgaatttcctcaaggtggcgctatgtacggtagtcagggtcacctgtattattcataacacagccttgatatctgaaccgtttctcttgtatcctttaatctttaaagaactttcccatctttttacttttgaatctgtcatgttcttgctttcaccccatgctagaattgaaccttgattattggctatgctagatgcattctgcatctcattttccttgggtaagtacttgaaactggaatgactaggtcatgaacacacacttgagttaacgaacgtgctctcagacactcctgccagcactgtgtgaaatgtcaattttatcgcctccttgccaacagatggaatagccttgtctttgatctgttctaataggtgtccagtcatgccagtcttttctaaacatcaatttcttaggtttgatatgttttttcagtttcttacaaattccccaaaaacttaggaggtttgtatataaaggcaacaacatgtcagtgaagaaaaaaaaataggttttctatggaatgaatggagtaaaataataattacgtgttttccaaaacgtttactcccaatgtaaggttcatgtttttagcgtaagcctttccttgttctttcacctccctgacggatcctatcgggagtcctcaaatgacagtttgttctggctcctccgaaggctctctgtcttggtatctctttcaaagcaaggcattgcagggtaaaggtctaggttaatctcagtagtttccaaatcctggctgagctcaggctccgccggtcctgggggatgagatgtaggcagctgtaacaggatggggtggggtggggttgnnnnnnnnnnnnnnnnnnnnnnnnnnnnnnnnnnnnnnnnnnnnnnnnnnnnnnnnnnnnnnnnnnnnnnnnnnnnnnnnnnnnnnnnnnnnnnnnnnnnnnnnnnnnnggagggtggggtggggctatcaaatgcagctgttattctgggaggattttctctcccacttataaaactgtacagattttaggtttttcttaaattcaaacatttgccaggaatggtactgctctgctttggaaaaaactgccggcaaaggcctctgcattttcaaactcctgagtccacacaattgtcaagtcaagaggaaattaacacaaatataaaataagtgtattgactatgacagactaagacagtatttgtcaactctgtgctcaccgagtaaatatcttttaactttttattgattctttgtgactttcacatcatgcactccaatctcactcatctcccttttctttcctatttgccctctgcccttgcaacttccacccaccaaaggaactttaaaaaacaaacaaacaaacaaacaaaaaagcatagaaaacttctcattgtagaaactgtagtgtgtcacaccgtgtcccgtagaatccttttatccatacatctttttcttatgcttagtcattttttattggatattttatttatttacatttcaaatgttatcccctttcctgatttctgcccccccccccccactcctaccctatcccccctccctctgcttctatgagggtatgtctccatccacccactcctgcttctctgccctctcattcccctactctgggccatcaggccttcctggaatcaaggtcctctcctcccattgatgcccgacaaggtgttcatacatctttgcttgcagatgtgcattgcagtgagctgttggtctggctcaagtcctctgtcttctgcttcgctatcaattgtggatgctcaaggggactcctctcagatatcctgctgttgccctgtgtcatggaggtcctgcagctctggatctgcaggacccgccccttcatgtgctccagcagttcttagatgaggtgagattttggagtggcctcacacagtactggatccgggtttgtgtggtagctgagttggtcagcctgccagctctcccacaccagcatcaccagggtgagctctccacactgcccaggctagctcacccaacgctgcagctggccaatctcttttgctctcatgtctttggggctggcttaccagagtctttgccattaagactagctctactgtgttgcccagtgagggcaaagccagctctcccaactgcctcaggtgctgttgggggggggcatctctcctgtgcccgtgccacctcacagaaggctctccctccctcatgtcctcggagcctgcttaaccccaaccccaacaccatgaccagctctattgagctgcccagacgaggtatagggcccactgccctgagtgagaggtaggggccagttcgccagagtgtcacagcaagtaagggacagggccagctctgcacagcctttggacatagcagcccagaccagggatgtccacagggtctttagtggtaatatgagccacagacattgacacagacctctgctgctgaatggtcatgggtccagccatggactgggacttcaccatgacctcgggtggcagttcaggctactcacaacaggccactcctcccgaccctcgtgtctccagttctgcctctcttcacagtgcgctggctgctccacttctttcctcccaccgcattgtagcggttcctgctgtgggcaggacacatgattggtgggcctctggatgtccccacctcatggtatggcaacaggcaggtctcacagtgtcctcctatctgagcattgtggtgtggctgtgggcgagcctttgtgtgtctacaccccacctatgccactgtgtgtagcagattccagatgtccataaatatctttttttttttaaagaaaaaaatatattcaactgattccttagataccattgcctgttccaaggtcataaataatttattctattttggaagttctcaaccttcctaatgctgtgaccctttaataaagttatacattcctttagtacagtttaatatattcctaaatgaccctttaatacagttcctcatattttggtgactcccaaaattgtttttgttgctgcttcataactacaatttttcagggccggagacatggctcagcgggtaagagcactgactgctcttttgaaggtcctgagttcaaatctcagcaatcacatggtgactcacaaccacccgtaatgaaatctgacaccctcctctggtgcgtctgaagacagctacagtgtacttatttatagtaataaataaatctttgggctggagcaagcagggactgagtgagcagggttgacctgagcaagcagaggtcctaaattcaattcccaacaaccatatgaaggctcacggctatctgtacaactacagtgtgtactcatatacaataaataaataaataaataaataaataaataaataaatctaataaaaactaattttgccactattatgagccataatgtaaatatctaatatgcgggatacctgctatgtgggttgtgacccacaggctgagaacggctgttttctttctttttcacctagtactcaaatttaggagataacatggatccagattcaggaagcacttagaaaaaatttgggctatgaacaaatgaaatgctactaagagacatccattgccttatgaatcagagtggtcttatggtgtcagaggcgtattggaggaatgacagcaagcataaagaaaggacagcagggctgttgatggggctctcaaagagagcaatgcattgagctgcaacttagcgtggacgtgtggagctcagactcagctcagacagtgtcaagggtcattgacaatgacctttcttggcctcagggtatttcgtgtagcctctgaaggtccaaaacaccaggtagtcagtccacttgcaaactagagggatatttgccactgacacttgtggtagcacagaaactctgttgctatctgcctgcgtcacctgaatcaaatcctcaaacatttttatgcctgagtaaaaatgcaatgacagttatggtgtcatagtgttcttgagaagactaagacattaacacacgtagaatgtgtcctggtacttaggacatactatctccaccagacagcagctatgacttattacatctcacctctaatggaaacacagaaacatgatg

SEQ ID NO: 773 - DNA, 794 bp, Mus musculus
ccgggactgcctctgaagcaggagacactgggacccagggtccttcctccaggtccatcctgctgactccagccagggctgaggctgggacgtctctgctagttcctgtctccactgttgctaacctgactctactgaactggactgctggtgtactcgtgaggtgtttgtgagtggatcgagctgccactactattctgtgacctgaactgccgatttccagacagcataggtgggagttgctccaaggaacctttctaaacagggaacagcagtgcacacgcccatatgaagcggttttctctgagatgcaatggtggaccagcttcaaggaacatggaagtctgtttcttgtgacaattttgaaaactacatgaaggaattgggagtaggaagagccagcaggaaactgggctgtctggcaaagcccactgtgaccatcagcacagacggagatctgatcaccattaaaaccaaaagcatctttaaaaacaaggagatttccttcaagctgggagaggagtttgaggaaaccacaccaagtggccgcaaaagcaagagtacagtgatcttagataatgactccttggttcaagtccaggactgggatggcaaggaagccaccatctgcaggagactggtagatgggaaaatggtggtggaaagtgcagtgaataatgtcacctgtacccgaacataccagagagtttaagaactccatctcaaggtctccatgctctcaaattgtcatccaaactaatgatgttgttcgaataaaactcccaagtaagatc

SEQ ID NO: 774 - protein, 134 aa, Mus musculus
DAMVDQLQGTWKSVSCDNFENYMKELGVGRASRKLGCLAKPTVTISTDGDLITIKTKSIFKNKEISFKLGEEFEETTPSGRKSKSTVILDNDSLVQVQDWDGKEATICRRLVDGKMVVESAVNNVTCTRTYQRV

SEQ ID NO: 775 - DNA, 26354 bp, Homo sapiens
aaatgcatgtttttgattcagtaaatctggagttggttctgatcatctgcaatgctaacaagcttccaggtgatgcagatactgcatatctgtgatacacgctttgtgtgtgtgtctttttatatttgttgatttttttttttttttttgagacagagtctcactctgtcaaccaggctgcagtgcagtggcgtgatctcggctcactgcaacctccacctcccgggttcaagcagttctctacctcagcctcccaagtagctgggattacaggcacccaccaccaaacctggctaattttttgtatttttagtagagatgaggtttcactatcttggccagactggtcttgaactcctgacctcgtgatccacccgcctcggcctcccaaagtgctgggattacaggtgtgagccaccgtgcctggccttgatttgtttttaaatgttgaaataatttttggtttacagagaagttgcaaatacagtacagagctcccacatacccttcatcctgcttcccctaatgttaacatctaacgtgtatatttttcaaaaccaataaatgaacattgctacaatactagcaactaaactatagactttatttggatttctccatttgttctactaatgtttctttctgttccaggatccaatttgggatcccacattgcatttggtcatcatgtttccttagtttccacagatctgtgacaatttcccaggttttccttgtgattcatgaccttgacagtttgaagagtattttgtagaatatccctcaattttgtcttcatatatctgagattacatgaagattaaatttgggttatgagtgtttaggaagaccacagaagtgaaatgccttctcattgcatcctagcagagggtacatgacagcatgactttacactggggatattaaacttgatcctgtggttaatgtgatatttaccagtttgctgaagttactatttttcccttttcacactctgttctttggaagtgagtctaagtgtggtcaatggttctcatatttgagcatgcatcagaatcacttggaggacttataaaaactatgctcttttttcagtttctgattcagcaggcctggggctggggccaagaatgtgcatttctaaaaagttctttggtgatggtgatgccgcctagtccaaagcccacactttgagaactactggtctagaacatttgtccttagttgctgagccttagacttcagtcagaattgcctgggaataattttagaaatatatattcccaggctttgtccttggcaattctgacctatgccggctcataggagttggcatttttacaaatgcaagtcaggcttgagaaccatgaggttactgctactctgcaataatctgattaaagcgtaattggccgagagcctgggggcaagtgctcaggcagcaggtggggtcccaacagctccagctgtaagaagcaaagggtgggagagcctgggaacccagcagggtctgaatcataggccttcaggctgcctgggtctgaccttgctgtctttattcatccctccaggaattccgtgtattattttgatttgtctgaatcacatgattgctcagaagcagacagcaccagcaagccagcactcaaccctaagagcagccttcagtgagcagtctgctgaaattctaaaacagagtaaggcatcgcatagcatgctgtttaccagcatcaactaatttattttattgcctaaatcttaagttcttcagtattcacgcaaaagatgttgtatgattacaaagattccaaaagaaaattgacgggagtgggtgatgaaggagggagagattagaaaaaaaaaaaaaaaaaaaaaaaaaaggaactaaagaagtaaggaaaatgtttttcttacatgaacttcagaaaaaatttaatttatataattttatcatataattattataattattattcagccttttattccattatcataataacttactattacttataaaaattacctttatccttggtgaatatgatgaaaagtattatcatttttaactgacaaaaaacaattctgtgtaataaagacaattgcaaataagtttaaatggcattttacataataaaataaactttttatttaaaacataaaggtagccaggcttggtggctcacatctgtaatctcagcacattgggaggctgaggtgggcagataacttgaggtcagaagtttgagaccagcctggccaacatggcataatcccatctctatcaaaaatacaaaaattagctgggtgtggtggtgcacgcccgtaatcccagctacttgggaggttgagatatgagaatctcttgaacccaggaggtagaggttgcagtgagctgatattgcacactgcactcctgcctgggtgacagagtgagactccatctcaaaaacaataaaaaaattaaaaagtaataaaaattaaaataaaacataaaggtccctaagattctttaaaatgagatttttctctgtattactttcctggggttgccacaacaaattgccacaaacttagaggcttaaaacaacagaaatgtgttctcctacagatttggaggccagagatagaaactaaggtgttggtagcttctagaaggctctgggggagaatctttttcatgcctctcttctggcttctggtggctgctgacaatccatggtgtccctaggcttatggcagctcgtcaattgctatcttcatgtgaccttttcttttgtctccatatgtcttaaatctccctctcctttctcttataagaacatatgttattgaatttagagtttgcctaaatccaatacagtctcaacctgagatccttaattagtatctgcaaagatcccatttctaaagaaggtcacatttacaagtgtactggggattaaggcttgaacgtatcttttgtggtggacacagttcaacccactacagtttcagacatagtttgggtgcttacaccctccaaatctcatactgagatgtaataatccccagtgttggaggtggggcctggtgggaggtgtttaggtcgtgggggcagatcctccatgaatggcttggtgctgccctcgtaataatgagtgagttcttgctctgagctcacacaagatctggttgtttaaaagagcatggcacctcccgatctctgtcccttgctctagctcttgccatgtgatacaccagctccccatttgccttctgccatgattgtaagcttcctgaggccctcatcagaagcagatgctggcaccatacttccagtacagtctgcagaaccatgaaccaattaaaccacttttctttataagttaccagtctcaggtattcctttatagcaacacaaaaatggtcaaacacaattcccaacactattaaaaaaaagttgaactgtgtgaagaatgttggcatggagcagtgccatgttactgcttgcttggaagaccacgtgcctcatcccagccattcagctcagcttcctgtccactgcccacctccaggtgtgcatttgagtagcagcaccaaggcagaaacaccctgagcctcatgaatggccaagtttcccgatgttcttagccagaaaatactaagagatgacccagtttcgttaatgcccttcctacaaagcccacccaatataagaagagactcatgcagatatttaggtcgctaatttttgtttgccacagcacttaaatttttctagtgaactttctccattttcaataaattttactttaaaaagccactgtaaatttttttccttacagaatggttttaatccaagtgcattagaaccgcatggaaaacttgaaggcttaatattgctaaggtgataaaaaaaaaagtagaagaattttatagctactgagggctatttctgaagaaactttataatttaacaggctcattaaccattccagtttagactcaggaagaagcagatagcaggacagctttttaaactaggtttctttcctcaatttccttacacaattaatttttgattctcgtatctttctgtcttacagcacttagagtgattttaaaaatattccatatatttgactgataaccatctcatgttacttttataaatgccggagtttggctccttatattaatttttctgttggcattatccatggcataaatataaaaatgtcttttgatgaaaaatcttaaatgaaaaatggtatccaccattcttctatcccaagaaaagaaagcctatagtagttgttaagttatgatccccagttttaaaaatttatacttgagactctaaaacaggggttgacaaatattttttctgtgaagagccagtagtaaatatttcaggctttgccagtcatatgtttgttataactactcaacctcactattgcagcacaaaagcaaccatagacaatatgtaaaggaataagtgtggttgtgttctaataaaactttatctacacgtggcagctggatttagtatatgggtcatagtttgccaacccctgatctaaaatatcaacttattctccagctgtgtattatattgctagatacccacagggaaacatgaaggaattcagtgtagtttcagattctctttcacagagttggaaacatttcggatttctatttcaatccccattatatactcagtggtgggaaagacctatcctagggatctttcctttagtaggcactcaagtgtttattgaattagttgcaaatgagtaaggcctgagttctccttgcatgccaatatctacagagtgcccactatgtcttgtccagctccaatacacttcaaattgcttcgttgaaataactcaagtttaatatgacaaaagactggaaaatcttgcctgctggggctttcctctcctgctttgtaggaaagttatgagatctgtacttctgttatgaataaatatagtcacaatacttttctatagaaagaaaaagtgtgtgtgtgcatgtatatgtgtatatacatcagaagagcaacagataattatgttccgtatttactgggccatcaggaatgcactggtgagagggccacagcatcattaagagtttcagtggttgctcttgttgggttgttagagttcagctcattggtagcaatgggaatgaagagaatttgattcaatctgggccagatggcagcacattactgccagaaaccaggggattgattgcacttcaccataaaatagggcaaggctgaaggcacagctaagggtgtttgacccgaaaggggttatggagatgattaaaataacactgaatccatagaggcaaaatagatgattagccaacaagggtgctgcttcatacatacaatcaaaagaaggcaggaatggatgggcagcagactaaggatgagcgccccagtagaaagtcatgatcttttgctcagattccagatctgagccaattttcagacccagaatcctttgtctcaataggtgacaagcccacagaaggaagaaccctgagataccataaactgttaatgtcccccattttcctcaaaggagatctgttatcgtttacttgagaaaatatgcaatgaggaaagaggaaaatccagatattctgacagcctcgggtctgaattattgtcgattcacagagtgccaaatcatcatgttagagtgaagacatacagcagctaggtaataaatagaatcctggccaaagtctaggtctcagtaggtccggtaggtctgtggattcctccagaagtcatttccctaggccttgaatgcgtaattgggattgactccttggctgttggagtaagctccacctttctcattttctaattcaaacaagaattattatagtggggaaggcaaaatggaagcttctgaaactgcacccccacactcccaccttcttcactgctatcctctctccatcccttgataagatggtgaataaaaaacattgtattcggtggcaggggaggagtgaggaatgacagaaattggggctactcaaaaggactttaagactgcagaaggtggtggttcatatcatagcaccatttaattcatgagtctgatcactgcaaaatccaagtgaatcttagaatatttctagcctagtgaaaaatcaactaataaccccaatgatgggctactgtgcttgatgtgttatctttgttagtgcagattaatacagtgtcaggtacatggtgttcagtcagaccacatttcacattctttcctacctcaatcaggaaagatcagaaaccatttgcatttgcatggaacagacaatgacacatgtttacattttttttttaattttttgagttggagtctcactctgttgcccaggctggagtgcagtggtgtgatctcggctcactgcaacctcccaggttcaagtgattctcctgcctcagcctcccgagaagctgggattacaggtgcccaccaccacacccagctaatttttgtaatttttagtagagacggggttttgccatgttggctaggatggtctcaaactcctgaccccaggtgatcctcccaccttgggctctcaaagtactgggattacaggcatgagccacctgttacatagtcctgtggctatgttaactcctactctttatcataatataatcagatgagatctaggctgtctggacacttggcacaatatcatgttatcaggcaggatgaacaagaagtggctagtataatggaggccttggtaagacacattcaacacagaatatgagagttaaagttggtaatgattgaggcaacttctagtaaagtttttaggggtccagcttgaccagggacatataaggaaatcttttccaaaagacaaattgctacattttgcctgttctatcaaaattcttgtgggactctttggcttatggtggcaacatattgcacatttaggcatgtgctgcagcccatatactggatggcatgaaaggctccctgctttgagtggagcccagagcaggaaagggtctgcaggaaggaagggctgtgatatgagctgccctgatgcttgggtcatgtgattggtaaactccacggtgctggaggtgttagtgagaggaaaatatgcaatataatgtgtatggtgtgtgtgtatgtgtgtgagagagagagtgtgtgtatgtatgtgtgtgggtgagcatcatagcaccaatgtctggggttgtgaagaaagatcatgccatctgtaacagagacttatacacctattaaaacagagtgcctaatgtgttactggggccccatagagacagaattcttgactataggatatcaagtaacaatgtatctggaagtgtccattatgagccaggttccgtcagacccacagagtcatcaagtcaggtatgtccagcagaagtccatcgtgagatcagattgtgcatctggggtcaagcctaaacaagaccagaagtcctaaggtaactgcatgagcaggtggtgcagatccccatgtcacccaccactgcagcaccagcacccctccttcagatcatgccccagacagtatgtgggtcccacgtgaccagctaaaggaggagaaaaaacctgagcatgtttaatgtaccagtcagcacagggtgtggaggcaagttaaaaatgggcagtggtttcatgacacttgggatgtgggggggacttgaggaactggtaaggaaaatcatatcaatggacaaagctcagagtcatgcacctgttccctatttcatgtggaggacacagtggcttggaatgggaacatatatatactcatgggtggaagcgaatcgtctgaaaagctggtcagggacctggaaggaggactgaaaaattgcagacaagaatgtttggtggagaggaatgtgtgtgaacctataggagtgggcaaaatatgtgaagatttttggctcttgtattcatgaacactagaaagcatcaatcacagaagaggcactgaacaacagagtagacaaaatgactaggccagttgacattaggcagtctctgagctgatgtgactgacacatgaacggagcagccacagtgcagagatagaagccatacatgggctccgtctcacacctcagtactgacgcctgtgcaagtctaacctgtcagcaacaggggaaaaacaccgctcccaatacgacatcttcaaggaggtgatcttcaatcgtgattttccttgtgggaggggatccatgtgcatccgacatatgtggcagcacattcgacattttcttgaaaaatcctgggaattgtagtgccttcagtgcccagattaccctcaatgttgggtcatttcctggcttcagcctcatgcctattaagttgaatgagcacagtcgtacaaattactcaggaaaaccaaccaatgaactaaggctttttgttttgttttgttttgcttttttgatacggagtcttgctctgttgcccaggctggagtgcagtggagtgcagtggcacgatcttggctcactgcaacctctgcttcctgggttcaagtgattcttctgcctcagcctcccgagtagctgggactacaggtgcgttgcaccatgcctggctaatttttgtatttttagtagagacagggtttcaccatattggcccggctgatcttgaactcctgacctcatgatctgcccgcctgggcctcccaaagtgctgggattacaggcaagaaccactgcacctggccaaactatagtatctttaccaaccatatctggaacatttaatcagtagtgtatgcaaaatttttgcctcatattaggcatataatgctaattgctttataaatgttagttgaataattatcagtaagactattggcctggatattagaatttggaaatttaacattttaatgggaattataaaatgccatgtccccattcttgtcttaaaataattttataacttcagtatttcttaatagctttgtgtcaacctatggacatcaagctctgcctagaattaacaatgatgtcctcaggggctgatggaatgtataagggcatgtttgtcctttacttagcatttggagtcccctcttctctagctgatggatttgctgttatattccttgacccctgttctgacttacagttattagtggacactgagattttacagtcagggttgaaaggaacagaaagtagcctaaattaaagaggacttaaaagatatttggtgttctcatggcaatgatggctctctaaaccgttgggaagttgagctggcacctggaaaagtgtcagtaacagggctgtgtgtgtgtgtgtgtgtgtgtgtgcatgtgtttgtaacatgatctctttcctttcttttttctctgtcccattctctttttcattgtgcacatgacttaaagtggttgttctagcccttactaaacttaactttttacttcaaatgtcaagtaccatctatgaagtctgtctggtgtttagttgaaactatcaagaatgagaatgatcttcaaacagccaataaattggctttttctgaatcatctttggacagacagagagagagacctgggcacaaaagttccacggcataaacacagctgtccaggcccagctcttacacactgctttgtgcctggcaggtcctagggaaggaaagtaacatttagttttgatgctaaattggtgttggaaaaggtatatctagttctgctaaacactctactgtgtttccattttcatcctgatgtatttaaatttaagaaagcttttctgctttagatgatactcaaggaacattgcaaggattagagttccttattttatttcctaacttttctcatctcattctctacccaaaattgtattaaaaacaagttcccatactacttcagggaaaaccagcatacacatgaaactactgttctttgagatcaacttatctcagacagaatgattgaccagctccaaggaacatggaagtccatttcttgtgaaaattccgaagactacatgaaggagctgggtgagctatgtttacttgcatatcatatccagtaaaaatgggcattttgatagcacagaacttgctctgtataaaataatattaatcttgaactccctaatttttcacataggaaaaaataaatattgattgagtaccaggatatagttctgtgcaaaactatgttggagttgacaataatctctcatataagttaccattaatttacataaactaactaaacagcaagtgattttaataaatgttttaaaacaaaaaaatacaactattttttaaaatgattattttgtaaatgtttgctctaagctttaggggatcttcagaataaagttcagagtagattttgtttttcagcctctgctggctactggctttccttagtgtgtgccagcaatgctccaaattttgctcccattttcacactgctctctcttcttctgtagtatagcatccctcttcctccctcttaaaaggaaatttatgattatgtttgagatctgctctgataatccaggatactctccccatctcaagatccttaaattaaccacatctgtacagtctcctaacatgtaaaggtaacattcacaggttccagggattaagacgtgaatatctttaggaaccattatccaatctgtcacatcctgtgattgtgttttatgatatgaattccatgaactacattatagtattttcccaatatatcttcccttagaattttaacttaggtattgcagtatatgtaatgctatttctactgaaaatactcctacatgtgctgcacagagctgtgtatacaaggatgttcactgcataattatttgtaataaccaaaatggaaacaaatgaattgttcatcaacagggagacagacaaaataaattttggtctatacacactgtggaatattatgtactatgaaaaagtatatatctatatagagtgacatggaaaattttcaagacatagataaggggaaaacttccaagacaagataaggggaaaaagcaagttgaaaaacagtagatataacatattttttaaaatcctataaataatggtgatgcttgcacaacattgtgatgttctcaataccactgaattgtaacttcaaatggtaaatatatgttataaatattttaccacaataaaaacatacatcattgaggaaacaaacccatatatatatacatgtaagaatacaagtgaagagctaaatatctggcaaaatccataccaaagtattttgtttgtatgtgagtggatataattttaaaatagggagatagttgatagctttaatcagattttcaaaggggttcaaaaatcagtaagattaatagctactggactagtgaaaaagaatactcactaaacaacaactagagacagattttttttctgcaaagatagtctattttaacatgtcatggtggagctgctggcttgggatatgtgaagtcatgcaccattaaatctgttcaattcgcaaacctcctagttagcaaagaattatacagataatgttgagtttttggagtcaacaacagatttaagtattgtattgtaatgtaatgtatttgtaattctttatgcaaaaagataatactccttttatctggtttccaggtataggaagagccagcaggaaactgggccgtttggcaaaacccactgtgaccatcagtacagatggagatgtcatcacaataaaaaccaaaagcatctttaaaaataatgagatctcctttaagctgggagaagagtttgaggaaatcacgccaggtggccacaaaacaaaggtgaggcctacgacagtctttcagacacatttcaaaagaatgttagtcagatatcatcctcggtaagtaagcaattctagcaaacatatctaaagtccttaagaggaacttttgtctaaaacataggtctaaggatgtcaatgtgaagatacaaatcttctgggatgcttgtgaaaaatgcctcctgctcactgccagaggccctgaaaattgcatttttaatgaatctgatgcagacgcttagcagaccacattttgagaatcatttccctagattactgtttagtcctctcagaaacaaaagttttccctatccattttgtagcagttttctacacatagaattacagtgaataaacctcgtattagctggcagaggtaaggttatgccaccgtgacaatgaaccacaagcctggagtgagttaacacaatggggatttatttctaacttatagtacatacgtagtgttgggtggcattggggaagtttgtgtgtgtgtagtggagtaaacaggaaatctgctccccctaatctctcagggatccatgccaaaagaggttcaactaccacctgtggacatcctggtcttctccaacaccaggataaagagacatgggctttttattgtctcaccctgaaagtgccacacagagttttcattcatatctcaagggcacatatctcaggaatatattatttatttataatatgtaatttacttctacacgtattgtttacagtctttttccctacaccagaatgtaagagctcatccaaaacaggatttcctgtctgtttcacagaaccccgtgcttggtcatgacagttgttcaataaatatttattatttgaatgaatgaactcaatagaggattgttaaactatatggaggataatatcctgataaaaggaactatcatgccactgtaatagttactaaatgaatatgagagtttaaattcttgtaccatataaaatggaagaaaatttttgacttaaatgcttaatatggatttctatgctaaattcttaaaaatctactagaataaaaaagctaggttgggtgcggtagctcatgcctgtaatcccagcactttgggaggccaaaacaggaggattgcttgatgccaggagtctacgaccagcctgaacaacatagcaggatcccgcctctacaaaaaacacaaagattagccactgtggtggtgcgtgcctatagttccagctactcaggaggctaaggtgggaggattgctggagcacaggaggttgaagctacagtgagccatgattgcaccactgcattccagcctggatgacacagtgataccctatctccaaaaacaacaacaacaacaaaaaaaactggaaaatattattgggataagaagaggaaagaggccttctttcttttaagtaagctcatataatgggagtttgaattagtttcacatgtattattattattattattctttattgagacagggtctctgttgcccaggctggagtgcggtggtacaatcttggctcattgtagcctcaaccacccaggctcaggtgattctcccacctcaacttcccaagtagctgggactataggcatgtgccacaacacctggctaatttattattttttatggagatgggggtctcactgtgctgtccaggctggagtttcacacttattttgaaagttaaaatgtatttgtaattctttatgcaaaaagataatactctgcttacacagtcaaagataaaaagaacatttcatggccgggtgtggtggctcatgcctgtaatcccagtgctttgggaggccaatgtgggcagatcacaaggtcaggagattcaagaccatcctggccaacatggtgaaaccccgtctttactaaaaatacaaaaattagctgggcgtggtggtatgtgcctgtaatcccagctatttgggaggctgaggcaggagaattgcttgaaccagagagtcggaggttgcagtgagccaagatcgcaccattgcactccagcctgggtgacaagagcaaaactctgtctcaaaaaaaaagaaaaagaaagaacattttacttattcttcaagataatattacagttttactcttgtaaaaccttttttcttcagcagaattaggcaacaattttactgctgacaaagtcttaaaataaatagagttgtcaataccattctaaaactacctgagagtattacaacagctaaaaagaatttgctgcctgataaaattttaatgttgaaatatgacaagctgatctgaatttagttttttctgtttttcagagtaaagtaaccttagataaggagtccctgattcaagttcaggactgggatggcaaagaaaccaccataacgagaaagctggtggatgggaaaatggtggtggtgagttagcccatcctcgctttcttcccaccttctgcaacgactaatataaaatcacaacttgttctcaaacaatgaaaatgaatgccattttccttgttctcatagtttaaagaatgagaaaaaaattatgagataaatgtataatcgtaagcattatataaaatgtgtgtggattgaggaactaaaaaactaaagagaatgaaaatattatgcagcctaatcctttgactcacaggtaaaacaaagcaagcatgtatttgtgcaatgaagattttagcaggggttgagggttgttgccaatcctctactccactccaggattaacttctcactgtttttccatctcaacaccaaacaaaaacatgaaaaggaattctagaccagggataagaagctgaagtggtgtttttttggtgtatgaatgagttaatacatgtcactatcatgcccctatgttttcatatattaatattatttcccaatttccacaataatcctgtaaggtaaagcttattatcccatttaacagtgaggaaactgaaattcagacattgacttacctaaggatatgcagctagaaaaatgtgatggtactgggaggagcatcaggttgttttcattgaacactctatattttatagaatccatcctgctccctttcagatggtttcccaggtcaccttccccacttctccagagtagaagaatgtgtgttcatgattttccttctcccaaacccccacctataccaaaatgagtaaaaaggtaactttctacataatataaaatagttctaagggaatatgcaagattcgtgtgtaggttacaaaaatctaaccttgtttcttaatacagtgattttttttctttctacaatgaagagtacattttattccttataaattcacaaggggaagactaaggatgattgattttattgctgtttataatgacattagccaataaacagaaagcttttatagttcattaggaagaatgctacactcagaatcaaaggatgtggatttccacccctgccattcagtacttacgtgactttggacaattcatttaatctcttcaagattcagattccttgccttcaagatgtagaaagtgtctttgccaaaggttttctgagagaattaagtatcatcatgtgtatattagtgccctgaaaaccataaaatactacatcaatgtaagctagtattatcatttagaaagtgtagagtatgtaaaatagcaaaatgcatcaatgttggcatttaaaatatttaaataaaaacttaaattccaaattgtatgccttgctttatacatatataaacattatatatacccgaaatataccacatgtatgtgattcgccatacataggttatatagaacatggcaaaaccagctaacagataggtcctatctatagtctatatagatctatctatctatctatctatcatctatctatctatctatctatctatttttttttttttttgagacggagtcttactctgtcatccaggctggagtgcagtggtgtgatcttggctcactgcaacatccacctcccaggttcaagtgattctcctgcctcagccttctgagtagctgggactataggcgcatgccatcatccccggctaatttttgtatttttagtagagacggggtttcaccgtgttggccaggctggtcttgaactcctgacctcaggtgatgtgcccaccttggccttccaaagtgctgggattacaggtgtgagccaccgcgcccggcctctctttcaatatttttaaggaatgtatgtgtggatagtacttagtttgcacttttctaaatgttaatttcactaactatactgaaatacctcatatttcttttgtcttgtaggaaagtactgtgaacagtgttatctgtacacgaacatacgagaaagtatcatcaaactcagtctcaaactcttaaggctttctcaagctgtcatccaaactactgaggttgtttaaataaaactccaaagtaaaatattacgactattaatatgagagagcctttctttgcacaagcatcaataattttgcttgccaaattgcacatgcctgtatcatgtagtactttggcattcgcggccatgagaatccaggatgatatatcctgttcaatgcaaggctgggatattttcagagaggcacttcatgttgatttttttcttatgatgcattttatgtccaccctctaaattcaacataatctgcactttattgggaaaataatattttttaataaatagaatacagcgcaccttgcaggtacacctcagttatatatgaaaagataagaaaccatgtctagaactaaggcagtaattgacatcctaatgtaatactaaactgttatgacagagaactccatatccactaccaacatcactgaaagccactgcaaagaatattctgttttattagcacaaaacctcatgcactctcaggcttaggagggattttagaaactgtgtggactgaacactttattttgtggttgggggaacaggcccgagacagttaattgtacactttactatcactcagatggtttcaggaagaattagaaccagaatccatgttgcccagttattaaccttacaaccataacaaagtgaacttagattggaacagttaggtagaaagaggtttatggtgtacaattatgaaccaagtgtaatactacattatactaatgaataaacaagcttccatttgtcttaaaatgtgtagcaggatgccacagctgagtccagatgaggatatagagttttaccgtttgaacctgaggcctgtcattgcctatttgtctgaattgatatatgggggatctcagtcgtctggtagatgtggaagaagtgcttgtttattttttggtgtactgaaatgacgaagaggacaatggaaggcacacaaagatatctgtaccctcagctacttggactggacagagagaggattcgaggcagacgctgaaagagcagttttcctgaggccctgtgcatggctgtggatgtgagcagctctactgcaggcccaagtaacagcttgctgcaaagacagaggagaagcagtccccctattggaaaggagcccagcactgctctgacacctccacagtcagtagctatgggaactttgaaaaacggtgctcctggctttggcattagggtgtcttgcctactgtggtcatgaagatactctcataggcaataagaaccaatgcaggaagccttgtgctgaagggatagttagcagataccaggagaacccaggaaagacatccctgatgactctcaggaacacctgggggccaggggctgggagaaggatggactttcaagggctagagtttttcatgaacaggagcatgacattggatgtaggtgttaatatgatttcatttgtcaacaatctgataaaatctagggatgtttgagtactcaactgaaaaaacaacccacaaaaatacaacaacagcaactgcacatttccaggagagatgagcagcatgcctcctgtcttctcatttcctttatgcagttgagaatcattaaagtagaaaatcatttactgtggttgatcgaagtgcatatctctcagggatggttgggaaactgatctaaataaaccaaatcaaacaagacataccacagctcctgagtgatgttgtaattcaggatttgctgcacatctgctgtgcaccagacactgcatgagagccggggatagaaggagaatgaagtcatgcttgctgatcttgatcaactccatagagaagtgatatattggaaagacatcacatgggtgtactaatctccaggaatgtataagcaacagattataaaacaaatgtttcttttcttttttctttctttttttttagatggaatctcgctctgttgtccaggttggagtgcagtggtgcaatcttgtctcactgcaacctctgcctcccaggttcaagcgattctcctgcttcagcctccctagtagctgggattacaggtacacaccactatgcccagctatttttgtatttttagtagagacaggatttcgccatgttggccaggctggtctggaactcctgacctcaactgatccatccacctcggcctcccaaagtgctgggattataggtgtgagccacacgccccgccataatacaaatgtttctacttggaaagaaagatttaaaaccactttcttggtgaataattgccttgcccaggatggaagacaactagcaatagggcggcagacatatcagcatgaatggactcctatcactccttttcatgacatctctctttctgggccacagcctcagtgcagtttgcattaattcagctcaagtcagtaatcatcagtcaagatatttaaggaatatggagttattcctagtgaggcataacctgttctttttaagctgggaaaagtctggggttttaaacaaaaccatattatttgattcagacgtagccaaaatattgctagaacagaaatttaaaaaacaccaactaaagaaagagaaggcggagacggtcttcgccgagagtcgtcggggtttcctgcttcaacagtgcttggacggaacccagcgctcttcccctagcccggccggccgcccatagccagccgtccgtcacctcttcaccgccccctcagaccgccccaaggtccccccgccgccgctccagcgccgccgctgcagccgcctctctttagtcgccgccatggcgaccccgtccacctcgcaggagcgccaggactacaaccaggactcagaggccgccatcaaccgccacatcaacctggagctctgcgcctcctacttttacctgtccatgtcttatactttgaccgcgatgatgtggctttgaagaactttgccaaatactttctttaccaatctcatgaggagagggaacatgctgagaaactgatgaagctgcagaaccaacgaggtggccgaatcttccttcaggatatcaagaaaccagactgtgatgactgggagagcgggctgaatgcgatggagtgtgcattatatttggaaaaaaatgtgaatcagtcactactggaactgcacaaactggccactgacaaaaatgacccccatttgtgtgacttcattgagacacattacctgaatgagcaggtgaaagccatcaaagaattgggtgaccacgtgaccaacttgcgcaagatgggagcgcccgaatctggctcggcagaatatctcttcgacaagcacaccctgggagacagtgataatgaaagctaagtctcaggctaatttccccatagccgtggggtgccttccttggtcaccaaggcagtgcgtgcacgttagggtttcctttaccttttctataagttgtaccaaaacatccacttaagttctttgatttgtaccattccttcaaataaagaaatttggtaccaaaataattaataaataaaaaattaaaaaaaagaaagaggaggcgtttaggtttatttaacagtagaattaatgttgaatatttcctgtctataagtttgggaaaatcatgttttatttgaataagtcaattgacaacctgagatggaaaatgaaataataacaatgataacagctgttattgagtcttgctaagtgtcaggcactatgtttaaactttctatgcataacttcattttctctttgagattaaactgagactcagataggctaaatggtttccttaaagttcctcagctaatcaataccaaggccagacttcaaaataggtcttaatttctggagaagcatgccagaatgcatctccagaaatcaagaaaataattattagagtttcttttagagtctttttatgtaataatgaatatgataaataaatgcattattaaaactactaacctgaacttgtaaagcctgagaaatccaccctacatgaactcttatgccctgaactgatcagaaagattactttttggagctgtagatttaagaagcagaaaacagctgggtgcagtggctcatgcctgtaatcccagcactttgggaggccgaggtgggcagatcattggaggtcaggagtttgacactagcctgaccaacatggtgaaattccatgtctgctgaaaatacaaaaattagccaggcatggtggcacatgcctgtaatcccaagtacttgggaggctgaggcaggagaattgcttgaacctgggaggcggaggatacagtgagccgaaattgcaccattgcactccagcctgggtgacaacagcaaaactctgtctcacatgaaaaaaaaaaaaaaaaagaagaagaagaagaaacagaagcagaaaacaaccaaatgttgattaattgtgttgtggtggcacctctcaccatggtatcccatctacacaacagttaccacagagctctttaaggacactcatgctcctctcacttatttctcatactttagtgaaggaagtatcttctgggcctagcatatgatagactattcccaaattctaatttccttaagattttggattccttctctatgtcagaccaaggaaattctagaatctcagtctcattaaatatcagtctgctgttgagcccaagtttcaactaaccaagtcaattaaccaagtaaattgttagggataaattgttagaataaattgctagctgcacaagctaacaattaaatgaagagtctctggtaaatgaagtcatatgaataaagttggactaatgaagtgttgtagtttgttctccttggtttaatatccttagaatccactccaatatgtattacccagatctctgtcaatataaacgaacatctttaaattcttttagagtataacgtttcctccagggtcagaccttacccttgtcctcctagaacatggggagatcttatctaattttggttgtagtggcaaccatgtatggttgcagtgagtcctagggagaaaggcaccttcttgcaaggcaactgctccagataaggccatcaagcaaaaagagttagtcttttcagacactgaaaggcagtttgcttctactgtcaagagaggctcagagtgattctagagctccaaattttcagctgtgatcacccagatgtccccattccaagtgtcattatttcactctttcccaatgactgccctagttttcaagtgagaaacttagtgaagacgtgaattcaacttacattgtaactctaccccacacaactaaattttgcacctcattgtcagcaaagtcagctctgccattataaaaatattaattttaggtccttgcacatgctttctagttctctgaacatgacttaaactgagagtataatgatatgagtttgtcattttctttggataagaactccacagcattcaaaagaagtcattccattccattcttgccttcatggacaagtgctacagccatcaggatacacacttcatcacaatcaatacacataataattaatctaactgtgatgccattaccacttcattttctattagcaaggagctcaaacctactttgaagagcaaggatgcaaccaacttaaaccacaaatctcatctgctatggtttgaaagtttgtacccactaacactcatgttaaaacttaatccccaatgtggcagtattgagaggtgggacatttaagaggagattaggtcatgagggttctgccctcaagaatacattagtccattcatggatcaatgaattaatgagtcagtgaattatggtggctttgtaagaagagtatgagagacctgagttagcatgctcagtcccctcacaatatgatgccctgcactgcctcagaactctgcagagagtacccaccagcaagaaggctcttgccatatgtgatcccataatcctggacttcccagcctccataactgtaagaaccacagaagaccctgaatagccaaagcaatcttgagcaaaaagaaaaggacaaagctagagtcatcacactatttgacttcaaaatatgctgcaaggttatagtaactcaaaaacagacacataaaccaatggaacagaatggagaacccagaaataaatccatgtatttatagccaattgacttttgataatggcatcaagaatattcagtgggaaaaggatagtattttcaataaatggtgctgagaaaactatatatccatatatagaaataaaaaaaccagacccttttctttcaccaaatacaaaaatcaaatcaaaatggattaaagccttaaatgtaagacctgacactatacaactactagaagaaagtattggagaaatgaattggcctgggcaaaattttttgggtaagaccgtaaaagcacaggcaacaaatacaaaattggacaaatgaaatcacatcaagccaaaaagctgctgcataacaaaggaagcaatcaacagagtgaagagacaatgtacagaataggagaaaatatttgcaaactgttcatccatcaagggattaataaacaacatatctatggaattcaaacagctcaacagcaaaaaagcaaataaactgattaaaaatgggcaaacaatctgaatagacatctctcaaaagaagacatccaaatgggaaacaggcacatgcaaaaatactctgcatcactagttattatggaatgcaaatcaaaaccacaaagagataacattttaccccagttaaaatgtatgttatcaaaaagacaaaaaaataacaggtgctggtgaagatgtagagaaaggggaatgctaatgcactgctggtgggaatggaaattagtacagcaacagtgaaaaataatatggactttcctaaaaattagatctaaaaatagatctactatatatttcagcaatctcactgctggtatatattcaataaaaaagaagtcagtatatcaaaaagatatctggatgcccatgtttattgcagcactattcaaaatagtcaagatatggaatcagcctaagtgtccatcaatggatgaatggataaagaaaatgtggtgtagatgcacattggaatactattcagccacataaaaaaataaaatctggtcatttgcagcaacatggatggaactggaggtcattatgtaatgacctgtgcctggaaataagccaggcacagaaagacaaatatcacatgttctcaaatgtgggagataaaaacgtttatctcatggaggtggagagtagaacaatagttactagaggccgagaagcgggtgggggtgatgaagagaggttggtcaatgggtataaaaatacagttagacagaagaaataacttctagtgtttgatagcacagtagagtgacaatagttaacaatcatttattgtatatttcaaaatagctggaaaagaagattttgaatgttctcaacacaaagacatggtaagtatttgaggtgacagatatcctaaataccttgatttgatcattgcacattatatatatgcatggatcaaaatatcacatgtaccccataaatacgtacagttatgtatcaattaaaaaaaaactgaaaacaaaaattccttttccttataaattacccagtttcaggtgttttgttataagcaacagagaatgcactcagacattatctttaaaaacttactcctagtactaatttctttatcgctctgggttcagtcaggacttagaaaccatactggttatattatgtaataatagggagaatttaatatgaagatttgttaacaggtataaaaagcttaaatggcataaaaagaacattaagatttcacacaagtagcaacttcagaaagcaggtaacacttaagaatgtgtgtgtgtgtgtgtgtgtgtggagacggggtctctctatattgcccaggctgttcttgatcacctggctttcaaatgatcttcccacctcagcctcccaaagtgctgggattacagacacaagccactgcgaccagtaagagctgaaatttaggcctcagaggaggcactgctcctatggggccccatcgggttgggtctgagatgtatgagaagagggagaaggttccagatggtttgtgctggtttctctgaggcagtgccatgaggttggctcagagacaataaaaaattgtgaactgaaattaattgcagcaactgtaacctactgctgctggcagcctaaagaaagattgttgaggtcatgctgatgggagcagaaaatatgacacttgagtaaagctatgaaggcagagagaaaatgagcctggcatataactcaggggagggcattctaggcagagggaagagactgtataaaggccctaaggtaggagcatgctgtgattgaagacaagaaagatattaagtgtggcaggagtagacagagcaagggagagagtagcatgagatgaatgcagagagataatagtagagacagattatggtgtgcctcaaaggccattgcaagaactttggcttttactctgagaaaaatgggagccactggaaagtatttaggggacgagcgacataatctgatgtacagtttaagggaatcatggctgttgggttcaaaaactcagaagtaagtcaattaggaagtcttaacagtattctaggcatgtgctgatggtgccttgcagtggggatgacagtggagagaatgagaagtagtaagactttctaagttagagctacagaatgtattgatggattggatttgaaagcaggagagagttaagagtgatttaaaagtttttggtcttagatcctagaaagctgcatgtcattaaagggcattatatctaaactatgccaaaacgattgcctgattttataagtacactgaaaaactaaacaacatgagacagaacctattgaactcatctttaaaaagtggctaagttgctaacctgtttgcctagaaaacattagagacgtccctttctagccaagatggagtaaaaggggccagatttatccttccacctgaaacaacaaaaaatggacaaattatatgaaaattgttttcaagacaaaggatatcacccaaaaagaacagtgattccagagagaagaaaaatgaatgaaatcagctcattgccccagcctcttagtatacctttaggagtaccagcaccagctcagccacctgctctctgctctgaagtctgagtcccagctttataggacccctcctccaagcttttgcattctaaaactccgtccctttcttttgctcctgcagccatatgggtagtagttgagtcctgctattactccgtgttacctctgtgttatttttttagttctccaataccagcttcaacacttccttgttttaaaatctctgatgtgtgatttttacttttctgactggtataaaatgcttatgatgtgtcaaacgatgtactaagtcacttacgccatcttaaaaatttttagtaaaacacaatttggtagataaaaaccatgcttatttcataattaagaaatttatgtctcagagaagttaaataatgatgcttatagtacttccaggattgcagtctatttcactgtaaaggcttcatctcactgtaagcgctccctatcactaaagaacactgtagctggacaaagggctttggaaaaaaaaaagtgaggcttttgacattacttctaggattatggctaaagccaggattatttctatttgttttaaaaatttcatttgaatgactttgtaactagaaagcaactcttccatataaaatatatgaagaatatatattttcttccatataaaactctttccatataaaatataagacacaaaaatgcattccaaagctaagaactggtagcaatctcctccatgattggatgatctactctattttggtaacttcctaatcatttacctctggtagatattgaaggctggggaagggataaaagataagctggcctcaagaattctgtaaatattattccaatgcctacaatgaagtattacga

SEQ ID NO: 776 - DNA, 507 bp, Homo sapiens
atgattgaccagctccaaggaacatggaagtccatttcttgtgaaaattccgaagactacatgaaggagctgggtataggaagagccagcaggaaactgggccgtttggcaaaacccactgtgaccatcagtacagatggagatgtcatcacaataaaaaccaaaagcatctttaaaaataatgagatctcctttaagctgggagaagagtttgaggaaatcacgccaggtggccacaaaacaaagagtaaagtaaccttagataaggagtccctgattcaagttcaggactgggatggcaaagaaaccaccataacgagaaagctggtggatgggaaaatggtggtggaaagtactgtgaacagtgttatctgtacacgaacatacgagaaagtatcatcaaactcagtctcaaactcttaaggctttctcaagctgtcatccaaactactgaggttgtttaaataaaactccaaagtaaaatattacgactattaatatgagaga

SEQ ID NO: 777 - protein, 140 aa, Homo sapiens
MIDQLQGTWKSISCENSEDYMKELGIGRASRKLGRLAKPTVTISTDGDVITIKTKSIFKNNEISFKLGEEFEEITPGGHKTKSKVTLDKESLIQVQDWDGKETTITRKLVDGKMVVESTVNSVICTRTYEKVSSNSVSNS

SEQ ID NO: 778 - DNA, 50605 bp, Mus musculus
  misc_feature (1)...(50605): n = A,T,C or G
atctagctgcctggaggtcagtattctgctagcagccttcaaatgaagatgtagaactctcagctctacctgcaccatgtctgcctggatgctgccatgctcccaccttgatgataatggactgaacctctgaacctgtaagccagccccaattaaatgttatccttataagagttgtcttggtcatggtgtctgttcacagcagtaaaatcctaactaagattcccatctaatttaattagggtggcttatgtgagcataggttgtgtgtgggggggaggttacaagagcatttaacaatggctatgcctctgaagaaaatgattctcccttccacagcaaccatgagtcatcaatagctcctcaagagggggtaggatttttgagtttcccttcatccaagatggaatattgacatgttccatcttgtgaaggtcttgtgacagtaaccaaaagccactataatttcatgggtgcaatggtcaggtcacgtcaaagaagacagcaactagccagtaatcttctgtatcctctggctcttacaatcctattcctcttctgaaatcttcagaaggtggagacggtgacagtgacgtctcatttagaactcagcactcagtggtcacatattctcagaactttgtctagatacaagactctgcattaaccactgcctactgaaaagagaagctaataccaggtccatttacaaaaacaacattaacaagttctctgctccctgcagattatgagctcccagccatgagatttttgatcatgtttatggtactaggcatggatcccttcttgtggaacagacctcaaatccagtcagacagtaactggttactcctatgccagggttccaacaggcatatcttgccttgaaggttttgcaggattcacagctgggtaaaactgctgattttttgccccccaggaatctgcataatatgtcctagtattacgaacactgtccaatagggaggcgaccgctagcttagttccagcttaatttctctttgcaagcaaaatattcggtatcttcagcaccaaagttttactattcagttccagtgggttacaaagaacagtggaaatagcatgtactcactgggaccttagaatcttcagattcattcttttttttttttttttttcagtcagggtttctctatgaatctattggccaggctgtcttggaactgtctatgtaaaccagactgacctcaaacccagagctatatctccttctgccttctgatagcagggatgacagatgggcatcaccatgcttaaatagacttttaaaaagatttacttttattttatgtgtattccatgattttgccacatttgtccaggtgtggttggaagccagaagaaggtgtccgatttggagctgaacttacaggtattataagctgcttgacgtaggtaccacaaaccaaacttagtttttctgtaagagcagtatgtactcttaaatgctgagctatctttaaatatatactattctctttctctctctctctctctctctgcttttcttctttctctttcttttttctcttctttcttctctcttctctcttctcttctcttctcttctcttctcttctcttctcttctcttctcttttttctttttttcttcttgagacagagtctcactaaatagccccggctgccctggatctcactgtgtagatcaggctgcctgtgacttcacagagatccacctgcctctgcctctgaagtgctgtgatataatgtatataccaccacacctggctaaagattccttatgatgatggtgatggttgctgctgctgctgctgctgatttttataataataatgataataataataataattagagttacgcttgtgcctgtgaatatctgcagaagcaagaagaggcttgttgaattcccctggagctggagttacaggctgttgtgagccacctaacataagtgctcttaattactgatccatctctccagccccagaatctttagtcttcgggtcacaattgctgggtcaaagtgtagtattttctggaatagattttgattcactgctctttacagtgctgtgcaaatttacatcttcacagaactgaatgggagtccttgccctgctcactgtacctgctgtcatcatggtgggacctagacttggccatcagatatccaagggattgctcttacttttacattacattgtatttaccgacagacatgagtttgccttccttttcaggttttctggctacatttttcattttatggcaaatattatagggttttattctgtttttgtctctatcagtaatattccagattatgttgtctactgacaccttttatgcattttaaagcacatattaattatatgcagaatggattgcactagatgttcatcatgtatatagagtatttgacatagtcatcctttatcatcctctcttgcctgccctcctcctgtttctgatctcctccctccctccctccctccctccctccctcccttcttcctgcctctttctcttacttccttccttctttgtgaaccaatgaatttagttgggttaagcagattatcatggacaacttgcagttttctgaaaaacatgtatttccctcccccagcaatgattaactgcctacggatcctccaaaaggagagaactaactcccatagacatgctgtgacgtgctacctgctcacatttgagggttttgatgttctattgctgagaaaggaagggccttgaatatgctagggaagtcctttaccacagagctgcaccgtaccacctaaatttgctttcaatatttattgtgtaaaagaggacttcatatactaaggcatgtgtgtggatatcaaaaaacaacttccaggagtctgtactctccctctaccatgtggatcctggaactaaactcagaccatcagtgtctttatataccgctctccctccagccctggttgaaaccctcatcttcctgcttccatctccctactcatgtgactacaggtgtgtgttaccacacagggcaaattacagtgtgtgtgtgtgtgtgtgtgtgtgtgtgagagagagagagagagagagagagagagagagtgagagtgggagagagagtgagagtgggagagcgagagtgagagagagtgtttgatgatggagagacagtttgaagggcagacatacccaccacagtgtgcactgtgccagaggacaaggctgtggaatcagttctctccttccttgatgtggtgcagtgttttggatgtgaaatgtccacattaagagacagttctaggaaaagacttttgatgttttatagtctgcccttcccaccccagtgttctgtcctggtttgtttggtgatttttgtcaacttgccacaagcttgagtcatttgggaaggactcttaattgagaaaatgctttcataagattagcctgtatgcaagtctgctgggcattcttcttgattaatgattgatatgggagggcccagcccattaggggcagtgccacctttgagcaggtggtcctgggttgtgtaagaaagcaggctgaggaagccagtaagcagagtgccccgtgacctttgcttcttttcctgcttactgtgatgttggaatgtgcatggaactaatgttggagtaatccttttcctcctcaaattgcttttcctcacttttccccctctagaaaccacagcaaaggatatctaactaacacaaaaattggtgccaggagtgaaatgttgctgacaaacctgagcatgtgttttgaggatgtttgaactttggacctttgcgctagaaaagccatggcgtgctcagagcttaataagctgtggttgtgtgaacttggaagataatgctgagagtaatcttgccgctggaggcccggctggtgaagtttaaagagaagcaaggccattatcagggccatttgtttgttattttgaattaagaatagtagttctagtcactgggaaaggaaaatttggctgtgattaacaagagaccaaaaccgtgaaaacgaaactttgctttcctaggtcagctgatactggccatgtaggactaaggagtcagctgcaattaaagagatcagcatcactttggcaaaaacctcggagaagtgtttcctcggggccagcacacaggagctgggatacagagggggccaaagttgcttctcattctggcaaccaaacttggtaatgtgtaagagctacccaagtggtgctggttttgaaggcctgaaaggagtcatgcagaaaagctgaggttttgacactgtggcaggatcctgaagagagtctagaagaggacgttagtgaaggtgcagcctcagtggcagtaaaagcctcagtattgaccggatcatggagcagagttgaggtgtggcactgtgaagcaaggtcagagtccccaaacagagcccaggagaagctagtgataaatgtgcatcccatttgcagtagagacagcagacttttggagaggtcagtataatgtgacggccatcagagtggagcaagcctgagcctatgagacaaactgtgtgtacggtatgtagcagacctggagacatggaactccctaagccctttggaggccagaggatcctgagtgggttccagaagtttctcacggagcttttatactgttggactttggctttgtttaggttcgattgtgactgtgccctggtcatcccctcttggattaggaactcagttaacttattttgattttacaggaacctagttatgaacctttagatattttagagaaacgttggagttttagaaatattggatttttagaaagatattgaacatttcaaaaagagtccatatgtttagtgtctgactttttaaagactgtggtgattttgaagttaggatgttttatatatgatattaataccaatatatgagatcctggggataggcaagaaagggaaggatactgttaatagtgttgtattggtgtgtaaagttaacaaggggttaatggtcctgtttttttattttatttttcagtgtgatataagctagagtcacttgggatggaccctcaattgagaaaatgcctccataaaattggcctgtaggaaaaatctgttaggcattttcttgattaatgattgatgtaggaggatccagctactacatgggcagtgcctcctctgggatggtggtccttgattttacatccaagtaggctaagcaaaccatgatgaggaagccaataagcagggctcctgctttgagttcctttgttgatggactgtagtgtagctttgtaaactgaaataaacttttccaagtcaatttttgtcatggtgttttatcactgcaatagaaaccctaatttaaatactatgagtagaaaaaatgtgatctctctgcccctgacttccaggtgagccctagacaactgttgttgtgtctaacctatctgaatatctaactgtattctcttctaagttgcttgtgctcctaagatttcctcacagtaggaggaaagtaactacacattccagggatctggagcaggacaagcttgcatcatcggtggcaagctgccgagcgatcttcctggtcgagctgttggttatttgtctcatagtctgatagtcttagcccacattggtgtagaactcactaatagtcaaggaaatcatctggcccagcaataagtaagtaagtaaataaataaaaacagatattgtgatggtttgtatatgctcggcccagggggtggccctactagaaggtgtggccctggtggagtaggtgtgttactgtgggtgtaggctttaagacccttatcctagctacctagaagccagtattctgctagcagccttcagatgaagatgtagcactcttagctccgcctgcaccatgcctgctgggacgctgccatgcttccgccttgatgataatgggctaatcctctgaacctataagccagtcccaattaaatgctgtccttataagagctgctttggtcatggtatctgttcacagcagcaaaaccctaactaagatagatatacacatataaaagcatgaaactagatacttacctttcacactgcataaaaatccactctgaacagatcaaagacattaatgcaagatccaagactttgaaactgttagaagaaaagtaaagcaaaagatatccaaaaaaagcatagacaagggctttctaataggattacagttgcttaggaaataatttcaataactgacaaatgggacctcatgaaattgaaaggctcctatgatgcaaaggaaatacttaataaagaacatcctggattaatatccagacaatacaataactaaaaaactgaacaagaataactcacaacacacaaactttatatgtcccagtacaggggaacgccagggccaaaaaaatgagaatgggtgggtagggaagtgggggggggtatgggggacttttgggatagcattggaaatgtcattgaggaaaatatgtaataaataaaaaaaaaagaataactcacacttacttactaaatgggctaatcgaagtcagcagtctacaaaaattgtatacagaagagacctgatcaatatgtgagaaatgtaaatcaaaacaaatttgagattctattgtaccaatcagaaggtcagagaactaatcctggcaaggatgtgaatgaaagggaactcatattcatagctgttgtcctgtaaactagtctggcatccatggaaattggtacagaagtttccaataaactataaatcaatcaaagagacatttgcacattactgtttaatacagcactattcatgattgttaaatgatggcaccaagtcacctggatgaagaaactgtggcatgtacatagaatgggatctttttcgccacaaaggattaagttatgattttttttttttttgagacagggtttctttgtgtagccctggctgtcctggaactcactttgaagaccaggctggcctcaaactcagaaatccacctgcctctgcctccggagtgctgggattaaaggcaagcgccaccactgcccggctcaaaggattaagttatattgtttgtaggaaaatacacatacctggagacaatcatattacattaattaagccagtctcaggaagataaatctcatattttctttcatttgtagttcctatggctgttgactagtcttgtgtcaacttgtttcacacactaacagagtcatgtgaaagtaggaaaccttaattgagaaacatgcctcctttaagactcagttagtgattgatgggggcaggcccagcccactgagagtagctccaccgttgggctcgtggtcctgggttctataagaaggcctagtgagcagcaccccttcgtggtctctgcattagctcctgcctccaggatcttccctgtttgagttcttgtcctgttttcctacagtaatgaaaatcctttcctcccaaagttgctttttggtcctggtgtttcactgcagcaatagaaaccctaactaagacactagacatttttttttttaaagatttatttatttatgtaaatacactgtagctgtcttcagacactccagaagagggcgccagatcttgttatggatggttgtgagccaccatgtggttgctgggaattgaactcaggatctttggaagagcagtcagtgctcttaaccgctgagccatctctctagccccaagacactagattttatataatcacataaaatcatgaatgtatacagaacatgaaagagaacattaaagtagaagtgaaattgggaagggtaactaaatgggagatagaagaaatgggtgggaggatataatctgtacctgtaagaaaattaaaaacaagattaaaatttcaaaattgaaaaaggattatctgatatcaaaatgccagaaggacagcaggttgtggggttttttttttgttcttttttttcactttgaaccatagctaagattgtctctggcacagagtgtgtattcaaaagacgattgttaaataaaactacagagatctgaatattgtcttaagcaacagtggttgagaaactttacgtaccagcctgtcctgtggctagacccaagcaacgattgataatggtaggtagcacaacttcacaggtgtcaagttcagacacttttaaactagaaatgtgaatccataaagacttaaaagacttccctgaggcttgtaatccattcacaggagtttaggaagcactaattaatgttttgttaaggctacctttgctttttagcttcagccatcttttcttggtaatggcattttgcacaaagtttagactttgcagagctttaatggcatcagtgtgaatacattaaatttcagatggtgaattttcaataggtaaagacatattttcaccgactggctcaaaataacctgtcattacttactaattctgaaaatactatatgtcttttcttaataggcagattaacattagcaaaaacagcgaattttcctttctggattactgagtcaccttttattagaatattgggcaagtcttcacttactcagccagataggttgtgctgtactgggtatgccccttggacttagtatatttactttttttttttttttttcctgctttctacattcactgtttttaatttaggctcaatgttctcttaccactaatccctgtcttggctttgtgaataaagcacacagactggtttttgcctgtaggtgagatggtatttagagtcttgttcttgttttctaccaagctttactttggacttgttttcattttgggttttaataataagataaccaagagcacgggaacattaagaaactcaagggatggactcttttgttgttcttcttcttctttttttttttttttctttttaagtcaaggtttctgtgaagctttagttagcctaaactgggcttgaacttgaaatggtctgccttcagcctttacctacttagtgctcagattccgccgtggcggtctggtttataaattcacttacgaaatattggagataatagcgtagaggtacagtccggtgtggtgtcttccacatcctttccaaattaaagccctttcaaattctttttaacaacaagaataataacaaagtccctgtaactttaatgtatgagcaacacgtcagaataagattgtagaaacgaagatcaaaaaggagtgtggatggatgtattattttcagattagcctgcgagacttggataacaatttcagaaatactttggaaaataaaacgtacctagagcaactcctcggtaactagtatcgataaaacaagtatgtctttactttgataaatagaaaacagcattaacaaaacttcatgatgaactggagaactctcttaacacaagtctctgacaagagaaaagacaaaattcatttcaatgtcaaatcacttaggccaacccaacaaaagcacttcgcatccctcgctttgctagaaagcggcactgaaaagaaacgaacgaaatccagagaggccagacagtgtcgacgttcatagtaaaaactacaaaaaaacgtccgaagattctgggtaaagacgcacagacgtggatgaagggttacaggttgttttatcagacctggaagacttgctgaagataaactattctgttcgcgtgtctgcacacagaagcagaagcccttcctgccgcgggaaccctgggaattgtagtcgcggagccacgatggctgtaaatttgtttagcactccgtggacggcgagcccttgggtccaattcagtgttctgggtcctcataggtccggtctagctcaccaatgagctactaggtttgagaacatcccgcctctggttgggtgtccttcctcacgttgcttcattttcagccaatgggataataaagccagcagaggtgacagggtcaccgcggagcctgcagctcctccgccgccagcgactcagccctgtggttctttgagtcgggccgtggctcggggtcttcgccgcccgttgtccgccgtggtgggtgcggctctgatgctgcggcaggctccggacgcccggagctctggagggtacgtagccggggccgaggtggggccgaggggccgctgctgcgcgggccggccgctgcgcccgcctcctgccggcatcccgcgggctgcctcggacggctccggacgtgctcttctctcctcttccttctgaccagccagcccgccctacgagtagcgggtgtccatgtcgcggcgttctttctgtaaatctgcgagcctctgcgcgcaggcctccattcaagagaaactcgtgtacacaggtggtgggcatttgtgcacttagctgctcctttggtgatactgtctcctcagcgcttgcagtagaagtttcccactgggttagttctgtgcttgcatggtacttgccagacattttactgtcttgcctttttttttttcccaccctgttacccgctcaaaactgctacctgaagaaactgaggcttggagacggtaattcaattccaaaagagttacagttataattgcaaggagaagccagatcgggtctcggcgtttgatagtggtagttgcttttcaacccggcttaatcattaaggatttaggataagtgtgtgcccgcagcagctcttagcacgtgagggctaaatacttctattaactaagtggtgattcttagctataagaaaaggaatacctttctgacatctgcccagacactgatgtctcgcgtgtctctaactccgtgcttcaagacttcttgcccgttggcatcctcatctggaagctggttggacatctcagattcccagacccacttacacccactgagcttgaacttacttttggcaaggtcccttaggtgatcgcagtgtccttaaagtttgcgaagggttctgtttgtcaacatagagccaaggaagagaaaataagtttgggtcgtgatggtatgcctttaatccctgctttggtagctattggcaggcagatccctcctagtttcaggctcatctcaactacataggtcagccagagctaagtaaggagaagaaaaagtaaaggcatacgtcctatgcactgtgacctctactcagactgagatacagaaaaatgagaacaaagcttttgtcatttgcacgacgtttcccttttcagaaaatgaatgtgtctcttgagagttttaacttagccgtcccaactcttaaagtagacatcaatgttaactgtttcataattgtcttgtaattgacaccaggtgcgggctttggaagtaaaagagcaaattaagacaaaggggatgctgatttactgttgctggctagttagattaaaagaaccttgtgctctttatattcagtttggcaaggtctgtgtaagccccacccccagtttcttccatttgtcgtgaagatcttcccgttagttttttgttgttttttgtttgtttgtttgttttttgtttgttttggaaggaagggtagaattgctgctactcccagttttcccagtttattcatttggttatttgataataaagctgaaacaaactgccagactcacttatcctaattcccaatagttaaagatagtgtttcagagagttttagtttttagtgttttaataataattaaaaaatattttctatgactgttttgactgcatatatgtctgtgcacatgcctggggccagaaggagggcatcagatcccctggaactggaggtagagttgtaagctgctttctgggtgctgggacttgatgcctggtcttctggaaggtcagtcactattcctaactgtccagccatctctagccccactttcagtgctgtgttcagaggcattcatttatacagcagtgtaaagtttcaggctcttgtttgcaccagaaattatttgatgtgcataggtcttgggtcttgccttcagaaacacctactcatttggataggcccaaggaaattgtattgtttgacgctgtcaggtccacgcttcttgacattagtgcttttgatggaaaatgcaactagcaaacagatgaacaagcacacttgtgtttgtgctaatgtggtgttcattacagaaggaaaagggtttccatttgttttgttttaaccttttatttgcttgtggttcattagctactataaatgtgctcaggacagcatttcaggttatttaaaaattattgtctctctttgctgtgtgcatgtgtgttgtgtgtgtgcacacacttgtgtctgtgtctgtatgaatgctgtggaggctggagatcaactttgagtatattcctccatctcttactcagccttcctttttgaggcagggtctttgcggaacctggaggagctaagctggctcaccggtgctctgccttctacctgcctctctagctccagcactgggatcaccagatgtgtaaaaccaagtgcttgcttttgttgttttatactggggcttgggattcaagtgcaggcccttgtgcttgctcagtcagcactacccactcagtcatctccacaacggtcagtctgtgcatgtgtgcacatagggtgcacgtctgtgcatgtgtgtggaggccaaggggcttcctcaggctccctccaggttactcttcgagatggggctgtcagtgagcctccaaggatccacctgggtgtttctctctagctaggaccgcatgcagcactgcatccagcctcacattggtgttggaaatgcaaactcagttttcgttgcatagcaggttctttatcaagagaactatctttccagccctaaaattattgttttagtgtggtacagaataaataaatttttacattagcatacaaagtaatggattccatgatgatatcttcatacatattgtatgttgctctcattaattcctttcctacatttattttgatttctgctaaatttggaatagagaagtgtggagaaaattcctgcagtaatcacatataactagttttccagcctgtgaaggaaaatatttctcttaaacaatttaagttgatagttaatttaagttgatagctaacaaagaatatttagtatataaattgggcttcaagttctatcttaaaaaagattaatttttaattatatgtatttacatatgtgctcatggaggccaaaagagggtatcagataccctgggaatggagttacagatggttgtgagcaacaaacatggaagtttagagctgaacttgggtcctctgcaagagcactttgtgcttttaaccactcgccatctcttcatctccaagttctaccttttagcggtaaccccctgatatcctgtcactccagaagcaggtagagaatattgggtgtctttgtcccagcgtcctgccttgcgcccctccctcctgtttttcttttattgaatgcatttatggcactagggaatgaaattagggtctcatccccaggccagttgctgtcttcctgttttgacaggcgtggtcatgcactcatgcaatctcagcactcagggagctttagcagagtgggaggttagctcgggctgtgcactgagaccttgtatcacaaatcaaagtaaggtaaaataaaaattggttatgtgagctcagcaatctgcagctaaaacattgattatttgaaaaggttcagccacatagtcaaaaaggggtgtctgtaacctgatgccatccagatactaaaataaaatgaacttctgacattgaatagccttgctttgaagttttatgttaaacctgtcatttggagagcaaatccgagaactcctgcctgcttttcttacctcgtttaaaagttgtcattgctgtgccatttgacctacaactctccttgttttggtgttgagtttctgacccttccctaggtagaccccagtgtgagcccttatcagcagggtgtgaggactggaaactttaagatattttgactgcacgtcattctaaaggaaggagaagattatatataacatttaagggatgatctccattgagtagttattgaaggatgacagataaaaacagagtgttacagtgtcaaagcctggacactgtgaaaaagccactgtttgctgtgtttggctttgttgtagtgtgtgtgtatgtgtgtgtgtgtgtgtgtgtgtgtgtgtgtgtgtgagcatgcattcatttactgtatctaggtttatgtacatattggtgcatgtatgccaccatgtgcggagggtggaggtcagagacaagttgtggggttggttctcttgttcctctgtttgggttccagatgtgggacttagttgtcagctttggcagcgagtgcctgtaccatggtctcccagattgcttggttgaggcacagattagagagaagcccttttttattgtttctttctctctctcccttgctttccttccctgtctttggaattgaactcggaaactaagtaaggtgtgctaggcagtgctctgccacttagcttgttccttgaacaaagtcttcattttgagtcagggtctcagtcagtcacccagggagccttgaacttgagctcttcctgcctcagtgtctgaggcagcttgcattgcaggtaggccacagggcttggcaagggtggtctcctttgctcttctcctttgctttaggagatttcacagtttgctgtgcatctctcctcaccccctccccacagaggagtaagaaaaacccaggctgtcagctcaccactttgccttgaggcattttttttttttttttttaggcctagaaaggtcctaggagggaaaagtcctggcagtgttacagtttgaaaaggggagcaaaggttacaagcttgtacgtaaagaccgtgcttattggaaccttagtgttaaaatatgtattgctaaaatgggatttactggagtattgaggatggcatatgtgcttttgcatatataaataacttgattgcttccttcagcttatgttcattttatttttcacaagctttagaattgccagtccttatttttgtgtgtgtgatttagattcatctgcttctttctaaagatattataatgtagttacttaaaggtaccagagctaggcacagagggtgcttgcttgtcatccaagcttttgagaatcagaggcagggggataatacacggacagcatcagcagcgcagtgagtctgaggccagtctgcactgtgtaagtaaacagacaaatggaatccttgtctaccttggcagacgaggactgattttgtcaacctgacttctactctttttttttgttgcagaatttaagaagcttttattcatgtgcatgtcatagaagatgaattcatcctcttctactatgaatgaagaacctgatgctctatcagtagttaaccagctacgggatttagcagcagatccactaaatagaagagccatcgtccaggatcagggatgtttgcctggccttattttatttatggaccatccaaaccctcctgtcgttcactcagctttgcttgtaagttgcttttaatactttgtgttgtggttttaataatgcaaatacgaattttcaaagacctttgataacatggtaaaagactaagacattagatcatacagtctgtattctggcatgtaaaaaacatggaaaccatggcatatatgtagttcttcaacacaaatagcaacatgttgattttgttttttaatgtaaatggtaactataacacatatagttataatatgttctgacccttggtattttcagttaacatggtgatctgttgtttggttggttttcttttttggggggtatttcttttgggggggggggcttgagacagggtttctctgtatagccctggctgtcctggaactcactctgtagcccaggctggcttcaaactcaaaaatccacctgcctctgctgcccaagtgctgggattaaaggtgtgcgccaccactgcccggcttgtttggttttctttttgacatgggatgtattgttgtgttggctgggctgttctcagctcttgggcacaagtcatcttttgactgcaggtatacatacatcgtcacacccagcctattactattttcatcccgaaaaccccctgtgtatgttgaatgtatagtgtgtgtagctagggctcaaacccagcactttatgcatatttggcaaaccttctaatgttctctaggtcatcaattaagagaattcttgagttctgaagattactctttagtgcaagaggttaaaaatcagggtgtcatggatgttaagcacatgttgtactgaactcacccaaaagatacatatatttttaaaatttcataatagctttctttgttggagaggagaataagacatcttactttgcatcaccttctcacctagaactcactatgtagtcccagactagacttgcagtagtcattgtggcccagcctcccaagtactggggctacagatgtacactgcctcatctgacttacaacagctttttcagatttgacttttatgccatcataaaggtcatgcatttaaaatatactcttgagtggctttattcacagagagtggtacagccatcattgtagtcaattttagaacatttttattttgttctattgtttgagacagtctttttatgtaatctacctggagcttgagatcctgttggtgcaacctctcgagtgttgggattataatgctctaggagggcatggccacatctttctttagaagtttttatcacccagacatcaccagactgtattggtcacctcttactccccagtgtcagccccattatgtaggcaacaccgatcaatgcatttgctattttgcaaaaatgcctaaagagtttttatgtagatacaatcatataatatgtgacttggtggcatttcttttatttgtattatattggaacatatctatattcaacaagtttcagcgctttgttcctttcatgtcttgagaacattccattgcgtagacatacactgtttcgtttttgtttatgcattcactagttgatgggcatgacactttaatataaggtaaggaggacagataaggaaagagaaaatatgcagataaaagctaacaattcaaaaggaattataggaaacatggaggctagggaaacatgttaaagagcaacaagacatcagacagatccagaatggaggaccttcaatggtaagtaatacaaaaaggacaggcagctgggaagagagtgcagtgatgacagttgtgtgtggttttaaaatcctatcgcctttgctgggggttgcctgagctactagcccctcctggcttcccttttgtactacccgcctgtggtttcaggaggcgaccgcactatcagcccactcctctctttggataaaagacacacacacacacacacacacacacacacacacacagagttaattcctttaaaattatcttcttggcacaattgctgggcacagatatttcctgcctggataagtgtgcccttaccaatttattatctccatctttccaaacctgccctaaacttagtggctagtcccacctggccctgccagacatccttggccacctgcctgcagcagaggctgcagaccctagctctccttgaggccttacataattgttgtgttcttcttcctccaaagcatggcagaaaaacttctcttccttgcatcttttcctcctgggacctagaagtcctacctgtaccttccacccagcaattggcccctggccttctttactgacaaatcaagaaccaattggggaacaggactttaacctcagagcctcccttacagatagttagttaccttatacattttatttaagagatgaatcagtcaaatgttatttgtggacctgacttatatcctggtttaaatgaattcatcataaacaatttttaagtgactggaagagaatgtgcagcatatggtaaatggcattaaaaagtcattatgaaggctagttagactcagcagttaagagctcagactactcttacagagtaccttagtttgtagtacacaggtgtatatataagcaaaatacccttatatgtaagataaaacaatttttaaaaatgtcaagtttttgcagctaataagatatggtcagtggctggtaaaagtgcgtgtgaccgaccaatcctgatgccctgaactggtgtctagaacctacatgttggaaggagagagcagacctctgctagctgtctcatgacttccaggcagtctgttctggtgcaggggcatgcacacaaatggaataatgtaaaagtcaacttaaaaaaattaatgttttaatgtgtggtgttaatgttctcatgtgtagtggcacaaacctttaatcctgactcctaaaaaaggcagaggtagacagctcttgagtttgagaccagcatggtctcaaactacatagtgagttctaggccagttagagatatatagtgagactttgtcaaagcaaaacaaaacaccgtgctattgtggcattagtaactaggcaataaaaatgtgttgagacttgaagaaaaggttgttactttttaaaaaagtcatttgtaggattttcttaagataattaaaagctaatttcttcctgagcatggtgtcacacacctttaatcccagcatgtgggaggcaggggcaggttagttccaagctggccaggtatataacgtgagaacatctcaagacccaaagcaacaacaaaaaaccaaatttcttagagatgtagtgaagtagatcagttatgacaggagagaggtgaaaccagattgtccagtgcctgatgctgagtgatgggtacacggggtcaccacacattgtctttatacagaggtatgctccatatgtctataagagataggtctgtgttggtaaactttgcacatagaaggtggaggcaggagagtcaggaattaaaggccagcctgggtcacatgagataagctgttttgatcaaataacagcagaaacaacgtaagggaggaaaggttttttttgagtagttcatggggaaggcataccaagagcagcttagttcatgagttcaggagatgagaacatgtggcgaagcaactgagcagaggcctagggatgggtctactctccccacaattagtttaggcagactgtcctaaaagagtaccgacttcagaataggggtccaagctggctcaactcctcctactctgtggaacctgtcctgtctcacgtttcttagtttgggattacaggtgtgatgtccacacagctggctggagtaggtaattttttgaggagaatttcctaagtatagaaattagaataagctgtttactgtgggggagggtaaaactgctcatcaatgttgagaactgcttagtgcagtagtattggattaggatgatcctgtggctggattattaaactacttttcttcccacttcaggcctgctataggctctgatggcctaatagctggatttatccagggttggtacttggccaggtaagttgggcagaatggctgtaagggacttagaataggatcatggcaggagttggtaaatggtgagattataggcgccagcctgagtagaaagggagttggaagagaaggctggaaccagtgaagcctagaggctggtgggccaaagttctaaccaggatggcaagcacatgcacattttagtagttgccctttcatagcataacttcagaactttatttagttcagtggccactcccagttttataatgtacattttcaatttacttgtccatgtttagcctgatcatatgctttatttatacatgatgtgagaattacacaacaatgtgctacactttagtgtaccatatagacatcatttgtcttcaccttaggcattgatagtaaataggaaaactggttcatggcttccttgtcagcattaggcttccacctgtgtgtcttgtgttcccttttctcccatcattgtgttcttttcatcatatatcatacttcgtctgtgtttctaaggcatacatgctacatacttctttaaacaatgtgttctttcgatctgtgtatgagatactcaggattgaactagaaccccataacgttctaagcaagcacctagctaaagcatttagttagctctaaaatatatttaaaaatgtaaaatacggttgttttttcaatttgtttttcctcacttgagacctgcctgcctctgtctttctgatgctgggattacaggtgtgtgtcaccacacccagtttcagttattatgcctcttgaaagtttggaggatttgcggtgagggaggaataggaattggggtgctgttgccctgtagtccaagcttgtctccaactttggttttgtttggagacagggtctcatttatccctggctggcctggactgtaaccttgtagaccaggctggcctcgagctcacagagatctgccttcctttgccttcaaggcatgtgccactgtgccaggccttgccttcaactagtaacctcccttgttcacttttcccagagctaagagttggaggtatgtgtcaccatattcaagttcagctgtcgtttatacttattgttttctttcccctttctagtgttctttattcctaaacctaggaagatactgagatttttaccaacatcttttttattttcctgcctgaggaactttcttttaattaacatttgcggtataggtttgttattgtttccctatacttaaaaaatattgctgctgtttgtctcgtggcttatggcttttgttgttttttgtttgttttgttttttcagataaggtctcactcttatagtccaggctggcttagaaattactatgtaaatcacgcttgcctggaactcagggcaatctgtctatctcagcctcagtgtgctggggatacaggagtaagccaccatatcaggctgccaacttaggtgatttctaataaagtggtggacttgttttgagcattttttatgcttctgtacgtgtgtgtgtgtgtgtgtgtgtgtgcacactcttgtgtgtgagacagagactgagagggttcatttgtggaggtcagaggacagcttgcaagattgggttttcttcttcccccatatattctggagactgatttcaggctatcaggtttccatggcaaccccttttacacactgataatgagtaaatgccatcctgataatgtttgttgtgactttatctatgatgttttccaggaaatgattgatctatgtattacagattttgatgtattttcttttcattgttttacttgggatttttaatttcttggatctgcgggtttaaatctcaatgtttttctccgtgttgaaattgtcatccattgttgttttgaaggtttttatttttaatttttagtgaaagtctttcccctttccagtgtctctgtccaccacgtatgttagagtatgctgtcctgtaggcactgatcccttatgcccgttatatcatcccaaacaccggcaccctaccctgagctcagggtctgtttctttgagtttctggtgggattattccctcaccatgtggtcttttatgctttgaatatacagattaatacttaaacaggacttcctctctgtaaatctctggaagtcttgctgtggaagctgcagtgtatcgcagtgtacccttttatcccaacatctttacttgcaaatgttcattgtaatgattcattggtctggtttgaggcttctggcttctgatacactgtcaacactagaacctcactgggactcctcttggatattcagttgttgccctctgtcatggaggttctgtacctttggatctctgcctttatgcactgcagttcatagacaagtagatgtagttggagtagggctgggtggtagctcagttggtcagcaactcttccccatacacccactccaccagatcagctctccagcagtgtcctggctagcttacccaagggccaaggccagctccccctctcatgccctcagggccagctcacttgatcccctgctaataggatcagctctactgtactccaagggagaggtgcagggcagtgatggagagggcaaggagccagctctcctgttctcatacccttagggccaactctactgtgctgctacccaggtgagaggtaggggaccagctctcctgagtgccgcagccagtgagatactaggccagttctgctcagcccttggacatcagcctggtcccaggtagcagcccagaccagggatatccatggacatcaacacagactgttgctgctgccgggccacagatccagatataatcctcagtggcagcagggccaggacttcacgatggccccaggtgggggtacaagctactctcccaccattctgttactcaccaccctgcgtctccagttccatctctctctgcagtgctcaaagcattccacttctctttctctcatctctccaccacacacttggacatcatagtggcatctcagcgggtgggccacgtatcattttttttacctgaaaggcaaaggctcagtggaaatgtgaatgctaactaggccgagatagctgtgaatgatggtgatgaaggctggggatgatatttagatgtgaagggaaacagccaaacaacctcaaaaaagcagcacgtgagggaaacagtgacaaaaacgtgctcacggtgagagaaaaaggacctgaaaacttgaaaaagttagcctaactcagcatgtggccactagttcatcttctaattttctttttacttactctgatgttttgagatagggtctcctgtagcccagggtgtctcgagacttactatgcagtaaaggccagcctttgactcacagcaaactctcctaccttagcctccttcatggtgagattgcaggcactgccactttgcctgttttgtttgttttctatttaaaatacatttgaaaggtgtaatatagtaaaaacaggactcagttcattttataaagttcactgtatgctttgtccccagcaatttattttaagtaatgagcaaaagcacctgggccagtgatggctattggaactactttttgagattacttaatggaatatagctccttgtggccttgtcaagatgaaatcataaagtgggatagcctcgttttgaccttgcagataaggtcagaaggttcgtttcatccagcatgtttagttttcacagcccctaggaggttactttgaacgacacagttaaaggagaattaaaaatcagttgatgctgaaaataaaaacatttattttcttcttggtcttgcagtaagttataggtgacattaattttgagcagttcggatgtgtgaactgactgttgttttgtttgcaggcgctacgctacttggctgaatgccgtgcgaatagagaaaagatgaagggagagctggggatgatgctgagcttgcagaatgtcatccagaagtaagtccagcaggcagacagtgtgtcagtagcgtcctctgaggtccctgaacgatgctctgtgcaaactgaaccaagactcaaattttattttcttttttaagcgtcaggtattattttgaaattttaactgtaatagaagataggcttctgtaggttttatgtccaaaaattgtttgctaatgaatattagttttctgtgtaaccctagctgtcctggaactagctctgcagaccatgctggccttgaactcagacatctgactgccctgccttctcagagctagtatgtgccaccatgcctatctggtttttgtctttactgataaatggtaggtatttcagtccttataaatgtttatattgtatttaagatattgacatggtatgcatcctgtcatttgggaatattaataaatatttcaaaattgatttgcttttctctcctaagttttagagttaatactaggatatttgcagctaatgtgacagaaacagggaaacagggtttttttcagatttgacgacagctgagtgttcatggcctttatttagtatctctcaaatattctttcccatcgaactatctagttcattaattgctgtttgtgagtttatggtttaaggatttaaaattcatttattttctattggttaaaaaaggatattaagaaatcactcactcataggccactgtctaaaaattaaaatacacggtgtgtgtgtgtgttttattttgaactgctaatcttcctgcctttatttccagagggctggtatggtatgtgtgtgccaccgtacctagattctgtggtgcacgagtagggactcaggaatccattcatgctcgtcaatcactttatcaactgagccaagtgtgcgtgtgcgtgtgtgtgtgtgtgtgtgtgtgtaagaaaaagacgtatgctgaatgaagctttataataaagtacatgagttggtttggtaacagaccatccagacaactaattctagtcgaggatcttcgtgaggaaagtgtggtgccctgtccttgtcattacagcatcctggctttactcaaaggatccttcatcaaggtcatggaaactggaagtttcttttgatgaggttatcatgaatctgattgatagagccatttaacttgatagatataattgtatatatctgtatattttaaattagtggcatgtgtattccttaaacaggcatagttattgaagttcaaagtaagtggtacaaaaaaagatgtgggaaattagatttaaaacgagtgttgaagccaggtggtggcggcacacacctttgctctcagcactccagcggcagagagccaggtgtgactcccattcataccagaagcttaagctcggagggggctgaatcagggttgccaggagttagaagtcagcttgatctacagaggctgcttctaaaaccaagagatggctcagtcgttcagagcacctggctgctcgtcctgagggcccgggctggcttcccccacccacgtggtcactcacaagtatccaaaatgccagttttaagggacctgaacccctcttttggcttctgtaggtactgcatcatgtagtgcacaggcatacatacatacaaaacaccataaacataataaaacacatttaaaaaccaaaataatgttgaaaaattaaaatatataattgaattttaaaaatttaaattaagttcaggttatgtacatttaacctggaaaggtaatatttaccctgttggctcaaggatgtaataaaagaatatatatatatatatatggaaaagataaattggtagagtgactgaccactgtgagtttactcagaggaattaaagacattttcttggtagatcatcaaggaagaagatctgagatagttagaaatgttgtacattattgtcttaagcataaagaagggtagaactgggttgggcatacacaagaaaggatgcagtttctggttacagtatagacccaacagccatcccagtgggcagctgcaagccaaagtgtcttacagtagtcctgcactaagcagaaataacagatcttactaggggctgcttggcaacagcatcctctgcccctcagatttatggtggctctaaagctgatatacttgctattatgactatagaagaacaagtcctttatttatctcactttcctctacccatnnnnnnnnnnnnnnnnnnnnttcctctacccatccacccactcatccacccacccacccatccacccacccacccacccacccatccacccacccacccatgcacccacccacccatccattttatatgagtatgtgcttggttgtagaagtcagaggatagcttgagttaagcacctttaactgctgaattacctcactgtatggtgattccttgctccactactagtaaaatatttattacccattctaatttggtcctacaatccttttaatagtagaaataaggattgataactagagaagacagaaagacattgctgttcctttggcttctgtagattttagtatttgaaggtttcctttcaagcttcttatgttttgtttgtttttctgcccttcaagcttgggaaagtcacctctgttcactaacataagcctttgaagcatttgtgtttgaatggcgtgttaatataggtagtctagttagcctggtcagtctgcctgcgtaatgttaggattacaggcagtgttaatataggtagtctcgttagcctggtcagtctgcctgcgtagtgttaggattacaggcagtgttaatataggtagtctcgttagcctggtcagtctgcctgcgtagtgttaggattacaggcagtgttaatataggtagtctcgttagcctggtcagtctgcctgcgtaatgttaggattacaggcagtgttaatataggtagtctcgttagcctggtcagtctgcctgcatagtgttaggattacaggcagtgttaatataggtagtctcgttagcctagtcagtctgcctgtgtagtgttagggttacaggcagtgttaatataggtagtctcgttagcctggtcagtctgcctgcgtaatgttaggattacaggcagtgttaatataggtagtctcgttagcctggtcagtctgcctgcatagtgttaggattacaggcagtgttaatataggtagtctcgttagcctagtcagtctgcctgcgtagtgttagggttacaggcagtgttaatataggtagtctcgttagcctggtcagtctgcctgcatagtgttaggattacaggcagtgttaatataggtagtctcgttagcctggtcagtctgcctgcatagtgttaggattacaggcagaccatcacaggtgagctctgctgctccctgacatctcgttgggcccggggcatccaaactccttttctcactctctcatggcacattctttccctactgagctctcttcctggccctgctaatgtttcttgaaatggcattgttaatgtgcttgccagcagtttccatctctttggacctttatcttttttttttttttttttttttttttttttttgagacagggtttctctgtgtagtcctggctgtcctagaactcactttgtagaccaggctggactcgaactcagaaatccgcctgtctctgcctccggagtgctgggattaaagtcatgcgccaccaccgcctggcttctttggacctttttcaaacattgaaaattatttgtactgcagctctctgtctctacagttcaactttaacaatagctgaagctacctgagccaataaacgaaagatgatttgaacaagaattgtggtagtagtggttgaaagaaatttggtaacttgatcttgttacttggtttcctagttaatgatttcaattaaatgtagttttgtgccacgctaggatcgattatgaatctcaatcatgtttttaatgaacccaggagattgtgctggagaggtagctgagtgttccaaatgaggatcagcaggaagagagagtgacactgggcctggcttgagcactccatacctcaaaacccacccaccagtgaaatactttctccaacaaggccatactcctaattgtgccactctttatgagtctgtgggggccattttaattacaaccatcagaatgagggagagaaagttagcctggactgtgtaaaaagttgaagggagtggctggagagatggctcagcagttaagagcactgactgctcttctgaaggttctgagttcaattcctagcaaccacatggtggctcacaaccatctgtaatgggatctgatgccctcttctggtgtgtctgaagacagctacagtgtactcatatgtataaaataaataaatctttaaaaaaaagttggagggagatcttataggctaaatgctttttctacatttattgatgattcttattctttccttttcatttgttgaatcagaatcttgtgttatagattggtatcagaccttgaacttgcctcgtcctcctgcacatggttactgtagcaggcaggagtcaggtgtacgctgtttatgtggtgctgctaggaactgaatacagagctctatacgtgttagccccgcactctgacatctgaactgcatcaccagtgcccgttactggttattccaagactcattggtgtttctttctaattgaacaaggtatcaggctgaatgaagcaagactcatcaaaattaagaagtacaattataaaaccagtaaaaatgactatatagttatgcttttttttttttttttttttttttccccaaggactacaactccaggagaaacaaaacttctggcctcagaaatctatgacatccttcaatcctccaatttggctgatggtgatagttttaatgaaatgaattcgcgtagaaggaaagctcagttttttttgggaactacaaacaaacgggccaaaacagtagttttgcacatagatggtctcgatgatacggtaagacttgtagatgtggttcataggacaacaatgagaaatggtatcaccaaacatgttctttgcagtcacttgctaacgtgttctaagaaaaagttgcaatattaatagtttatacttaaggcaaaaaggtcatcttatgctaaagatattggctaatcagcatacatagcagttttaactgtaatagtaggacttaaagaatgtaagacttgtaaataggtctaattagagctgtgcatgatttatgtagatgagtcataacttaggaatgtcagaaaagagatggggtcctgtaggtgttaaaaggctctgtggttagcatgacttttcagggctcatcagtatcatggatgtgtgcatcacttcatatgtattccatcgagtggtctacagtactactttgcgtgtttctacatattggctcttagagacctgaatagagcctgtctgttataacttcttttaaagcactgtgtcagcatcttcttgggtgtatacttagtggcattgctcagacatatggtaattgtaagcttaacttttttcacgaaccatcggattgttcacagtggctgcacagtattacatttcaaccagcattgtgcgaggggcctagtgtttccacatcctctagtagatttgaggtttaatggttttgatttatagtctcctgataactagtggtgtggagcaacattttagacatgtattggtcattgctttagtggttaaattgggcttgatttatatctttcacttcagatttatatttgagggaaatattcatttcctctttgttctttgtccagttttaaatggtcttttattgctcaacattgactgtgtatactgttaaccactgagccatctctccagccccatatttgtacattttattgaagtcatttggctctgggctttgctttgtggacagtttttttgaccattaattgaatttctctacatgctttattagatctatttatcttaccctctcccctttttttagtaagttttgattgtttatgtctttgtaataatgtttacattttgttgaggttgttaatattggcaaacagttattcacattgcttgtaaagctaaatgcccttgaactaaaaattcaagttttgaaatgcttcaatgtccattttttttttcatttttttgttttgttttattagatgatttctttatttacatttcaaatgttatcccctttcctggtttcccctccaaaaccctcctatcctctccccctccccctactcaccaacccagccactcctgcttcctagtcctggcattcccctatgctggggcatagaaccttcacaggaccaagggcctctcctcccattgatgaccaactaggccatcctctgctaaatatgcagctggagcaatgggtccctccatgtgtactcttcagttggtagtttagtcgctgggagctctgggtgtactggttggttcatattgttgttcctcctatggggctgcaaacccattcagttccttgggttctatctctagttcctacattggagaccctcagtccagtggttggctcagagcatccacctctgtatttgtcaggcactggtagaacccctcaggagacagctatatcaagctcctatcagcaaggacttgttggtatccataatagtgtctgggtttggtgactgtatgtggaatggatccccaagtggggcagtctctggatggcctttccttcattctctgctctacactttgtttctgtatctcctcccatgggtattgtgttcccccttctaaggaagactgaagtatccaatccacactttgatcttccttcatgagcttcatgtagtatgtgaattgtatcttgtttattccgagcttctgggctaatatccacttatcagtgagtgcataccatgtgtgttcttttgtgattgggttacctcactcaggatggtattttctagttccatccatttgcctcagaatttcatgaagtcattgtttttaatagctgaacagcactccattgtgtaaatgtaccacattttctgtatccattcctctgttgagggacatctgggttctttccagcttctggctattataaataaggctgctatgaacatagtggagcatgtgtccttattacaagttggagcatcttctgggtatatgcccaggagtggtattgctggatcttccagtagaactatgtccaattttctgaggaaccgccagactgatttccagagtggttgtaccagcctgcaatcccaccaacaatggaggagtgtgcctcttttttttttattattattattaggtattttcctcatttacattttcaatgctatcccaaaagtcccctatacccacccccccaatcccctacccacccactccccctttttggccctggtgttcccctgtactggggcatataacgtttgcaagtccagtgggcctctctttccagtgatggccgactaggccattgtttgatacatatgcagctagagacaagagctccggggtactggttagttcatattgttgttccacctatagggttgcagttccctttagctccttgggtaatttctctactgtcttaatccacatcctagccagcatctgctgtcacctgagtttttgatcttagcctttctgactggtgtgaggtggaatctcagggttgttttgatttgcatttccttgatgactaaggatgttgaacatttctttacagaccttatttttaaatatcaatgtgatgctcaaaaaggtttggagttggaaagtaaaattttatttttgattaataaattttctctgctcatgaaataagccaattcaggccaaattacagatataaaagcagctcttgacaggttcactgaaatggggccaggaaaaaatcactatatagacggggggagggggggacagacagagagggatggagaaggatggggtggggtgggggagagagcgagctagagagagctcaaaaagaagaggaacctagggagggatggagaggaaaacggagatggagagatgggtctggggtgactggagggccctttttgtacacgtcacacacctggttcacacacctggtacaggcaggtgatgatgcagtccgttgctaggtccttgagaacaagccagtggactagcctgtgtgttaacggggtaagtgttatgggtccctggtttgaagcccaacacagatttctaaaccttattttatacgtatggttcccaagaccagacaaaagatacttaacctttcataacgttttatttttataaggtttggcagtaatatttccttctttattcccaagtttagttgttggctttttcttggaagttaaaggtttatcagtttcattgaccttttcaaagacccaaatgttgtattacacttattaccgtttaagttgggggtgcacatgtgaccgtgagcggaggctgcttctcttgagcctgtcctaggaccaagccctggcctcagacctggtagcaggctctcttaagctcatcctgctctcattagttctgtgggtttggactttttgctttgttttttgatttcgcttgtttgttttgcttgttttgagatttggtctcactttgtatccagtttgatcttgaactcaggcagttgtgcctcagcctcaggaatgctgtgtgctctagttataggaatgtgctgctatgctgggactgagaaccaactttttaaaggacaccaaggttttattgagaaataaagttaacagttcttagcagcagggagtagtccccaaaatgtgccaagagccgccttttgagaaagatttttctcatttaagaacttttttcatgctctcaatctgttattctgtctagctgcttcaaagcaactatttactttcttcttctcttccctttcctcccatccccttccccctccatgtatccacctccttcctccctcttcctcctccagttcctccctccccctctctccttccttgttcactttcttccagccccttctttccccctccacttttcccagcccttgcctctctgcctacccactttctcccatccccctcctcctctactttcttgcctgacttttacctctcttcccctcccccctcccaacagttctatagccttcattattgcaacttgaacagtcaactttccaacttgattttcatatgttccaaagccctcctcttacttttgtttaaaatggttttatttttgatggatgtggactccatgttgactttcttctactgcactttgaaatagccatacaccatgttgtgttcagaatcctgctgtcatttgtcttgtcttcctccctcctcttgctcccgcactgcctgctcctcagttgttcacgtccttactggcttgactgatgtggatgtccctttcctgggccaaggcagagcagccttgcccagccagctttagggcacacagcgtctcagatgatagggttgtgctctggaatctgagtttgaagctctcctgctagcaggagcccagtcttttctttgtgtgtttttctgtttccattttatctagcttcttggctttgtgaatttaaatttgtggcagatttgtatggattttcccatcatatcttcaaaacaaaattttctccctttttcctggatctgtcagggattcttaattatgtgctgtctgccacttgagatttcttcaagttcactggggtcctgtttacttcatcccttctcttacacttaggatagatcctgtttctgtgttccttaatatcttcgctgagtgctgagtttgttattatccttccccagtatgtcttataaacatcgttttcacagtgtattttcacgttttgacttagatattttatgatgtcaccattgcacatttacactctatcttcttgaacgtagaaacattttaggaaaattgttaatgcccctgtgcactaactccaccacttgtattgtttctgaatatattggcttttctagtttagtgtagtgtttgtttgcttcttttgaatgtctggtggcagatattttgtgctttgtggaacacagaattcatttgtatgcacagcctgtaattgctcctcagctctattctgttttgtttgggttttcaagacagagtctctctgtaaatccctgtctgtcctggaactccctctgtagaccaggctgctaccctgcctcctgagaactggaactaaagctgtgccccactatccctgctcagctttattgtgtaccgactgctgcttgttagtggttgggtcttgagctctggtttaaagttttactatgtaggaccatgcttttcaacctagggataagtttggtacactgctgaggcaatgttcttcccaccctgtggacttacagttattgtctagtgtagtccgtgaggatatgatgcattgctaacctagtgtgagccgatagagttgttctttctgctcctccccagcagagttttgctcagtctcaggttccttcctagcatccatgcactgaccatcagtcagctcgcagtgaccactgcacacctgactctggagacagtggctgtctctctgtgtggctccttcctcttttgtccttctctcattcttaatttgctttgccctgagaattatatttgctttattttacgtcccttaacttggtcctgaattcagggaggcttccgagttctggttggtttctgttagatttttttgttgctatgtcaaactacttaacagaaacaactcaagaaaggagttgcttattttggcttatagcttttagttcatgattcctgagccttgaggctttgggcctgaaatatgctgtgacaatgtctgtggatagggctagggcggtagaggtggctggctaccctagaagtgggagtatctgcaggggctttcttctattccatttttcttctgtctggggctgcagcgtaagggatgccctcacagacaacatactagagatgttcttactgggagtgttttgtgtacatgtgtacagagttcatggaggctggaagagagtgttggatcctctagaagtgaaggcacagacggttgtgagctgccatgtggattctgggacttgaacctacttattttggaagagcagccagtgctcttatttaacccttgagctgtttctctggccacaagctatgctctcctaatctcctgctcatttcccagttctgtccagttgacagccaagattagcatcagtttcattttgctcatctcagtttcttctttcagagatgttacttttccagtatctaagcatcaggaggtttttttttcaataatattttgtatttcaaattgtttaattgtttttataaagacaattcataacgtttcactttatttggggactcaaacataaggttttaaggtttagtaaataagtatgtgtgtattagggggtgcttctacagtctttatttactgtgacaggaccaaatatgttaacaaataacttagtgaaactgagctacaaaagcccaaaacatttctagaaaattctagaaattttctgataaatgaaaattgattaagtggaatacattaatatacataaaatatctccagtgaattcttgttgattatgttgagtatgggaaacagttacttttcatagttaacacaaaaattcccaaaggggtaaggttcagcacatgagaatatttggtgtgcannnnnnnnnnnnnnnnnnnnttttaaggtttagtaaataagtatgtgtgtattagggggtgcttctaccagtcttttatttactgtgacaggaccaaatatgttaacaaataacttagtgaaactgagctacaaaagcccaaaacatttctagaaaattctagaaattttctgataaatgaaaattgattaagtggaatacattaatatacataaaatatctccagtgaatcttgttgattatgttgagtatgggaaacagttacttttcatagttaacacaaaaatcccaaaggggtaaggttcagcacatgagaatatttggtgtgcaatcatgaggacctgagttgtatcctctgcatacatgagtgcacatatgcaaatacatacatgcttcccaccctcctctctcatatataccacacactcaaacctaattgctcacaaatataggccaatatacagtaattgtgaccgtgcttgccaaaatctgaaatacagctgaattgatgaggatagtctcctgaaggtcaaaacaaaaggcagtttcttaattacaggtactggatagcgataatgagaaaagacagatcgaataagatgtgttgaagtgggagatgggagaattagcaccctgctttaaagtataaaggttatgtgtaaaggtatctattaccctcctgtttaattgttgtcttgaagcttactgcctctgtcagccctagtcctgggagcttctagcctctgtacaatcggatctaggcctagaatattttcagcctctgagacttactgctgaactgtcgcaccctttcttattctttcagtactctgcctagctggctcaactcagctgttctgtcttaaactcctctcctaactgactcattcaatctggctctctcagcctctccacctttgcttggcctcaaactaactctggcaatctgttctaatcttttggcttctaatctgttcttctctggctcgtcctgccttcacctgtgtctaccttgttctctctccaacctgtctctagaaaactcttctggtaaaacttcctccttttcctgtctgtctgtcatccgtccatttgtctgcactgctttcttaagtagtttccctttcctcccttttctcatgagagttagatatatcctattctgtcaaatctttctcggattggtcactttgtctgccactcaattagacataacttcaaatggatacttccttctacaaactaactttactttcattgtttgagattaaatgtgtgtactaagggtaaatctgtattccagccagagggattaaagatttgtgctaagggtgaggcaccacagctagaaacaggtttttccagtaaacaacatagtctcggtgttcacagtgtggtcaaatatcttccaatagccatgtgttacagtgtcaatactaacagaggaaaataaaacccaaaaagataatattgataatacttggtattgccatgaatgatgaactatttataagggacaatgactcaaactccagatgcttttaattctaacataaccctaaagatttttttccaatatatttttgtttgtttttttgttttttgtttgtttttcgagacagggtttctctgtatagcgctggctgtcctggaactcactctgtagaccacggtggccttgaactcagaaatccacctgcctctgcctcctgagctcaggaagtaaggcatgcaccaccagtgctcggctccaaaatatttttattgaccatttgggaatttcacatcatataccccaatcatagtcactttccaattctttcaggtctaccccccacttcaagcccctccccttgcatgcccaaaataagagaaaaccaaatccaactagagattcttaaactagaatagactgtgtcaggcataccatatgctctctgttgtacttgtcaactctgtctcatcattaagctgcagtcagatgatagtaagtaaatgggtgtggctgtctcaggagaactgcacagaaatggctgaaggactgcagtttgatcacctttaagcttgaggaacctctgtttgtctgtttttgagcactttgtcctgttattcatttgttctttctatgatattaattagtattgggtgatgtctttctgatattagaaattattaaaagctcatattagtattgaagtttgagctaggcggtgatagtataaagtttttaatcttagcacttgggaggcagaggaaggctgatctcttgagtttgaggccaacctggtttcaggacagccagggctacccccacctccccaccaaaatggggtttgaaatatgctaggaattactggtaagttagaatccagacctagttcaattgacacatagcaatgtttcatgtcatgacatgttgttccctgtggcaccataagattataatgctgctgttgttactgtgttagatatgcttatgtagacaagcatgtaccttcattattcaattccttgcaatttccagtataggaataagctgttgtggaggcttaatgtcgtaggctacaccttacagcttatgtgtacagtaggctttgacatgtgggtttgtgtaagtctgttccttagtgttttaaaaaggacagagtcagcacagtgagtaggctatgtggtttgagctggtttctttcctgctttgataactgtttgccttcactttttcagtctcgacgaaatctatgtgaagaggccttgttaaaaattaaaggtgtcattagctttacttttcaaatggctgttcaaagatgcgtggtgcggatccgttcagacttgaaggcagaggttagtactctcaaccactgaatggcgttatgcatgaagtcgtaacttagcacagcaccatttagaattgctcctttttcccggcccaggctctggcgtcagcaatagcatcaaccaaggtcatgaaagctcagcaagttgtgaagagcgagagtggagaagaggtaaaacttgtactttactctagccctaccaaactgaggctcgtggttatttttatgattagaaaattataacatttgtagaggaatagttannnnnnnnnnnnnnnnnnnnatattttgtatttcaaattgtttaattgtttttataaagacaattcataacgtttcactttatttgggggctcaaacataaggttttaaggtttagtaaataagtatgtgtgtattagggggtgcttctacagtctttatttactgtgacaggaccaaatatgttaacaaataacttactgaaactgagctacaaaagcccaaaacatttctagaaaattctagaaattttctgataaatgaaaattggttaagtggaatacattaatatacataaaatatctccagtgaatcctgttgattatgttgagtatgggaaacagttacttttcaaagttaacacaaaaatcccaaaggggtaaggttcagcacatgagaatatttggtgtgcaatcatgaggacctgagttgtatcctctgcatacatgagtgcacatatgcaaatacatacatgtttcccaccctcctctctcatatataccacacactcaaacttaactgctcacaaatataggccaatatacagtaattgtgactgtgtttgccaaaatctgaaatacagccgaattgatgaggatagtctcctgaaggtcaaagcaaaaggcagtttcttaattacaggcactggatagcgataatgagaaaagacaaatcgaataagatgtgttgaagtgggagatgggagaattagcaccctgctttaaagtataaaggtcatgtgtaaaggtatctattaccctcctgttgtaattattctcttgaaacttcctgcctctgtcagtcctagtcctgggagcttctagcctctgtacaatcggatctaggcctagaatattttcagcctctgagacttactgctgaactgtcgcaccctttcttattctttcagtactctgcctagctggatgaactcagctgttctgtcttaaactcctctcctaactgactcgttcaatctggctctctcagcctctccacctttgcttggcctcaaactaactctggcaatctgttctaatcttctggcttctaatcttctgttcttctctggctcgtcctgccttcacctgtgtctaccttgttctctcttcaacgtgtctctagaaaactcttctggtaaaacttcctccttttcatgtctgtctgtcatccgtccatttgtctgcactgctttcttaagtagtttccctttcctccctttcctcatgagagttagatatatcctattctgtcaaatctttctcggattggtcactttgtctgccactcaattagacataacttcaaatggatacttccttctacaaactaactttactttcattgtttgagattaaatgtgtatactaagggcaaatctgtattccagccagagggattaaagatgtgtgctaagggtgaggcaccacagctagaaacaggtttttccagtaaacaacatagtctccgtgttcacagtgtggtcaaatatcttccaatagccatgtgttacagtgtcaatactaacagaggaaaataaaaaccaaaaagataatattgataatacttggaattgccatgaatgatgaactatttataagggacaatgacttaaattccagatgcttttaattctaccataaccctaaagattttttccaatatatttttgtttgtttttttgttttttgttttttgtttgtttttcgagacagggtttctctgtgtagcgctggctgtcctggaactcactctgtagaccaccgtggccttgaactcagaaatccacctgcctctgcctcctgagcgcaggaattaaggcatgcaccaccactgctcggctccaaaatatttttattgaccatttgggaatttcacatcatatacccaatcatagtcannnnnnnnnnnnnnnnnnnntttcaacaggtttttattttattttgcattgtcacacatttatttaaaaacctgtagcccttttggtagtgatggtccaggtcggttggtatttcagactgaagtttgtgtgtgtctaggtgttcaaggactctcagagatctcaaaggcaactataatggcagtttttgaaatatattgtaagataataaaagataacaatgaaaatcaagcagttattgtatttttaaatttttatttatcaacttcccgcccatccatccatccatccatccatcctccatgtctctgtgtgtacatgcctgggggagtcaggagactattaggtcacgggagctggagttacaggcagttgtgagctgtctgatatggttctgggagttgagctcagtgctctgcaagaataattcatgttcttaaccactgagctatttctctagccttgggatattgtagtataaagattgatacgtacgtacgtgtgtgtgtgtgtgtgtgtgagatgctgggtatccatccagtgactcaggattctttttaagcttgtttgaaattatctatttatacatttagagacaaggtcttactatctagtccaagctggcctgaaccttttatgtggcccaccttaaccttgaactctagattctcttgcttacatcctgaatggcaggtatcatcatgccaagctctttggcagtttgcacacataatgtatggcacatagtcttagttctatagttgcaagagtcagaggaagtacctcacctgttactgtgtaattatgtgtagacccctgagctggacaaaccagacctgcactcttgtcatgtttttgggtttggttttccagagcctcctgtagaagcttgtgttccaacctcagatctacccatattctgattttaaagaattgttacaggagaataaaaattgcttcttatagcttgcaacctgtataattactagacagtaatccctgaactatatagcaaactgaaggtaaatttcacacaggatcatttacagggttcaatgagatcatgatgttttacaagacatacttactggtatctggtggaattgttgctactggtcatgtggcacgattgtcacaatgttaacattgattcatgccctctctcctgccctctgtacatgtgcacatatgccacggcacacatgtagagacagcttctggaagttaactctctccttccatcatgtcagttcccagtattgaactgagggtgtcaggtgtagcttggccaatagtcatctgtccctgataagccatcttatcagcctctggaatctcaagagataacccaccattagcctttaattcatctactcaagactcatcaagagcttggggttgtttctgaggcttagttatctgtagtttttatctaaaattaccccttgaatccatttatccattgtcaaattttttttcccacacagatgctgaaattcatgtttatctaaaaagtacagacatgatgaaacgtaagaaaatgttaacatttaagactagtatgcaagagcttttgtactcttcatatacggtttctgtaagtctcaaagtggctttacattataaccaccaataaaaaagtcacaatacacacagaataaatgtaagtttgatggaaaagttactccaccagacactcagtgaaaggatgacagaagagtcatacagtcactgttgtgattactttttttaaatttattttttttaattaggtattttcttcattgacatttcaaatgctatcccaaaagtcccccagaccctccccgcccccacttccctacccaccaactcccacttcttggccctggcgttcccccgtactgaggcatataaagtttgcaagaccaagggacctctcttcccaatgatggccgactaggccatcttctgctacatatgcagctagagacaagagctctgggggtactggttagatcatattgttgtttcacctatagggttgtagaccccttcaactccttgggtactttctccagctcctccactgggggccctgtgttccatccaatagccgactgtgagcatccacttttgtgtttgccaggccccagcatagcctcacaaaaacagcttcagtgaagtagctggatataaaattaactcaaacaagtcaatggcctttctctacacaaaggatacacaggctgagaaagaaattagggaaacaacacccttcacaatagtcacaaataatataaaataccttggtgtgactctaaggaagtgaaagatctgtgtgattnnnnnnnnnnnnnnnnnnnnnnnnnnnnnnnnnnnnnnnnnnnnnnnnnnnnnnnnnnnnnnnnnnnnnnnnnnnnnnnnnnnnnnnnnnnnnnnnnnnnnnnnnnnnnnnnnnnnnnnnnnnnnnnnnnnnnnnnnnnnnnnnnnnnnnnnnnnnnnnnnnnnnnnnnnnnnnnnnnnnnnnnnnnnnnnnnnnnnnnnnnnnnnnnnnnnnnnnnnnnnnnnnnnnnnnnnnnnnnnnnnnnnnnnnnnnnnnnnnnnnnnnnnnnnnnnnnnnnnnnnnnnnnnnnnnnnnnnnnnnnnnnnnnnnnnnnnnnnnnnnnnnnnnnnnnnnnnnnnnnnnnnnnnnnnnnnnnnnnnnnnnnnnnnnnnnnnnnnnnnnnnnnnnnnnnnnnnnnnnnnnnnnnnnnnnnnnnnnnnnnnnnnnnnnnnnnnnnnnnnnnnnnnnnnnnnnnnnnnnnnnnnnnnnnnnnnnnnnnnnnnnnnnnnnnnnnnnnnnnnnnnnnnnnnnnnnnnnnnnnnnnnnnnnnnnnnnnnnnnnnnnnnnnnnnnnnnnnnnnnnnnnnnnnnnnnnnnnnnnnnnnnnnnnnnnnnnnnnnnnnnnnnnnnnnnnnnnnnnnnnnnnnnnnnnnnnnnnnnnnnnnnnnnnnnnnnnnnnnnnnnnnnnnnnnnnnnnnnnnnnnnnnnnnnnnnnnnnnnnnnnnnnnnnnnnnnnnnnnnnnnnnnnnnnnnnnnnnnnnnnnnnnnnnnnnnnnnnnnnnnnnnnnnnnnnnnnnnnnnnnnnnnnnnnnnnnnnnnnnnnnnnnnnnnnnnnnnnnnnnnnnnnnnnnnnnnnnnnnnnnnnnnnnnnnnnnnnnnnnnnnnnnnnnnnnnnnnnnnnnnnnnnnnnnnnnnnnnnnnnnnnnnnnnnnnnnnnnnnnnnnnnnnnnnnnnnnnnnnnnnnnnnnnnnnnnnnnnnnnnnnnnnnnnnnnnnnnnnnnnnnnnnnnnnnnnnnnnnnnnnnnnnnnnnnnnnnnnnnnnnnnnnnnnnnnnnnnnnnnnnnnnnnnnnnnnnnnnnnnnnnnnnnnnnnnnnnnnnnnnnnnnnnnnnnnnnnnnnnnnnnnnnnnnnnnnnnnnnnnnnnnnnnnnnnnnnnnnnnnnnnnnnnnnnnnnnnnnnnnnnnnnnnnnnnnnnnnnnnnnnnnnnnnnnnnnnnnnnnnnnnnnnnnnnnnnnnnnnnnnnnnnnnnnnnnnnnnnnnnnnnnnnnnnnnnnnnnnnnnnnnnnnnnnnnnnnnnnnnnnnnnnnnnnnnnnnnnnnnnnnnnnnnnnnnnnnnnnnnnnnnnnnnnnnnnnnnnnnnnnnnnnnnnnnnnnnnnnnnnnnnnnnnnnnnnntgatggccgactaggtcatcttttgatacatatgcagctagagtcaagagctccggggtactggttagttcataatgttgttgcacctacagggttgcagatctctttagctccttggatactttctctagctcctccattgggggccctgtgatccatccaatagctgactgtgagcatccacttatgtgtttgctaggccccggcctagtctcacaagagacagctatatcagggtcctttcagcaaactcttgcatttattaagagtgcaaaaagaagtaatgcatggcatgagggctagcattaattatcaacttgacaaaaatctagaatcccctgggagacaggcttctgagcatgcctgttggggttattctgattgtagtaattgaagtgaaggcccatccgttgtagtgacatcattccctgcatgaaaacctaaactgtaagtagagaagagtagctgttacttagtaggagaatcctactattaaggttgatgtccaccatgtctggatagctctctgagcttggcacagaatggaggactccctttcttagtggggcttctctttctttgtctaaccttacatggagagtgtctctgagtacagatgtgtgaccttacctgaagaatgtgcagagctctctgcaagggatactcagcactcaagtcctgctctagctccccacctatatgataactaagtactgtgttatagctaatcaacccttcttgcctttatgataattaagttctgtactttgaccaatcagtcctttccatccatatccctaagaacccttatatttttaccctccccctgaaacaataaaggagagctgtgttactgaagctgactcttggaaatccttctgtcatactcagagctattcaaaccttgtttgtcaattttgctccctctactcccatggccaatgacccccaaggaaagggagacccacaggtaactgagcagtaacaagcacttctcagtcctggttcctgattgataatgtgatgtgagcagctgcttcaagttcctctgccctgactcatcatgatggactataccctcgaactgtgatccagaataaacctgttctccttcaagttacttttgtcagatttattcctacagcaacaacagacatctcttgagtactgattaggttcatggcaaactctgtgtgtgtgtgtgtgtgtgtgtgtgtgtgtgtgtgtgtgtgtgaatggtatagctgggtcacattaggttttgaggaacatccatactgatttcaaaagtagttgcactaatttgtattcaaaagaagaatgtgttcttttccccccatgtgcttaccagcatttgatggaatctcaatatggattttgttttcactgctataatgagtaatgtatgtatcatttttttttccttaaacttactgggtatttgtatttctctggactggttaatgagggtcaagcaaaaggaatctagaataaagtggggagacttgtgtgtcgtaggtctggatcctttaatagagcttacaactccctgtaactggctccagggagatctgatattctcttctggcctctggggcaccaacacgtannnnnnnnnnnnnnnnnnnngctcctgtctgcaagcacaacatagcattagtagtagtgtcagggtttggtgcctgcccatggaatggtttccaagttgggacagtcacaggccagtcattccttcaatctgctccatttttgaacctgcatttcttttctggagcaattttgggttgcaggttttgtagataggttgatgtccccatccatctacccagggtcctgtctgactactggaggtggtctcaggttccatatccttactttgggccattttggctaagctcacccacattgagtcctgggagcctcctcattccaggtctagacgttcctcccaccccacacccctgacaactgcatatttccattcagtctcctgtccctctcagcttttctctttctccatatctgatcctgtttggtctattgtttttatgtgtatatatgcttgggtaagaagaatacactacacttctgacatgttcaaatatctgttaatccagaataaggtcattgtactctcctttgcaacctttactctctggttctcaccattgataactttgaatgtcttataaacaaacataaacttaaccaaccttttcataatgcccctgcacttcacaaatgactgtatcatgtcccatatcttaccctttgtctcaaattgttactctatactttctacattgattttttatctgaattctgcatatgagaaaaaatgtatttgtctaagtcttacttgtatgcttcatattttggttccactcaatttatttgaaactcaaatctcttatttgtagctataggcctgtgagctttcatgggtttaagtgcagcactacatgcatgagtccacaggagggtacaagagagcatttcttcccctggaactggagttggaggtgattatgagtaagatggttgcaagggaaacaaacttgggtcctctgcaagagtagtaacaatggtaaccactaagcctcatctctaagtccattctctaattctctaatttcattcttaatagatgactagtattccactgtgtgtgtgtgtgtgtgtgtgtgtnnnnnnnnnnnnnnnnnnnnccaacaacacacacacacacacacacacaaacacacacgtataccaaagtttaaaataagatagagtgttaaaagaattccatgaagaacctggagactcctagattgctacctgcttcctataatcatctcatttgatccttgtttgtttttttaaaaaaatactttttaatatatgtttgaaatcatttataactacatcatttcccctcttccctttcctccctctaccccatgccttctgcccctttgctctcatctcaaattcaaagcctcttattctttaattattggtgtgtgtgttgctaaataactaagtccaacctgctcaaactaaatgtatagtgtcacttagggtttgggttggtatgtgtatgtatgttttcaggtatgaccatttggagaagatactttctcctgctctcagtgttccttagttgcttgtaattctttgtgtagatttgaggcctcctgagttttccccttccatgttagtgtggctgttgtcatctttcttcaggtcatgtttgtgcagccatgttgctgccccattttcacattggaatgatctgtaggcttttaacagatagtacagtctgtgtcccaccccaggcagttgaactacaactcccctgggggaggtggtagtggtggaccagtgcatgggatacattataatagcattgaaatgatgttgatttgcggtgatgttgagctctgggattgactctgctcaggagagttcttgtttcaaccagccatttcataagcaatgcaaatcttagaagaagcttgtatacaggatcacggattctagtagtggactccttgttcgtcatctcagcttttgtgtggttttgtatgtggattttgcccttgtgcttatgtctggtgtatcgtcagtgcagtgtttctttatgccatccagcacaatgattggtctctgttttgaagcaaattgtggcaaatggtgatttgatgtttcttgacgtagggaatcttctttattataaccttattagcactacctatttgaaaataaatgataccgtgaaacatgttgcaggatatttggtcactctgaggttgtgttatttactgaaaaaaaaaaaaaaaaacctttttagttgtggtgtggctcagtcttagcagacacctttaagagcttttggcatgaatattgcaaacaagattaaataaagtcaattataggtcaagaggtggaacaagcaacgaatatacaggaagtgaacacaggcttattaagagtaagagggagtgaggacagacacagaggaagtagcagggaggggcattgagattgcaagaggttggttgagacctcttgagagagagggatgcctgaggaggaatgtcagctgggtgctttctctgcctttctgtagtgtctttcaccctactttctgtagtgtctagcccctgagacttcattggcaaattgagtgattgagattttgttaaaaaactttcggttgaaatgtaaatgaagaaactaataaaaaattgttaaaaaattctagtttttggtgaatagcttcttgagttctttatatattttggatatatatttatatatttggatattagtgaagatttttttcccaatctgtaggttgccagatttattgactatgtcctttgccttacagaagctttccagttccatgaagtccccttcttgatcttaagagcttgagccattggagttctgtttaggaaatttccccctgtgccaatgagttcaaggctctttcccactttctcttctattagattcagagtacctggttttatgttgaggtcctccatccatttggacttgagctttgtgcaaggtggcaaatatgggtctattttcatttttctacatacagatagctagttagatcagcaccatttattgaagatgctttcttttttccattgtatatgtttagcttctttgtcaaagatcaagtgtgtgttaagtgtgaggttttatttctggatcttcaattctgttccattgatcaacgtgtctgtctctgtaccaataccatgcagtttgttttgttttgtttttgttttgtttttaatcactgttgctcagcagtaaagcttcaggtcagagatggtgattcctgagctgttcttttattgttaagaattgttttagctgacaggagcgtgatatagctgtctcctgtgaggctctgccagtgcctggaaaatacagaagtggatgctcacagtcatccattagacggaacacaaggtccccagtgaaggagctagagaaagcacccaaggagctgaaggagtctgaagccccataggaggaacatcaatacgaactaaccagtactcccagagctccttggaactataccaccaatcaaagaaaacacatggtggaacttgtgtttcatatggctttagttatatatatagcagagaatggccttgtcaggaggtccttggtcctgtgaaggctctatgccccagtataggggaacaccaggaccaggaatgggagtacgtaggttggggagcagggggagggggaggggatagagattttcagaggagaaactaggaaaggggataacatttgaaatgtaaataaagaaaatttctaaaaaaaaaaaaagaaaaaaaatggagagaaaaaagagaattgtttttacaatccttggttttttgttttctgatatgaaattgagaaatgctctttccatgtctttgaagaattatgttgggattttgatggacgttgcattgaatctgtagattgcctttagtaggatggccatttttactatattaattctgccagtccacaagcaggggaaatctctccattttctgagatctttgacttctttcttgagagacttgaagctgttgtcatacaggtctttcacttgtttggttagaattaccccaagatattttacattatttgtggctatgtgaagggagttgcttccttaatttctttctcagactatttatcattggtataaaggaaggctactgatttatttgagttaattttatatctggccactttgctgaagttgtttatcaactggagaaattctctggtagaatttttggagtcacttaatgtatgctatcatatctgcaaatggtgatacctttatttcttctttgtcaatttgtttccccttggtctctttttgttgtcttattgttctagctagccctttgagtactatattgaatagatatagggagagtgggcatccttgtcttgttctcaattttagtgggattgcttcaagtatgtaatggggtatagaactaaactgagaattcacaacagaggaatcttgaatggctgagtagcacctaaagaaatgttcaaagtccttaatgattagagaaatgcaaatcaaaatgaccccaagattccaacttacaccaatcagaatgggtaagatcaaaactgcaggtgacaacacattttggtaaggatgtggataaagaggaacactcctccattgcttgtgggattgcaaactgctatagccactttggaaatcaatctggaagttcctcagaaaattggaaatagaactacctgaagacccagcaataccactcttgggaatatacccaaaagatgccccaccatgccaggggcatgcgttccactatagtgtccttgtttgtaatatctagaagcagaaacaacccagatatcccatgacagaagaatgaatacagaaaatgtggttcatttacacagtagaatactactcagctgttaagaacaaggaaaccctgagttt

SEQ ID NO: 779 - DNA, 1069 bp, Mus musculus
agcagaggtgacagggtcaccgcggagcctgcagctcctccgccgccagcgactcagccctgtggttctttgagtcgggccgtggctcggggtcttcgccgcccgttgtccgccgtggtgggtgcggctctgatgctgcggcaggctccggacgcccggagctctggaggaatttaagaagcttttattcatgtgcatgtcatagaagatgaattcatcctcttctactatgaatgaagaacctgatgctctatcagtagttaaccagctacgggatttagcagcagatccactaaatagaagagccatcgtccaggatcagggatgtttgcctggccttattttatttatggaccatccaaaccctcctgtcgttcactcagctttgcttgcgctacgctacttggctgaatgccgtgcgaatagagaaaagatgaagggagagctggggatgatgctgagcttgcagaatgtcatccagaagactacaactccaggagaaacaaaacttctggcctcagaaatctatgacatccttcaatcctccaatttggctgatggtgatagttttaatgaaatgaattcgcgtagaaggaaagctcagttttttttgggaactacaaacaaacgggccaaaacagtagttttgcacatagatggtctcgatgatacgtctcgacgaaatctatgtgaagaggccttgttaaaaattaaaggtgtcattagctttacttttcaaatggctgttcaaagatgcgtggtgcggatccgttcagacttgaaggcagaggctctggcgtcagcaatagcatcaaccaaggtcatgaaagctcagcaagttgtgaagagcgagagtggagaagagtttcaacaggtttttattttattttgcattgtcacacatttatttaaaaacctgtagcccttttggtagtgatggtccaggtcggttggtatttcagactgaagtttgtgtgtgtctaggtgttcaaggactctcagagatctcaaaggcaactataatggcagtttttgaaatatattgtaagataataaaagataacaatga

SEQ ID NO: 780 - protein, 236 aa, Mus musculus
KMNSSSSTMNEEPDALSVVNQLRDLAADPLNRRAIVQDQGCLPGLILFMDHPNPPVVHSALLALRYLAECRANREKMKGELGMMLSLQNVIQKTTTPGETKLLASEIYDILQSSNLADGDSFNEMNSRRRKAQFFLGTTNKRAKTVVLHIDGLDDTSRRNLCEEALLKIKGVISFTFQMAVQRCVVRIRSDLKAEASAIASTKVMKAQQVVKSESGEEFQQVFILFCIVTHLFKNL

SEQ ID NO: 781 - DNA, 50807 bp, Homo sapiens
  misc_feature (1)...(50807): n = A,T,C or G
gcttcctatgtagggtaggaaacctgtccgtatttttgtatggcttttgaagaggctgttgctgattggctgtctctcttaccctcccattgcaattgatcccggaggtcgctgggctgtcactggatctctgatgttcttgccccgggtggcacaagtctcttcctagtgagggctttcctccttcacccagagcattaactcatttactcaacaacggcttgttgggggacaactatgacagcagaaaggttgttaaaagccttgagccacgccctaagtgagcctacaagataacgaggagataacacaaactaaacaaaaacacaaacttaatcaaatattataatggaatcgaggtgggagcctgggcgcctccataatgtctcagggaatacttcctgagaagtgagtgcttgtctgaggctgaatgaaagagcaggagctttggagccgaaagggtgggagcaatggaaggtggcgattctgtcaaagggcactaatttcttcctctgagatctttccggagggtatttactgctaagctaatgaagcttgtgtttcaggcacgctggctttcgccagcctttccaaagtccatagaggaactttagcatcgagtttacgagattatatgttgtttcctacttatttattaaaaggaaaatgtcttaaagcacccctcaaagaggcatgggttaagacctgtcttttttgtttttttttttcctttccaacttcccttccttcatacttcctttcatgctagatacgctggagtggccttggacattttggggatctaggtggggaaaagagagttgaattgaacttgggccacttcgtgataagttactgctgtctttcctggtgctggattggcttcgagcaagacatgctctgccaactcactcagtgctatgatacagggatgggtcccttggcacctggccctagaagtatgtggctagtggaggagaaagaaagtttgaggccaggcgcggtggtgcatgcctgtaatcccagcaatttgggaggctgaggcaggtggatcacttgaggtcaggagtttgagactagcctagctaacatggtgaagccccgtctccgccaaaaatacaaaaaagctgaatgtggtggcacgtgcttgtaatcccagctactcaggaggctgaggcaggaggattgcatgaacccgggaggcagaggctgcagtcagcggagaccacgcacaccagcctgggcgaccaagcgagactctgtctcaaaaaaaaaaaagggctggacgcagtggctcacgcctataattccagcactttgggaggccgaaatgagcggattatttgaagtcagaagttcgagaccagcctgacgaatatggtgaaaccctgtctctgctaaaaatacaaaaaaaaaaaaaaaaattacccgggcttcatggcgggtgcctgttcccagctactcgggaggctgaggcaggagaatcgcttgaacccgggaggcggaggttgcagtgggccgagatcacgccactgcactctacactccagcctgggtgacacagcaagactctgcctcaaaaaaaaaaaaaaaaaaaaaagagagagaaagagagtttgaaatgcactaagccagaagctaatctaggggagatcttctggtcatcacgcttctaaaattgtaagcaggatgctttgctttttgtttttaattaactactttagaattattttagatttacagaaaagttaagagtacgtaaagttcctgtctactcctcacccagtttccctaatgttaacatcttacattaccatgatacacttacaaaactaaagagccagccaggcgtggtggctcacacctgtaatcctaacactttgggaggccaagctgggaggatcatttgagcccaagagttcaagaccagcctgagcaataaagtgagaccccatctctattttttaaataaataaataaataaaaggaaaaaacaaaaaaactaaagagccaatattggtacattactatttactaaactccagacctcatttgggtttcagtaaggttatttttctgtttcaggatctaatctaagatgccacactgcatttagtcatcaagcctccttagtctcctctgatctgtgaccgtttttcagtcttttcttgtttttcatgaccctgatatgaccatgacagttttgaagtttggtcaggtattttgtagaacgtccctcgatttgtgtttgtctgatgtttttctcatgattagactgtggttatagggtttggggaaaacatcacatgatgagatgaccttctcatcacattatgtcagaggatacatgctatcaccccaccttattactggtgaggctcacacatggtaatatttgctagttactccactataaagatgtattttcccactttccatattcgtttctttgaaaacaagtcactaaatactgctcacactcaagtggaacaggggattaaacttcaacttctggagtggacaatctataagccttatttggaattctgtgaggaagatttgtctttcctcatttattgatttatattcgatcatttatttatatagacatatagactcttgtatatttattttatactttgtttcataagtatactatgatttttactgttactcaaattgtttcagctttggccattgggagttattttaactaggttcatgtggtccttttgttttttgattatctccttttttctggaactataagatgctctgtgcttatcttgtatttttccttacccagccctaaaatcagccatttcttcaaggagtcctggaatggtatttagaaaccaagatttaggtactggatgatctcattgctactgggatatcacttaatttattattttattttattttttatggagatggcatcttgctgtgttgcttaggctggcctcaaactcctgggcttaactgatccttctgccttggcctcccaaaatgctgggattacaggcatgagccaccatgccaggcccaggatattgttgaatttagcttctcttataagacagagctaggaaatatattaccaccttgttttttaattctttgtttacatctctgtgatagtcagcctctaaggtgacccccagtgatccttgactcctggtattcatgccccttgtataatcccctctccttgagcatcgacttgcttctagtgaatagaatacagcgagaatgaaaggatgtcatttctaggttaggttacaaaaagattgtggctttcattctgtttgctccttctagctctccttcacgtgctctgaggaaagacaatgtcatatgtgagctgccctaaggagaagcccctgtggcaagaaactgagggaagcctctgaccaacactcagcaaggaactaaggctctccttccatcagctatgagaaactgagtcctactaacggccatgtgaggcgagcttggaaaaatagcctctctcactcaacccttgagatgactgaagccctggctgacctcttgatagcagccttttgagagatctgagccggaggcacccagctaagctgcacatggatgcctgatgcacagaaactataagctagtaaattattattgtgttaagttgacaacttttgtagaaatgtattaggaagcgatatacaggacgggcacggtggctcacacctgtaatcccagaacttcgggaggccaaggcgggaggattgcttgagcccaggagtacaagaccatcctgggcaacatagtgaaacctcatctctagaaaaaaatatacgtaagggctcggtgtcgtggctcacacctgtaatcccagcacttggggaggctgaggcaggtagatcacttgagttcaagaatttgagaccagcctggtcaacatagtgaaaccctgtctctactaaaaataaaaaaaattagccaggtgtggtggcaggcgcctgtaatcccagctactctggaggctgaggcaggagaatcacttgaacccaggaggcggaggttgcagtgagccaagattgcgccattgcactccagcccagggggccttgcaagacactgtcttaaaaaaaaaaaaagaaaaaagaaaaaatatacataaggtagccaggtgtggtggtgtgcatctgtagtcacagctactcaggaggctgaggtaggaggatcacctgagcctggggaggttgaggctgccgtgagccctgatctcaacattgcactccatcctgggtgacagaatgagactctgtctcaaaaattaaattaagttaaattaaataaataaaattaaatacaaatgacacattagataattaatacaatttatgtttcctccacaagatcagtggctctcaaatttcacaatggagctgtttaaaactatgtatgcccaggcctctacatctgcaggtctattcggcagaactatgattgttctgcatagctagctttggaaacaaatgtggaagattagagggcaatccatttggggatgtgagaagaaaatagaatacttttctttttagtgtatttgatcctagagttcttgacccaagttaagggctcagttttcttggcagaatctggaataactgaaacttcgtctgccatttgcagtttttattgaatagaagagaaagaaacagagctctcttactcactgtatggccttgaaaaagtcccttatcttttttgggcctccgaattctgagtaggaaattaaaggattataaatgccattatttaggcaaatagatttattcattgttagatgtattaggcaaaagaaaggtgaccaaggctgattgtgagcttccttcatcatagagatttaacaaaatatcagattcccattaatattggtagacaatgaagcagtatactgtagtagaaagaatatgggcttcagaggcagacagacccttgttggaaatatgcctctgctaatgactagtagtgtggtcttgagcaagacagtcagccttccagggtctcaatttcttggctttcacagtggcagtagtagacggctcaaagagtagccttgaggaccgattatgtaacatttgtcaaatgctcaagggagtgcctggtttagctcaagggcccaataaataataaccatgtaggatatatagtcagcttgggtggttgcgatccagtggttagtaaagtaggaacagaccaatgtctatgtcagcctgtttctcatataaggcttaatgacagccccatttgttgagacaggttgaataatctgcaaagcttacaaaggatctttcgtggaagttgagacccttttcctctagttctgttttttctttccccagctctaattgccccctggagaaaatgtaacacactgaaataagcttcaggaggttctgcattagaatataggaatggatggtaaaagattattgggtaggacggtgaagtgcccttctgaagggtgctttgagacacagtgaggctagatgtgtctgggagaggctgggctacaggagagctggtcaagaccagttagtgggccaacttcatctcacctgaggcaagagtcagtgatgcatgcagtgcccattgacttcaaagctcctttaattactaataaaagcacatattgggctgggcgaggtggctcacgcctgtaaaatcccagcactttgggaggccgaggcgggcagatcacctgaggtcaggagtttgagaccagcttggccaatatggtgaaaccccattcctattgaaaatgtaaaaagtagccaggtgtggtggtgcatgccgtaatcccagctactcgggaggctgaggcagtagaatcacttgaatccagaatgcagaggttgcagtaagccgtgatcacaccactgcactccagtgcactccagcctgggcgacagagcaagactccatctcaaagaagaaaaaaaaaaagcacatattgttgggaaaagataacattttaatctgcatttattatctaaatctcaatttgaatgaatgtttttaccatggtgcccaatgaaaaattgttgagctattttgtttcagtcatagactttggggcatatttggttgttctgagtcttgaaacagtttaattcttcttagatcagtgcatagtgaccagaaaaaaaaaaatctatatccaaataggttaaaggatcaccactttccagagattgtggtattcttttctataaaccagctcttgggattgaccctgacctatagagctgtttttctttttttgagacagagtctcgctctgctacccaggctggagtgcgatggtgtgatctctgctcactgcaacctctgcctcccgggttcaagtgattctcctgcctcagcctcccaagtagctgggactgcaggcgtgtgccaccatgcctggctaatttttgtatttttagcagagacggggtttggccattgtcggccaggcttgtctgggactcctgacctcaagtgatccacccacctcggcctcccaaagtggtggaattacaggtgtgagccgccacgcctggccagctgctttttaaaacaagtccaatgtatccattttttttcttgtttaacttttgggtttccagttttgttcaaggtttccctctgcttctaggtcatatatgtagtcttcaaggtttgagtttttaatacacctggaatttatttttttggtaaatgatgtaatatatggatccaattttattttcatctggatgggtagtgagagcttcaatttataaatatttctctttctttaaaaatttctactttgacattttcaaaactacatattaatttgatagtacatgtatagaatttaggaataaatacatataaatatgtcagagctatgtactcgaatgcatatatataaagctgaaagtgttgcctgatcaaaaagttttgaaatccactgtttcttgagctctttagaccatgagctgcttgagggcagggattgtgattttccttacctttgaatccatagtcaagattgtctatggcacattgtatgcgttcaaaaaccggttgttaaataattaaatgaatgaaactgccagtatctgaatcatgtcttaagcaacacagctactgagaaacgacattccagtgtcccgtgggaagatacctgaggctaagaacaagcaatgactcacaatgggaggtagtataacttcactggtgtcaagcttagacattttttttttttttgagacggagtctcgctctgtcgcccaggctggagtgcagtggtgcgatctcggttcactgcaagctccgcctcccgggttcacgccattctcctgcctcagcctccagctgggactacaggcgcctgctaccacgaccggctaatttttttttttttttttgtatttttagtagagacggggtttcaccgtgttagccaggatggtctccatctcctgatcttgtgatccgcccgcctcggcctcccaaagtgttgggattacaggcttgagccaccacgcccggccaagtttagacattttaatatgggaatacagattattaaaatctttaaatacctccctaaggcttataatccataggtgcttaggaaactggtaattatttttttgtgaacacaccccctgcttcttaatagcagtcatctattctgtaatggcagtgtgcaggaagaattacttttctcaataatggcagaagcatgattatatttagtatttatttatttatttattttgagacggagactcgctctgtctcccagactggagtgcagtggcacgacctcggcttagaacctccgcctcatgggttcaagcaattcccctgcctcagcctccggagtagctgggactacaggcgcccgccaccacgccaggctaattttttgtatttttagtagggacgnnnnnnnnnnnnnnnnnnnnnnnnnnnnnnnnnnnnnnnnnnnnnnnnnnnnnnnnnnnnnnnnnnnnnnnnnnnnnnnnnnnnnnnnnnnnnnnnnnnnnnnnnnnnnnnnnnnnnnnnnnnnnnnnnnnnnnnnnnnnnnnnnnngaggccgaggcgggcggatcacctgaggtcaggagatcgaggccagcctgaccaacatggagaaactccgtctctactaaaaatacaaaaattagccgggcgtggtggcgcatgcctgtaattagggaggcggaggttgcggtgagccgagattgcgccattgtactccagcctgggcaggaagatagaaattctgtctcaaaaaaaaaaaaaaaaaaaaaaagtagagacggggtttcaccatgttggccaggctagtctcgaactcctgaactcaggtgatccacccacctcggcctcccaaagtgctgggattacaggcgtgagcccccgtacctgccttcctaatatattaacgttaacaaaaatagcaagtttaatttcctgggatttttttttagttgtttttaataactatactgaagaaagtaactcaaccaaatgggttatgtttaacctggctgtgccctttggacttttttttttttttttttagaccgtctcgctctgttgcccacgctggagtgcagtggcgtgatctcggctaagtgcaacctcagcctcccaggttcaatcgattctcctgcctcagcctcccaagtagctgggattacaggcgcccgcaacgacgcctggttagttttgtttgtttgttggttggtttttagtagagacagagtttcaccatgttggccaagctggtgtcgaaatcctgacctcaagtgatccgcccacctcggcctcccaaagtgctgggattacacgcgtgagccaccgcacccggcctatttgttttctacttagcttattttgctcctattttgagttcattggaagcaagaggataaccgagaacaagggaacggaaagaaattcaagaagtagctgcttggtttttaaattcaagaagtataggagatattagcattgaatacaatctgggatatttattgttatccacactcttttcctattagaggcctctcatattccttctgactttaatacatgagctacgtggccgaatcaaactgttatggagagaatccagaatctgtttattggggttattgactgcaatggatacattattctcaaagatctgcctgcgggttaagagtaggtttgtatttaaagaaattaaaaaaaaaataaaatctatgcctaaacaaaaacttcaagtgattgccatctataaaacaagtatataaatccttactttgataaactacatagaagatattttaaaatatgaatttgagaagattgtgataataaattccttacaagaaaaaaaaaaaacctcttccccaaaataaattgctacttaaacgaaaactgtactttgcgtctttcaagctgctagggagacagtggacaccaagaagaaataaacgaaaatccaaggaacgcctaatgtagtgctaacgtccacagtaaaacacaaaacaaaaaaaatttatgaattaagactcacagaagcgaataaaatattaggtattgcctttattagaattgcaagagttgctaaagaaatactcaatttgaattaccgaatgcaggaccggagaagtcctgctggccccacaaagctgggtattgaggttgtgaaggtgtgacagtttcccagccggaatcaaatttcttcggttagggcttggtggacggcgagtagttagggccaatatagtgttcctgggtcctcattggatcagtcccttgactcttagtgtatttccctaaaccacctatgagcgcttcactctaaaaagaccttcactgattggatactttatcctcacgttggactcattatcagccaataggagggcataagcgacagaggcgtcaggtcacctgggaagagtctgcagagcctttgcccgccagcgccttcgctctttggctccctgagttagtccggttgtttgcgatcgccgcggccggggctgcgaaccgaagggctcgctccgcgccgcctgggtctctacctcatccgtaggtgtggccctgatggtgtggcaggctctggactcctaaagctctggagcggtatgtggggtccacgggcggcagacaaagcagtggagccgggaaggccgcgggaagcggcccctgtaccgaggcagcgaatccgcctgggaggggcgccccgcctccctcttgtcagatccagtagtgggtcccagtgaggcgctttagcacgctctacccccacgtgtcccgtgaatctgttagctttgctcatttcttctttgtcccccctcacatctgacttttactaaccccagtattattaatgggtgtcatctcatcttttcatctctccaggttattctttggtaactttctgttagttttgtgcacctgcgtgtctcctaagagcggaaagacatagttgtgttaggcttaattcaagagagaccagtgttcccatttttatatttaagactgtgttttgggagggcgggggtaggtattcgtgcagttagcaactcctttcgtgatacttagtgcactgaagtgtcagggcagtgcagaaggtacctccaacacctggcaggacagatgtccccacatgagcaagtagtattctggtttggtaattgctggtgtttgattttaccatttcgcgttcttactttaatctgataaccgctgaggattgttatgtgagataactgaggctctaagaacttaacttctcaaagttacagttaactcttcgagtaaggggaaagtcagatttaatatcaatgcttatgttatttttatcaaagcccacctaactgaataaggatttaggttaaacgtattccctctgcatctcttggcatgtgagaattaaatctttgaattgaatggtgaatcttgactgtacgagaaggaaaaatcttgcaggcatctgcctaattacaggtgtctcacatgtatcttctaactgcttgcttctcagagtgtgacaagtagcataggcctcacctggaagcttgttggaaatgcggaatctcagactctcccacctactgaatcagcatttgctttttaacaggaacctttaactgaccagagtgctcattaaacgatgagaagtattctttgtcatagaatgatttgtttgtccaagttgaactaaacaagagaaagtaaaggtataaaaagtcttttcacattttcatcatttgttagtgaggctatggtctttattttttattttttttttgagacggagtatcgctctgtcgctcaggctggagttcagtgatgcgatcccggctcactgcaacctccgcctcccgggttcaagcgattctcctgcctcaacccctggagtaccagaggccttggcctcccgaagtgctgggattacaggcgtgagccactgtgcccggcgtcttgtagagttttattttattattactattattattattttgagacggtatctcgctctgttgcccaggctggagtgcagtggcacaatctcggctcactgcaagttccgcctcccggtttcacgccattctcctgacccagcctcccgagtagctgggactacaggtgccccccaccacgcctggctaatattttgtatttttagtagagacggggttttactgtgtgagccaggatggtctcaatcacctgacctcgtaatccgctcgcctcggcctcccaaattttattattattattattattttgagatgagctgtcactctgtcgagctcccaggctcaggtgatcctcccacctcagcttttgtatttttagtagagatggggttttgccatgttgcccaggctggtcttgaacttctaggctcaagagatccacccccctgggcctcccaaagtgcttggattaccggcctgagccatggtacctggccatcttacagagttttagagcttagcattttattcatatgttcatagccatgtttaaaagagatgcatttatacagcagcataaagttttagtggctctgccactgccatccagcctgggcaacagagcgagaccctatcttaaaaataaaataaaaattattttgcactttgccaaattgggcatatagtgggtaggatagactgaatcctgaattcatttaaaatcattttttccaacctatgaagatagacttttttttttttttttaagagacagggtcttgctatgttgtccatgctgtagtaaagtggctgttcacaggcaagatcatagcacactgtagacttgaactctggcctcaaccagtctcctgcctcagcctcctgagttactgcacccagcaaaggcagacatttttatcaaacagcttgagtgtgtgaagttgatgaaattaacacagaaacataatatgtatctaatacatgattggggttagagttgtaactttcgtttatctgttttcagtttcctaactgttctattgctatctcataaaatctgctttgtgaacgctgcaatccacagaaatattgatcatttaacagaattcaagcaatggccaggcgtggtggctcacgcctgtaatcccagcactttgggaggccgaggagggtgggtcacctgaggtcaggagttcaagaccagcctggccaacatggcgaaaccccgtctctactaaaaataaaaaattagccgggcatggtggcaggcacctgtagtcccaagctacttgggaggttgaggcaggagaattgcttgaacctgagaggcagaggttgtgataagcctaaatcgtaccacgccactccagcctgggtgacagagtgagaccctgttcccccccaaaaattcaggcaatgtggtagttagaaatggatgtcagagtaacttgttatcatcaagaatatcaaggtaagaaaaatgagtcttaactgtgaggagttctctcctgaagttttacataaaacccttctaatttgagggacaaatcacagcttctgtcagcttttcttgccttcctttaaatgccatgggaaatgcagtgaccacagtttctgcctctgttatacagtaaacccatgacattgtctgattcaaccaagcatgaatcgaaaatactgtacaatagtctcaggatttgaaacctgtggatacagagcaccaactgcattagctaaggtctttgatggatcctgtgcagatgctgatttgagcccaatccttatcagtgctctttgaagactggaaggttttttgtttgtgtttttttttttttagacggagtctggcactgttgcccaggctggagtgcaatggcactatctcggctcactgcaacctccgcctcccgggttcaagcgattctcctgcctcagcttcccaagtagctgagattacaggcacctaccaccatgcccagctaatttttgtatttttagtagagacggagtttcaccatgctggccaggctggtcgcaaactcctgacctcaggcgatccggctgcattggcctcccaaagtgttgggattacaggcgtgagccactgcgcctggctgaagattggaagttttagttgttttgatttttgttcatcccaaaggaacaggaaagctatgtaactttttttcagtatagttcctactgaatagttatctaatggctccttgaatgagaatggaactcttcagtttcaaggccagcgttgtatgcaaaaggccaacacccagagtgtttggttcttttttccctgatttattttaaaacattttattgtaaattggtaatttatagttgtatatatttatggggtacaaaatgatgttatgattcatgaatataaagtggagcaattaaatcaagctagttaacatatctatcaccttatacttattttttgtggtgagaccacttgaaatttactcacagcgatttttttctgttttgcttttgagacagtctagctctgtcacccaggctggagtgcagtggcacaatctcggctcactgcaacctccacctcccgagttcaagcagttctctggcctcagcttcccaagtagctgggattccaggtttgcgccaccatgcccggctaatttttgtatttttagtagagatgacgtttcaccatattggtcagactggtctcaaactcctgacttcaggtgatccaccggctttgtcctcccaaagtgctgggattacaggcataagtcaccacccctggcaactcatagccattttaagaccgagaatatactgttttgttttgattttttttttttttttttgagacggagtcttgctctgttgcccaggctggagtgcagtggtacaatctcggctcactgtaacctccatctcccaagttcaagcgattctcctgcctcagcctcccgagtagctgggattacaggcgcccgccagcacgcccagctaatttttgtacttttagtagagacggggtttcaccacgatggtcaggctggtcttgaactcctgacctcatgatacgcctgccttggcctcccaaagtgctgggattataggtgtgagccaccgcgcccatctggaatacactattattaactatattcaccatcttgtgcaatagatgtcaaaaaaaccctcacttattcctactacgactttgtatcccttgatcctcatctcctcattttgcctatccgccagccttttaccaccattctgttctctgctgctgagttctattgttttagattcaacagttaagcaacaacatgcagcatttctctttctgtgcctagtttacttcatttagcacaatgttctccagttctgtccatgttgtcacaagtgacagaatttccttcttttttaagggtgaatagtattccatttgtgtcattgtgtatgtatatcacattttctttctttctttttttttttttttgagatggagtctcgccctgtcatccaggctgtagtgcaatggcgcaatctcggctcactgcaacctccgcttcccaggttcagtcagttctccctgcctcagcctcctgagtagctgagattacaggcacccaccaccaagcccagctaatttttgtatttttagtagagacagggtttcaccatgttgaccaggctggtcttgaactcctgacatcaggtgatccacccgccttggcctcccaaagtgctgggattacaggcgtgagccactgcacccggccgatatgctgatttttttttgtttgcttgttttgagacagagttttgctcatgcagtggcacaatctcagctcactgcaatctctgcctcctggctttaataaattctcctgcctcagcctcccgagtagctaggattacaggtgcgtgccaccatgcccggctaattttgtatttttagtagagatggggtttcaccatgnnnnnnnnnnnnnnnnnnnncgctttgtagagatggggtctccttatgttgctcaggctatctttgaactccttggcttaagcgatcctccctccttggcctcccaaagtgttgggattacaggcgggagtcatcgcacccggctatcctgggttattttgaagcaaatcccagacattatataatttcaattattttacatatttctatgcctctgtcatgatgaataatcatacatataataatttgctttctagaggggtcaagtaaaataagggacatattaaagtgtagacagtgctcatttagtttgtactaccagaatttaggtaactgctacagtgcagtttcattatccttgtgctcaggttcttagtactctgctaaaaatccaaaaaaaaaaaaaaaaaaaaaaacaattagccgggcgtggctaggaggctgaggcaggagaattgcttgaaccgggaggcggaggttgtagtgagctgaggttgtgccactgcattccagcctgggtgacagaatgcgactctgtcttggagaaaacaaacaaaacaaacgaggaaaacaaagtatgcaaagtggaaagactgctgatgagtttaggaaatagtaaataatattttaggccagttctatgctaactagattttgtgatgtggggcaaattattgaacctctctatgactagctcctcatctggcaaatgaattatgtcaaattctacttcattcttcctatttttgcttttctgttaggcagtagaatatggcataatcagatggacagaggtatttagattcagtgtagattcactatgatctttcacactctactggcctgagccacaggctaaatacctttcctgtcttcttgatttacagacttctgcctcctttttccaagggcattttattctttgtagacagagtatgctaggtttttgttcactgatgaataagaaagctgtaaactagccacttttccctcgggcacttgttttagggctagaaatagtctagaggataaaaagcactggcaatattaacagttttagaagtatagcaaagcttactagcttgaactgtaaagatctttattgtgattttattgttaaaatatgtatgctaaaacagaatttattggaatattgaggacaacatatgttctttaaacattgtgcacacaaattttttcagtcgtcttacgttcattttacttttctcaaactgtagagttgccgatttctaagtttttatgtgatttagttttagttacctgattctttctaaaggtgttgtaatcctggttatttcacaagtgctataatatacctcagcagcctagaactaattctgcaaaccttttctacagaatttaagattttattcatgtgcatggcatagaagatgaattcttccacttccaccatgagtgaagagcctgacgctctatcggtagttaaccagttacgggatctagcagcagatccgttaaacagaagagccatcgtccaggatcagggatgtctgcctggccttattttatttatggaccatcccaaccctccagtcgtccactccgctttgcttgtaagttgcctttagtaatttcaatctctgttctatttttgcagttaaggtgagaatttggaaaaagtgctagatgacaaggtaaaaaaacggaaagagagcaattagttgtttgtatttatgtaggtacaaacatatgtatgtgtggtctgtggtctgtttacaccagtggtaacatgctacattgtttttattctttatttttttttttttgagtcatctaggcctggagtacactgtggcaggatcttagttcactgcaatctccacctcctgggcttaaaccatcccccccacctcagcctcccaagtagctgggatgataggcacacaccaccatgccagccaaatttttgatattttgtagagatagggtttcgccatgttggccaggctcaaactcctgagctcaagtgatccttccactttggcctcccaaagtgttggaattacagctgtgagtcaccatggccagccttgtttttattcttttatacaaattgttgcatactccatgcatggaatgtcctaccacttccttttcatttaacaatcttgaggattggatcatatcatacacagagacactcaaagaggcacttattttgtttttattttataacagctttttaagatgtaagcacacagcatcatataattcactcatttaaagtatacaattaagtgattttagtatattcacagagttgtgtgtcaccatcaccacaactttttatttttatttattataaataaattttttttttttttttttagtagagataggatgtagctatgttaactaggctggtctcaaactcctggcctcaagtgattcttctacctcgagctctcaaagtgcttagattacagatgtgagccactgtgcccggcccaccacaactttttatctattgcttcccagaccccaacactccctgtccctaagcaactactaatctactttttgtatgtctatatttgcctattctggcaaaaatgcctatatattttgcatataaatagggccagacgtggtggctcactcctgtaatcctagcactttgggaggccgaggtgggtggatcacctgaggtcaggagtttgacaccagcttggccaacgtagtgaaaccctgtctgtactaaaaatacaaaacaattagccgggcgtggtggtgggtgcctgaaatcccagctactcaggaggctgaggcaggagaatcccttgaacccaggaggcagaggttgcagtgagccaagattgtgccattgcactcgagcctgggcaacaagagcgaaactccgtctcaaaaaaaaaaaaaaaaaagttgttaaaaaaattaatgttttggaaattttatctattgccctttacttaaggactcgtgatgattccccatttagtctaatttcacaagtttgtacagaaggcatatagacttttccttttggaaaaaaatttctattttgcctttacagaatgaagtttagcagtcaaaaaagacattggtgtaagagaacagtagtaacaaatgggaaaaatggcacagcccccagtctgggttcaatttcaataagaaatgcaagaaggatgagaagaaagagggggttgatctatagatagggacttggggctaaaggaagtaagtcttttttatttttaaatagactagaatatgtctaagttcagagggcaagggctactagaatgggagaggtttgaggggaaggctctcataattgcagaaaataggaaagatttgctaactgaggagaatgataaagttgttcagcagtgttgagggctgattagtttggtaatactgaatcgatatgattcaggcctgttgtaggctcacagagccaagtacttggatttgtctagagttgttacttggccaggttaagttgggcagaatgattgtgcaagggagtttaggatcttggcaggattggttgaaatgatatacagtagatactaggctgaataggaagggaagtataaagtcatggagggacagagctaaggagagggatcagtgagtgaaagttcccaagaggctgaagaaaagatttttttgttgttgtttttgagacagagtttttgctcttgccacccaggctggagagcaatggcacaatcttggctcactgcaacctccgcctcctgggttcaagcgattctcctgcctcagccttctgagtagctagaattacaggcccgcaccatcacatgtggctaatttttgtatttttagtagagacggtttttcaccatgttggccaggctagtctcgaactcatgacctcaggtgatctgcctgtcttgtcctctcaaagtgctgaaattacaggtgtgagccaccatgcctggccattgggtgtgttgtttttatgatttccttttttcgtcactgttagcttattagtatacacttttgtttttattttatttagtggttgctgtaggttttacaatatgcatctttaacttcttacagcctacctttaaatgaatcatacccttaacatgtagtgtaagaatcacacaagagtatatttccatttctttctcccatcttttgtgctatttttgtcatacattttacttctacatatgtttaaaaacctacagtgtatatatttttgccttaaacagtcaattatcttttaaagagattaaaaatttaaaaatgtcttttttttttttttttttttttttttttgagatggagtcttgctctgtcacctaggctggagtgcagtggcgcaatgctcagctcactgcaacctctgcctgcccgggttnnnnnnnnnnnnnnnnnnnnnnnnnnnnnnnnnnnnnnnnnnnnnnnnnnnnnnnnnnnnnnnnnnnnnnnnnnnnnnnnnnnnnnnnnnnnnnnnnnnnnnnnnnnnnnnnnnnnnnnnnnnnnnnnnnnnnnnnnnnnnnnnnnnnnnnnnnnnnnnnnnnnnnnnnnnnnnnnnnnnnnnnnnnnnnnnnnnnnnnnnnnnnnnnnnnnnnnnnnnnnnnnnnnnnnnnnnnnnnnnnnnnnnnnnnnnnnnnnnnnnnnnnnnnnnnnnnnnnnnnnnnnnnnnnnnnnnnnnnnnnnnnnnnnnnnnnnnnnnnnnnnnnnnnnnnnnnnnnnnnnnnnnnnnnnnnnnnnnnnnnnnnnnnnnnnnnnnnnnnnnnnnnnnnnnnnnnnnnnnnnnnnnnnnnnnnnnnnnnnnnnnnnnnnnnnnnnnnnnnnnnnnnnnnnnnnnnnnnnnnnnnnnnnnnnnnnnnnnnnnnnnnnnnnnnnnnnnnnnnnnnnnnnnnnnnnnnnnnnnnnnnnnnnnnnnnnnnnnnnnnnnnnnnnnnnnnnnnnnnnnnnnnnnnnnnnnnnnnnnnnnnnnnnnnnnnnnnnnnaaaaaaaaaaaaagattttactttgttgtcttctggcatgtacggtttctaataagaaaactgccgttaattcttgttcttaccttatataatgcctttttctggcttcttctggaactttattagtgattttcagcaaataattatgatgtctttgatatggatggtggttttttttggttgttttgtttttgagatgcagtcttgctctgtcgcccaggctggagtgcagtgtgtgatctcggctcactgcaacctccgcctcctgggttcaagcgattctcctgcctcagtctcccgagtagctgggattacaggtgcgtgccatcatgcccggctaatttttgtatttttagtagaaacggggttttgccatgttggccaggctggtctcgaactcctgaccttaagtgatcggcctgccttggcctcccaaagtgctgggattacagccgtgagccactcagcgcccagcatttttttttttttttttgagacggagtcttgctctgtcgcccaggctggagtgcggcagcacgatctcggctcactgcaacctccgcctccccggttcaagcaattctcctgcctcagcctcctgagtagctgggattacaggcacctgccaccatgcctagctaatttttgtatttttagtagagatggggtttcaccatgttggtcaggctggtctcgaacccctgacctcgtgacccacctgccttggcctcctaaagtgctgagattacaggcgtgagccactgcgcccagcctttttttttttttttaattttttttgagatggagtctcgctgttgccatgctggagtgcagtggcgtgatctcagctcactgcaacctccgcctcccgtgttcaagcaattctgctccctcagccttccaagtagctgggactacaggcacatgctaccacatccagctaatttttgtatttttagtagaggtgaggtttcaccatgttggccaggatggtcttgatctgcccacctcagcctcccaaagtgctgggattataggtgtgagccactgtgcccacgtcattccccccgccaccttttttttttttcttttgaggcacagtaactctgtcattcaggttggagtgcaatggcgcaatcacagctcacttccccactaaatggaatatagttccatccctgtgaagtggtgaaagtaaaaccagaacaacctaattttgaccttgtgactaagttaggaaccttcatttcgaagagtagatcagctactacagctcaaaggatcatttcttccctagggaataattctgaatcatctcatttaaaggattttattctaaaaacaaaaacctattttctccttttttgttttcttgcagtaaattagtagtagtttcaattttgaatagtctggacagacgaattaacttattacttcttctgctgtaggctcttcgatacttggcagaatgccgtgcaaacagagaaaagatgaaaggagaactgggtatgatgttgagcttacaaaatgttatacagaagtaagtacaatagacagtgtctcatttatttatatacttacttatattacttacttacagggcctcactatgttgcccatgctgggttcaagcgatccttccaccttggctttccaaagtgctggaattataggcatgattactactattattggattactatgttttaatgtcctgtagttaactgtttttaatcatttagctggctgagggaggagaaccgctggaaccccggaggtggaggttgcagtgagccgagatcgtgccattgcgctctagcctgggcgacagaacaagattccatctcaaaaaaaaaaaaatttcaattttaggtagagaaaaattacaaattagtcaagaagtaatttattactgtaggaaaatggtaaaactgtggaactataaaataagaaagttaagatggtgctggtagaggcatttaatatttcatacatgctgggcatggtggctcatgcctgaaatcccagcaatttgggaggccaaggcagacggatcacttgtggccaggagttcaagaccagcctggccaacgtggtgaaatctcgtttctagtaaaaatacaaaaattagcctggtgtggtggcacgtgcctgtaatcccagctactcgggaggctgaggcaggagaatcacttgaacctgggaggtggagattgcagtgaggtgagatcccaccactgtactctagcctgggcaacagagcgagactgtgtctcaaaaaataaaatttatataaccatggttgctgatctctcatctgtaactgctttgtttatctaagtagacagaagcttgtgtgactttgtaatataattttgtagtaaattcttaagtttataattaaaatagtgcgagtagcctcagtagctatactggcaatcataagcatgcatacccccactttgcacattgttaatatgaatatgaatacttggctatttctcccctcatcctgttgctgctaatgtggaagccactagaactggtttataagagaattaagccctaaagccctaaggaatccattggatataatggattatcttctgtgcaatgtatctggaatggtttcagctctatactatccttggagtaattgagaaaataataactctgggtttttttgtttgtttggttagttttttgagacagggtctcgctctgttgctgaagctagagtgcagtggtatgatcatggctcactgcagcctcaacctcccaagctccagctattctcccacctcatcctcccaagtagctgggactacagacatgtgccattatacctggctaatttttaaattattttgtagagacatggtctcactatgttgcctaggctgctgtcctgggatcaagcaatccttctgcctcagcctcccaaagtgctggaattacaggcatgagccatcacatcctgcccagatagttgtgttttttttttttttttttttttaaatggaactaaattcttttacaggacctcagttcagaaaggatgctagagaagtgattagtcagagggatagaagcagtgattaaccaggaagaggagcgctggcttaaggatgacaacagaagcatcttccttttttttctgaaacgggtctagtatggtaatcaatagcaacatgtggcaatttaaattaattaaaattaatggcagggagtggtggctcacacctgtaatcccagcactttgggaggcaggtggatcacctgaggtggggagttcgaggccagcctggccaacatggtgaaaacccatctctaccaaaaatataaaaattagccaggtgaggtggcgggcacctgtaatcccagctactcaggaggctgaagcaggagaatcgcttgaactcgggaggtagaggttgcagtgagccaagatcgcaccactgcactctagcctgggcgacagaatgagattccctctcaaaaaaaaaaaaaaaaaaagtaataataataataattaattaaaattaaaaactcagctcctcagtcacatttgccatattccaagtgtttagtcatgtggctagtgacactatttccatcatctcagaaagttctgatgtagagtgctgctctaaaatttttcttttcttgtcttttttttttttgagaccaggtctcaatatgccaccttggctggtacgatgttagctcagtgcaacctctgcctcatgggctcaagtaatcctcctgccttagcctcctgagcagcagggacttaggccatcatgtcctgctaattttttttttttttttttgagtctcatcctgttgcccaggctggagtgcaatggcgcgatcttggttcactgcaacctctgcctcctgggctccagcagttctcctgcctcagcctcccaagtacctgggattacaggcacgcaccaccatgcccggctaatttttgtgcttttagtagagacaggatttgaccatgttggccaggctgattttgaactcctgacctcaggtgatccgcccgtctcagcctcccaaagtactgggattacaggcgtgagtcactgcgcctggcctaatttttgtatttttttgtagagatggggtctcgacatgttgcctagactggtttcgaactcctggactcaagtcatcctcctatctcggcctcccaacatgctgggattacaggtgtgagccaccatgcccagctgctcgaaaatttctttttttttctttttgagacaaagtctcactctcacccaggcttgagtgcaatgtctgtgatctcagctcactgcaatctcttcctctcggtttcaagcgattctcctgtctcagccttctgagtacctgggactacatgtgtgtgacactgcacccgtctaatttttgcatttttagtagagatggagtctcaccatattggccaggctggtctcgaactcgtggcctcaggtgatccacctgcactcggcctctctataagtgctgggattacaggggtgaatcaccacccctggcctgctctaaaatttctttgcttaactgcctctagggctttttttgtttttggattatttttgtttcatggactattttcctaacagattttactggcgaattactaagtcaaagatgtaaatatctttgtctttgtatccctgttttcaaatgatacctatgatgcttttaccagcagttgcctttttctgtttgtttgtttgttttttgtgagatggagtctcgctctgtagcccaggctgtagtgcagtggcgcaatctcggctcactgcaacctccgcctcccgggttcaagcgattctcctgcctcagtctcccaagaatctgggaccacaggtacgtgccaccacgcccggctaattttttgtatttttagtagaaatggggtttcactgcattagtcaggatggtctcggtctcctgacctcatgatccgctcacctcggcctcccaaagtgctgggattacaggtgtaaaccaccgccccggcccgacagttacctttttattagatttttccaaacattgggatggtttcttgacatcatagttctccttccctgtttaatttgaaatcaagtttaaaaacaatttaaatgtctgtgttgagactgttagaaaatggatggtttgggtggggacataattccactgaaattgatgtggaaaacttttcacttggagtttttctggtgagacactttacattaggttcttttttttttttttttttttgagactgagtctcaccctgtcacccaggctgtaatgcagtggcccaatcttggctcactgcaagctctgcctcccgggttcaggccattctcctgcctcggcctgcccgagtagctgggactacaggcgcccgccaccacgcccggctaattttttgtatttttagtagagaggggtttcaccgtgttagccannnnnnnnnnnnnnnnnnnnnnnnnnnnnnnnnnnnnnnnnnnnnnnnnnnnnnnnnnnnnnnnnnnnnnnnnnnnnnnnnnnnnnnnnnnnnnnnnnnnnnnnnnnnnnnnnnnnnnnnnnnnnnnnnnnnnnnnnnnnnnnnnnnnnnnnnnnnnnnnnnnnnnnnnnnnnnnnnnnnnnnnnnnnnnnnnnnnnnnnnnnnnnnnnnnnnnnnnnnnnnnnnnnnnnnnnnnnnnnnnnnnnnnnnnnnnnnnnnnnnnnnnnnnnnnnnnnnnnnnnnnnnnnnnnnnnnnnnnnnnnnnnnnnnnnnnnnnnnnnnnnnnnnnnnnnnnnnnnnnnnnnnnnnnnnnnnnnnnnnnnnnnnnnnnnnnnnnnnnnnnnnnnnnnnnnnnnnnnnnnnnnnnnnnnnnnnnnnnnnnnnnnnnnnnnnnnnnnnnnnnnnnnnnnnnnnnnnnnnnnnnnnnnnnnnnnnnnnnnnnnnnnnnnnnnnnnnnnnnnnnnnnnnnnnnnnnnnnnnnnnnnnnnnnnnnnnnnnnnnnnnnnnnnnnnnnnnnnnnnnnnnnnnnnnnnnnnnnnnnnnnnnnnnnnnnnnnnnnnnnnnnnnnnnnnnnnnnnnnnnnnnnnnnnnnnnnnnnnnnnnnnnnnnnnnnnnnnnnnnnnnnnnnnnnnnnnnnnnnnnnnnnnnnnnnnnnnnnnnnnnnnnnnnnnnnnnnnnnnnnnnnnnnnnnnnnnnnnnnnnnnnnnnnnnnnnnnnnnnnnnnnnnnnnnnnnnnnnnnnnnnnnnnnnnnnnnnnnnnnnnnnnnnnnnnnnnnnnnnnnnnnnnnnnnnnnnnnnnnnnnnnnnnnnnnnnnnnnnnnnnnnnnnnnnnnnnnnnnnnnnnnnnnnnnnnnnnnnnnnnnnnnnnnnnnnnnnnnnnnnnnnnnnnnnnnnnnnnnnnnnnnnnnnnnnnnnnnnnnnnnnnnnnnnnnnnnnnnnnnnnnnnnnnnnnnnnnnnnnnnnnnnnnnnnnnnnnnnnnnnnnnnnnnnnnnnnnnnnnnnnnnnnnnnnnnnnnnnnnnnnnnnnnnnnnnnnnnnnnnnnnnnnnnnnnnnnnnnnnnnnnnnnnnnnnnnnnnnnnnnnnnnnnnnnnnnnnnnnnnnnnnnnnnnnnnnnnnnnnnnnnnnnnnnnnnnnnnnnnnnnnnnnnnnnnnnnnnnnnnnnnnnnnnnnnnnnnnnnnnnnnnnnnnnnnnnnnnnnnnnnnnnnnnnnnnnnnnnnnnnnnnnnnnnnnnnnnnnnnnnnnnnnnnnnnnnnnnnnnnnnnnnnnnnnnnnnnnnnnnnnnnnnnnnnnnnnnnnnnnnnnnnnnnnnnnnnnnnnnnnnnnnnnnnnnnnnnnnnnnnnnnnnnnnnnnnnnnnnnnnnnnnnnnnnnnnnnnnnnnnnnnnnnnnnnnnnnnnnnnnnnnnnnnnnnnnnnnnnnnnnnnnnnnnnnnnnnnnnnnnnnnnnnnnnnnnnnnnnnnnnnnnnnnnnnnnnnnnnnnnnnnnnnnnnnnnnnnnnnnnnnnnnnnnnnnnnnnnnnnnnnnnnnnnnnnnnnnnnnnnnnnnnnnnnnnnnnnnnnnnnnnnnnnnnnnnnnnnnnnnnnnnnnnnnnnnnnnnnnnnnnnnnnnnnnnnnnnnnnnnnnnnnnnnnnnnnnnnnnnnnnnnnnnnnnnnnnnnnnnnnnnnnnnnnnnnnnnnnnnnnnnnnnnnnnnnnnnnnntccctcacctcccagacggggcggcggggcagaggcgctccccacatctcagacgatgggtggccgggcagagacgctcctcacttcctagacgtgatggcggccgggaagaggcgctcctcacttcccagactgggcagccgggcagaggcactcctcacatcccagacgatgggcggccaggcagagacgctcctcacttcccagacggggtggcggccgggcagaggctgcaatctcggcactttgggaggccaaggcaggcggctgggaggtggaggttgtagccagccgagattacgccactgcactccaagcctgggcaacattgagcactgagtgaacgagactccgtctgccatcccggcacctcgggaggccgaggctggcagatcactcgtggttaggagctggagaccagcccggccaacacagcgaaaccccgtctccaccaaaaaaatacgaaaaccagtcaggcgtggcagcgcatgcctgcaatcgcaggcactcggcaggctgaggcaggagaatcaggcagggaggttgtagtgagccgagatggcagcagtacagtccagcttccgctcggcatcagagggagaccgggaagaggggagaggggagagggaattactgttacagtttttatgcaaaacagaaagataatttatgttttagtattttaatattttttgtcactattgcttcattaagcatattaaacagttttgaaataatccaggttttcaaaaaatgtatgacagttattggatgttttattatgtgttatgattcattttctagttgatgcaaaactattgacaatggaaaggagtaacaataatacagtttttctttcttcttttttttttgtgacggagtcttgctcttgttgcccacgctggagtgcaatggcatgatctcggcccactgcaacctccgcctcctgggttcaagtgattctcctgcctccaccgcctgagtagctgggattacaggcacccaccaccacacctggctactttattttattttattttatttattcattttttctttttaagagggagcctcattctgtcacccaggctggcgtgcagtcgtaggatcttggctcgctgcaacctccatctcccaggtccaagtgattctcctgcctcagccccctgagtagctgggattatagacacctgccaccacgcccagctagtttttgtgcttttttagtagagacggggtttcgccatgttggccaggctgggctcgaactcctaacctcaggtgatccacccacctcagcctcacaaagtgttggaattacaggcatgagccactgtacccggccctgtttttttttttttttttaacttaagttcgtaagtttctctaatcattgtctcttcatgctctttataacttgttcttggttaatatttaaaatatctgagaactgcagtgacttttcaataaactctaaaatagctatcaataaaaatgctgaggcaactaatacaaattagtccttttgatagctttctgtaacacacggctaaagtcacccaaagtaacttatctctgtggtcaacagtggctcagaaaagcacttgatatagtaattgagtgtctggaatactgtcagattatcacccctggaattaaagctctaagtagctagaacatatacaatctgagtatcagaaattgaagtattcctactcattcactaaataacttgcaaacatttttgttaggttctatggaaggtacaaaaaggataccttcctcctcttaaagagttcatatacttataaaagaaatagaaaattaagatcagtagtataagtacaagcatagtactctgaatgcaaagggagaattgggttattaggtagaggcattatatagaaggtgttggtcaagctgacccttcaagcattgaaataagagttggaaagcctgcagtctgggtgaagctcttccagctaaggaaagacctgaacaaaacttaagggtagaaagcattctagaacaaagaacatataaaaatgcatggtctttgtaggagatggccaagtgtcatagtcaacccaaagaataatagaaggacaaaatgagctgatggagatagccaaatggggccagattttaaggccttgagtgtacattaaagggtttggacttagttgagcccattgataggtgaaatgaggattcttttcttacagttacatgtacttactctttgttcagttccactaataagagccattagactgtgctgtccagtatggttagccactcactctgtttggcaatttaaattaattaaaggtaaattaattttttttagttgcactagccacatttcaagtgctcagtagcctcatgtgagtggagagtgcagctatagaacatttctatcattgcagaaagattattggacagcacagtcccctagatgttgatgtgaggatctgtagtaggatttaaaagcttaagaatgaaaacttttgttagagctgtggttttatgataaacacataatttgtaatatgtaaaaaatgtaaattaaaaaattggttttaacatacaaagaaatcttgaaattagttgatagtatgaatgatccttttcaaatttggtttctccttttggatttttatatgttgtattttcttaaaagtcaaggtactttcaaattgagagttgaatgttagtgataatacaggaacatgttacaacctgatcttgttagttgattttgtatttgattatttttattaaacgtgtggtttttttttttttttgagatggagtctccctctgtcacccaggctggagcccagtggtgtgatctgagcttgctgcaacttctgcctcccgggttcaagtgattctcctctctcagactcctgagtagctgggattacaggcatgcgccaccacacccagctaatttttgtattttagtagagatggggtttcagtatgttggtcaggcttgaactcctgacctcaagtgatccacctgccttggcctcccaaagtgctgggattacaggcatgagccactgtgcctggccaaatgtgtttttatacctctatagtgttggattttgaatctcaatgagccacgagtttaaaatgaaattagaagattattatagacaagatgctttttctacattattgattattctaggattcactgctattgcttttaaattgaacaaggcattagagtaaaagaaacaaggctccttttagtggagaaataaaattacagaatcagtagaagtgacaagactaattatatatgtgtttcttttcaagaactacaactccaggagaaacaaaacttctggcctctgaaatctatgacattcttcagtcctccaatatggcagatggtgatagttttaatgagatgaattcacgtcgaaggaaagctcaattttttctgggaactacaaacaaacgtgccaaaacagtggttttgcatatagatggccttgatgatacggtaaggtctgttagatgggaaagagaaatcatgtttactgaatagtttcttcagtgccacttgctaacagtctttgagaataaatctcgatatcagtattttactgataaaaagggtcattttgtgctaaagaggtcagttaatcataggatataagaatttaaaatatgtatgtccctaataatagaacatcgaaatatatgaagtaaaacttagagaaatggggagaaatagaaaaatccacagttagagattttaacacaactctctcaatacaggaagcatacagaaaatcagtaaggatatagaagactcaaataatgctatcaaccaatttaacctaatttttattttattttatttatttttttatatattttttgagatggagtctcactctgtcacccaggctggagcacagtggtgcaatcttggctcattgcaacctccgcctcctgggttcaggtgtctcttctgcctcagcctcccgagtagctggaattacgagtgtgcaccaccatgcctggctaatttttgtgtttttagtagagatggggtatcaccatgttggccaggctggtctcaactcctgacctcaggtggtccgcctgcctcagcctcccaaagtgctcgattacagggatgagccaccatgcccggcccaaagcatgttctttgagcacagtgaatgcaaattagaaatcagtaacagaaagatatctgaaaaatttcccccacatttgtaaaactaagtgacacatttctttttttttccttttcttttttcagggacagggtcttgttctgtggcccaggctggagtgcagtggcacaatcatagtctactgcaggctcgaactcctgggctcaagtaatctttctgcctcagcctcctgagtagctgggactatagacatgtgccaccatgcctggctaatttttaagtttttgcagagatggagtcttgctgtgttgccaggtctcagactcctggcctcaaccaatcctcctgcctcaacccagcaaagagctcggattacaggcatgaaccactgcacctagctaaatagcacatttctaaagtaatctatgagtcagtaaataaaagagaaattagcattttgaactgaataaaaataaaaatgaaagtgaactgaataaaaatgaaagtgtaggccgggcacggtggctcacacctgtaatcccagcactttgggaggccaaggcggatggatcatgaggtcaggagtttgagaccagcctggccaacatagtgaaaccccatctctactaaaaatacaaaaattagctgggcatggtggtgcgcctgtagtcccagctactcgggaggctgaggcaggagaatcgcttgaacccaggaggtggaggttgtggtgagctgagatcacgccactgcactccagcctgagtgacagagtgagactccgtctcaaaaaaaaaaagaaaaaaaaagtgaaagtgtaataaaagtgaaagtgatatatacatgaaaatgtagctgaaatttgttggaagtagttaaacaaagtttaaagtggaaattcattagctccagatgcctaactgtttatatacaaaaaagaaagggtatcaagtcagtgacttaagcttctaccttaagaaaatagaagcagctgaaggggatcactggatcccaagagttcaaggttatggtgatctatgttcgtgtcactacacactcctgcataggcaacaaaaaccctgtctcagaaaaaaaaagaaactagaaaaagaagaacaaattaaagccacaacaagcagaagagaagaaacaagaaagatcagggaaatgaaaaacaatagagaaaaaccaatgaaatcaaaagctggtgtttgacatgattgttaaaattgataagcctctagtcagacagatcaagaataaaagagaaaagtcataaattatcaatatcagaaatgagagaggataccactatagatcctacagacatcaaaagggtaagtgagggccgggcatggtggcttacgccggtaatgccagcactttgggaggctgaggcaggtggatcacttgaggtcaggagtttgagaccagcctggccaacatggtaaaatcccatctctactaaaaatacaaaaattagccaggtgtgatagtgtaggcctgtaatcccagctacatgggaggctgaggcaggagaatcgcttgaacccaggaggcagaggttgcagtgagtggaaatcacaccactgcactccagcctgggtgacagagcacaactccatctcaaaaaaaaaaaaggataagtgaatattttaaatacctttatgccaataaatttcataatgtagatgaaacaggtttcatgaaagacacagatgaccgaagctcactcaagaagaaacagatgacccaattagttgtagatctgctaaagaaattgaatttgtagctaaaagtcatgccataaataaaacttcaagcccagatagaagcatgttttctggtgtctggaaatcattggtttttaaattttttttttttgagacggggttttgctctttttgcccaggctggagtgcgatggcacaatctcggctcgctgcaacctctacctcctgggttcaagtctttctcctgcctcagcctcccaagtagctgggattacaggtacccgccaccacacccagctaatttttttgtatttagtagagacggggtttcgccatgttggccaggctggtcttgaactccttacctcaggtaatctgcctgctttggtctcccaaagtgttgggattacaggcgttgagccatggcgcctggcccacaggctttttctagttgtgtttaggtgcttacgctcaggatatggggtttagtaaataagccttcccatatgcatattgtcagacccaaatcagtccacagctatcttactggaagtggggtcacaaggcaatttctagaaagcaagttctgataaaggtaaattgattcactggaagatcttaagatatataaaatatctccaataccatgtgtttaattttagtgaataagaataatatagtttctttttaaagctagcacaaatcaagtaataaaacccagcaaagcacacacaaaaatataggctagccaggtgtggtggcacatgcctgtaatctcagctatatgggaggctaaggcaggaagattgctagagcccaagagttcaagaccagcctcgtcaacatagcgagattccgtctcaaaaaaaaaaaaaaaaagagcagaaaccaaacaaacaaatatataggccaatatatagtaaaaacatgattaccaaagtccaaaatgaaatattagcaagttaattctagtactgtactatcatgttaactttttttggtgacatagcctggtactagtgataagtttatttcatcgattctctcatttgtttctgacagcacagagagatgtatatcttctttctttctttattttttttgagacagagtctcactctgtcgcccaggctggagatcagtgtgacacgatcttggctcactgcaacgtccacctcccaggttcaagcaattctcctgcctcagcctcccaagtagctgggattaaagatgcccaccaccatgcccggccaatttttttgtatttttatagagacggggtttcactatattggccagtctggttttgaactcctgatctcaagtgatctgcctgccttgccctcccaaagtgctaggttataatagaaggggaagttgagtttagaatggtcaaataacttaactgtttactctacctatgtaactttagcttagtcaacattttttggactaggtagtgtgacttcagaattgaactctttttcgagacagagttgctcttttgcccaggctggagtgaggtggcgtgatctcagctcactgcaacctccaccccctgggttcaagtaattctcgtgcctcagcctcccaagtagctgggattacaggcacccaccaccacgccccgctaatttttttgtatttttagtagagacagggttttgccatgttggccaggctggtcttgaactcctgacctcaggtgatccacctgcctcggcctcacaaagtgctaggattacaagtgtgagccaccgcgcctggcccagaatcgaacttttaatcacaatattataatttcctagaaacaatctagttttatcctggagttgtaaatatgatttaacatagtgaaatattttagtataatatcagtaagtcaataatttgataatttgctattgatatagctgtaaatatagaaaatccaggagaatgatctgaaatttcttaaaaatattttaaaaatccagtgacattattaaatatatggaaatcagttacttcttaaaaggagaaaagtagttttactctcccaaacaaaacaaacagctaggaagagtgcaggggtattttttctttttttctttttgtttttttaaacttaatgaccagtgtgatagtagcaagggtattcttaataagaaaatacaagacttaataaaaaaaattaaaggtcttcagtattataagaagactggaataaatggaatgaaatgcctgtttctgaaagtttgtaaggatgttagttcttcctaaatttgtggacttaaaataatgccaatcagtctgatgattttggaactttatttcctgatctgaaagttcacatggtagaatgtactaatttttacaataaaaaggagcacctaatgttaggcattattttagataccagggatacagcgatgaccaaaaagcaaaactttttgctctcttggagctagcatagttggaggaggcaggcaataagcttgctaaaaaagtgtgttaatttatgttaaaataaagataaattagacttatgaatctcgtttctcactgttgcatgtggttggcatttagtaccagactctacctgtggtaaatcaggcaagttgtttttcaacttttcactttcctcacatttaaaataagggatcagattaatagtatcctaacttatatatattgtgtgagctttacttcactttcaagtttacctggtgttgaatatgtggaagagataaacatggtgctatttggcaccagtcctctaaggggcttcaccaaatgcaggcccctgcagagcagggtccagacacagtgcactagatgagcccactgtgggcctgtgctgtgccacagactgacgtgtcccacgtctccctgagtagtgttgaaatgcagaagtagggagatgagcaatggtgtgagcagttgttttgaaggatgtggaaataagtttgaaaactggatatagtctacagatttggcacgtgggtcagttgcagattgacccctcagaaatataaatcaaaacttggtctcaatacagaaatcagaaaatgtagagagtgtgatttggtgtgtgggccagaggtggagggagctatgaggagaaaatgcaattactttttccattttcactttggatcttgtattgagatgaccacttgatggtcaagtggatatgtctgacagacaaataagaaagtcatattggagttagtaatgttagtgatggctaaagtgatgagaatagtcttctgaggtttgaagcagaaagaaaatcagtttaggaactggactttggagttaaggtgagacaaagctggaataatcagtgggaaagtggaagaccaggataatgtagtaccctgcattgaagtattgaagggtacatgttatattgtgttttgaagagtattaggaaaatgagaaccacacagagggtatgtctaacccttgagaatgcaatagtaaccataagaatgccataaatggatgatgcagtgatatttgtaataccaggtgatttaaggaatagtgacttaaacactgaatgctcactaattctaacttcagtctattggaatttatccctggagatttttaggctagtgtgtggatcataaaacttttcttttcttttctttttttttttttttgagatggtgtcttgctctgtcgcccaggctggagtgcagcggcataatctcagctcactgcaacctccgcctcccgggttcaagtgactctcctgcctcagcctcccgagcagctgggactacaggcacacgccaccatgcccagctaatttttgtatttttagtagagatggggttttaccatattggccaggctggtcttgaactcctgacttcatgatctacccgcctcagcctcccaaagtgctgggattgcaggcatgagccaccgtgcctggccaaaccttttctttataggaccagaaagtaaatatttttggctttgtagaccatgatggtctctgtcataactactaactctgccttagcgtgaaactagcctcagataatatgttaacaagtgggtgtgcttgtgtttcaataaaacttagttacaaaaacagctggtggactatagttttccccacccgtgagctagaagaacctctgcttttcttctttttggtattttttccccctgtgttgtgttctgctttatttaagatgtaaattaacattggctaacttctttctgataaaaaattattaaaactacatattagtattgaagctttaaaaatttagcaggaattactattctgttgatcctgtaaaatttaaaaaatttgactaagcactcccccactctgtgccctgaaataagatggtaaaactgaaataggtcatttgctctcttcccccctccaaaatatagcttggttttcactgatttattaccttttatttacctattttcataacaatttgcttttactttttcagtctcggagaaatctatgtgaagaggctttgttaaaaattaaaggtgttattagctttacttttcaaatggctgttcaaaggtgtgtggtgcgaatccgttcagatttgaaagctgaggtaagtattttaaaagactgaatatgcttgagattacaggtaaacaaatcaatttcaaaattgttcctttttatcttggcttaggctttggcatcagcaatagcatcaaccaaggttatgaaagctcagcaagttgtgaaaagtgaaagtggagaagaggtaaaagttgtgtttaattttctttatatccaactcactctcaattattttttatggctagcagattgccagtatttctaaattaatagtgccaagtatgtaaggatgtgctgtttcttggttaacagttaactgttttagaaatatagagagatcttttgtggatatcagagtctgctcttgctgattttacatggaaataaaggatatgtgtcttccttgcatttatttttaaatactttcttcctaatcttaactaatcctgacaatccaaaaaataaaggtgtaaccactgggcaagtaaatagggtgaaaatccttgtctgttgctactcttttcactagctttgtgatgggggaaacaaatataccttgagctcatttgggttcccatctcatagatgggaggttccatggctatccagtggctgcagtggctagacacttgctttagtcattattacacagagagcggttgctcatttactcctagaatttcagcagatcaacttctgagttcttatttgtactctgcttactcctttctgtattgacacagtgctcagcaattgggcctactgtcatgtaagaggaaaatttaccctgagaataaccacggtaattagaataaggagtaaagttgattttgtaataactctcaatattttctgtatcagatgttggtcccattccaagatactcctgtggaagttgaacagaacacagagctacctgactacctgcctgaggatgagagtcccacaaaggaacaggacaaagcggtgtcccgggtcggctcacacccagaaggtggagctagctggcttagcacagctgcaaactttttatccagatcattttattggtgacttcacttttgggctcaaggactgtgtgaaccaacaaggggccagttttccattgttgtggtgaactgtcaagtgcaatttgcaataagttatcatgaaaagtttttagattacacgatcgcatatgctgcatttcacattttattggacattttaccccactgagtggtaaaaaggacagaggctacagatggagttgctttgtttatgaaagtattttggtttgttttctttcatttaattgcctcatatttaaaaaccatgggtccactgttaaaaccacatgtgtatgtgcagctttacattttattttacgtgaagcatgtgattaggaaaactcattttcttttcaagcctcaggacctacctgaagagaagttttcttgtagctcaagttgtgcatgaattactgaatattttactgtgcttttcttcatgaagggtacatgctttgtactcttcactgaaagctgaaaacatttcttgttaccctcttttgtgcctttttattttgccaaccgtgtttatagaaaggacattactaatgacattttgcagattaaaaacattcatttgaacacagtagtcccctagaaaaacaactctacaaaaattttgcagccttattcattataattttgataaaattaacacaaaatcagtcaagaaggaaacatgtatattagtgaagtgtttttggagactgtttgaatgtgaccaaatgtggttctagttgacttcttttcactttggcttatatcaattcttgagagttaatgtgatcatgatattgcaaacaactataaatggtctctaggccttactttgtgattatacgttatctccggctagaaaaaaataatggtagtaaagaaactgacaaactgaaaataagaaaacaaaaatcaaatgcctataataccataatgccagtttggtatagagtccaactttaaaacatgaattgctcgacagagttctattcagtaggtgtttctttgtattgtcttttgtgaatttattatgaaaatgctgcgttgtgttgaatgaaaaagacccaaattactgcttatgaagaaataaagccagcattgatcacttaatcctgtttctcatgtccagccagaaaaaagaacttcagtgaaggtaagataaataaatacatacacatatgtttttttggtagataagtgctaattacatatatgtaatgctttattaaatttctgaaatatttggtaactaaaattttctttttggaaattaataaatccagatacatattaatgttgatatgagtaaaaacaaataggaagaaattgaaatttcttttcatcaacatgtagagctgctattttactatttggagaatatgatgtgaaaattggacctcaaagggtttccttgtgttttcattgtaaaataccatcatcagtgagagtcttgagttcactaacattgtcaccttctggagagagagttaatggggggcattgaggatgatatttttttacatgtgtttggtttctgattcaagtgacacgcacaaactgaaaaaaaaaaaacaaaaaaagcaacaataactttcagggcacctattgctctaaatgcataatataacttgctgccagaaccagatgtgtttaaaaaagaaaataaaaccaccttctttctatagccattaaagcaaactttactgttctaacaaatttgtattttattttgcattgccacacatctgcttatttaaaaactacatccctttggtagtaatgtttcaggacaagtaggtattacagcttgatgtttgtgtgttctaattctaagagttctttattccagatcatatagagtagttaagacaactgtaacagcattttttgaaatacattgtaaaataataaaaggtaacataattaaaatcgagtggatattatatacttgtggtataagcattattgattatttatttttaaattttattttaagttctgggatacatgtgctgaatgtatcataggtatacatgtgccatggtggtttgctgtacctatcaacccgtcatctaggttttaagccccgcatacattaggtatttttcctaatgctctccctccccttccccccaccccctgatatgccctggtgtgtgatgtttccctatgttgattactcttaagcctgtttgtacacacgttgcctggcacactttcccagttccctgcagttgtgctacctgactaattcccatgcatcttccattcgtttccttcctgacaccacacctgcctctctccagattggattgctgctcctgtgcatatactcattgtagcatctatcacattatatcaaaattgcatatttaacagtgtctctcccctgctaagctctctgagaagagaatcttttttaagttttgttttgcattgacacataatatttgtgcatatttatggggtacaataatgatgtgagtcttcacattaaccttgtagctgtgcctgacttatagtaaatgctcagatttttttttagggggaatgagcaaagtttttttaaaaatcagtaaaacataaatatacttgttgggcaaaaggaaaaatgttatatgtattttttctgggcatgcttatttctgatttatcaatatttaacaaatttcagccaggcacagtggctcatgcctgtaatcccagcattttgggaggccaaggtgggaggattgcttgagcctaggagtttgagaccagcctggggaacatgtgaaaccctgactgtacaaaaaaaaaaaaaaaattagctagctgtggtggcaagtgcctgtagtcccagctacttgggaggctgaggtgggaggattgattgggcctggaagattgaggctgcagtgagccgagataatgccactgcactccagcctggatgacacagcgagatcctatctcaaaaaaaaaaagcaagtgtctcaaatgtcttcatttattttgtcatttggtttttatttttaaaaaatgggagggggcataatatttgctccattgaatggagctagaattatcctgattcttacagaatttttacaggagaatatgatatatataaaatagtggttttgattttctgttttataactcatgagctgtgtgattctaggcaatattttaatctctaaactggagatttatttaatctctaaattggagatttattaaaatggagatgattcctctgcctcatggggccgttaattaggatccagtgagagatgagtgctttgaaaactaaaaatttaccagtgtgcaatggatttattgttactagaagtttctcaagtggtaacctttttttttttttttttttccgagacagtcttgttctgtcgcccaggctggagtgcagtggtgcgattttggctcactgcaacctccgcctccagggttcaagcaattctcatggcttatcctccccagtagctgggattacaggcacctgccaccaagcctggctattttttgtgtttttagtagagacagggtttcaccgtgttggccaggctagtcttgaacttctgacctcaagtgatttgccctccttggccttccaaagtgctgggattacagatgtgcgctaccacgcctggccttcaagtgatacactattctaatcttgctttatctgactcctcatcttcccgtcttcccacatccaatcagagagtttttgtttttggcggtttttattttgttttgttttttgtttttagatttagtcatctgctctttgatttttatctaaattttctcccttggataattcatttattgtcaggattttattacctttttgtagataatttctaaacctccactctactgtcaacttttgattgctctttttttcctttgcagtacctatcaaatgtaaagtctgaattttaatttttattagaactgagctcatggtaggcatgcaataagttttaacaaaaatgaattctctgccaggcactatactaatgctttacaaatatttattcaatgaaccctagaccactatgaggtaggtactcttaaatcacagttttacagatggggaaaaacgagacagagattaagtagctcattagtgccaggttatggacctagtaagtggggaagccaggactcaaacctgggcattctggcttctgagtctctacacccccaggaggcagcctgcatcttgtgttcccccactgtgcctttccagatctaccaccacccttctagtccagaccctttggcttgtatctggtctggtgacttaattcaggtacctgttagcagtcagaaactcagtgtctggagaccagaaaagttaggtacatgaaagcaataagcctagtcaggcgacagcacaggaaaacacacagaaagcacctgtctaaaggaaaccacattatcctcatatgggcggttggctttgagaatgcacagcttttggactttctggctcttccagacccatcagacactaccagagccacataagaaatgtctgtcggccagaaataggctactcttcctcctagaatggcccattctgttatatcagtttaatcttaatagtattttcatcattctcagctctaatgtcaacaaaggcctatggactgaagtttagactgctttgtgcagcatcaaaatagtcgccagcctagcctttcacagttttgccaggattagttcagactatgaaaggcacagttgtatatctcattgttagaataacagtctgctttatttagccttgcctattatagcataaatattctgtattcatcctgccctctagatctttttttgtaatctttttgggaatttcctcctttatactctcatctttaaaatattttattatgaaaataagctcaatatattacagaaatgcataagaaagcacaaaccacctgtcatgtcacaacatggacagtctaggtaactgtgaacttcttgtttcattttattttcatttatctttttacaatttttttttttacattggcaacattttcaaaataggcatccagaactgggcgtggtggcatatacctgtagtcctagctactcagaaggctgaggcagaaggattgcttgagtacaggagttcaagtttagcctgggcaacatggtaagactccgtcttgtaaaaataggcatccagggctgggcgtggtggctcacacctgtcattccagcactttgggagactgaagtgggcagatcacctgagggcaggagttcgagaccagcctgaccaacatagtaaaactccgtctctactacaaatacaaaattagccaggcatggtgtcacatgcctgtaatcccagctatcgggaggctgaggcaggagaattgcttgaaccccgtggggcggaggttgcagtaagccgagattgtgccattgcattccagcctgggcaacaagagtgaaactccgtctcaaaaaataaaaaaaaaaaaaaaacaaggcatccagcggaaagtcctgcttctcttcttttgaaccttagttattggttcctctaatcagggacagccatttttaccaattttgtatgcccatcagagatattatacaaatttactatttcatatatttttcccacgcaaatggtagtatgatatcctgcacctacttttttcacttaaagtatatcttagaagttactgtatattcatgtataaagcagctcccttcttttacagcttcaaagtattacactgtattaatgttccatgatttatttagtgctttgtaatcttttgctcttaaaaaaatagtgctatataagtatagctgtaggaaggattcctagatatgtaaatgggccaaaggctaggtttttaattttgatggttctttcctccttagagagtattccagcaaggtgtgagagtggttcccctcaacttctcactgtgttatcccatgttggccaggctggtctcaaattcctgacctcaggtgatccacccgtctcggactcccaaagtgctgggattataggcgggagccactgcgcccagccttaataacttttaacattacttgagcacttattatatcccacactatctgttggacctttacttgtgttctcctttaattatcacagtggtccagtgaggtgggctttttcttacccattttacgtaggaaactaaagcttagaaacaaagtaactggtctatggtcatatcatcctaaacgtgcccgatctcgtctgaaataaaataactggtcttaaatacacttaaaaactaatcagtggtagggctggtatttaaatctcagaggtccttcttagtgaccttttagtctgttgcccaaataattgctatgactgagagtgagcccaggttgagaagcatgacttagttcttgcacatttaagatttttgttgttagtttttttttgtattcttttcaacattttcaggtttttcaacaccagctatttgatttttttctactcttctgctcataagcatttaatggcttactgtgtcaaatctaaattcttatgttttcaggaatccccttaacctgctctcctttcctgtgaattgacctgacgctcatatttttacttaaattgacatctttaaacttcagtaaatgcattgtgtgcttgggagtccactcattctcttctcctcaacttaaaaaattctatctgttcttcaagaactggctattccatgaagctgtccgtgtttgttttggttcttgctgatctatttcccagttgttcaaacttttccaacacttaaacagtctgctgtatatttagacactgattttgtgtcatttgtgtcttcattacttaatgggttcattatgtagattatgacagcagagatctctttcaaaccctgtgcttccccttttctactgcccccttccttatcaagccaaattgaagcctaaccccaagcctcctctttactggtggcttcaggaccagcctgtatcctgaggttctttctggcccttactgactctgaagtccttttctaaccaattcctgtctggtaaggagtttaagctgataagttgtgtaagtactgtttttctcatgtttagttatttctggtggaagatagtacattagaacacaacgctaatactctgtgtgtgatctgtagcaaatagaaatattccaattatgcagaaggagcaaaattgggcaatggaaaaggcactttcaggggaaaaagtatttatgtgattggttgaaaaggagaaattttactttagaaatgaattagaaaaccgataggtaagaaagtggcatagaatgaattgaagatgatagtagggaataaaagaagatggaaaaagaaatgaaatacatggaaaatcaactttacctaccttaaaacagttatagcaaatgtggatgaaaccataaggcagactgagaaagagctgagccagaagccagactcagttttaggaaataaacttcaagggaaaaatgagtcatcacctctcagtgcagaagctcagagaaaaagtacactgctttaagataacttgtatgtaaaaataaagatgtatacaataaacttttgcttatatgggtatttaaaatacccatataagcttatataggtatttaaaatacccatataagcttatataggtacataaaatatgcttatatgggtatataaaatacccataaagatgtatacaataaacttttgcttatatgggtatttacacttttagttttgattttacttctttttttttgagatggagtctcgccctgttatccatcctggagtgcaatggcgcgatctcggctcactgcagcctctgcctcccaggttcaagtgattagcctgtctcagcctcccgagtatttgggattacaggtgcgtaccaccatgcccagctaattatttgtatctttagtagagatggggtttcaccatgttggctaggttggtctcgaactcctgacctcgtgatccgcttgcctcggcctcccaaagtgctggggttacaggtgtgagccactgcgcccggcctgatcttttacttaactttcttttttcttttctttttttttttttttttagatagaatttcgctcttgctgctcaggctggagtgcagtggcacgatctcggctcactgcaacctccacctcccagtttcaagcgatattctcctgcctcagccctcctgagtagctggaattacaggcgcctgcgaccacgcccagctaatttttatatttttagtagagacggggtttcgccatgttggccaggctagtctcgaactcctgacctcaggtgatccacccgcctcagcctcccaaagtgctgggattacaggaatgagccactgctcccagcccttttatttaacttttaatggaagtagtatatatagtaaaactcttggagatggaaatctacaggcatctattctcctgtgattcaatagtaaataacaagtataggcaactgtaaggtaatgagttagagaaaaattgagatcctgctcaattagttacagtctttaagatgggaaagcaagtcaatatttttccttcactataaagtttcctaatgttataataaaataggccaagggctgggcacagtggctgttaaagcacctttaagtatagcacttaaagggtatctttttttcagttatgtcattaaagtcggttatcaaatatttgaaaacctatattgttccattcatggtgctactcggtggaattatagacaagatcttcacaggattcatagtctcgtgggaaggaagatcataggacagataaccacaaatgtgtcgtatcaggaagttgcacagtaggtttggaagacctagtgtttgtggggttgggcagtgggaaactcagggtaggctttctggataaattatggtttcagccagaacttgaaagatgagcaggagttagttggccaagtgggagcagggagagcattccaggcaaagggacccccattgtgacagctttgagtgaggctgctgggtcaaatctaaaatgatactgaaatgttggtggaggccaggttaaacaagattttgcaggctcttcgagtccctgaatattatagtatttcttctcctaatgtcagtagttcaactggtattaaatgtttggatgttaaactaataatagctaccatttattatgctttgcagttgctaagtggttttgtctagtatttgatcttctcaacaatcctatgagctctgtttgaagaaaaagtggacttcacatatgggaaacatggagcatggttcagtacttgcctaagatgagactagtcaggctacagtgtggggagtggattggagaggagaaaagtggatatgaggctacaaagttacaaggcttttactaacacatacagtacaggggcaatgctggatggtaagtagcagtgaatgtggagagaggtgacatgtttgggagattatattttaaggccatatcacagaagaatgtgatgatttgttgtgagggaagactcccaggattctcagtagctgcgctggtggtcttgttgcgcactgagcaaggagacactgttaggataggattgtaggcaaggttaccaatagggggtccagggatgcatgttttaagatgggggagagacaagtatttaaatgctggtgggatggattcaggagatagatcagatatagaagagaatgtttggccgggcacagtggctcacgcctgtaatcccagcacttttggaggccgaggtgggtggatcacatgaggttaggagtacgagaccagcctgaccaacatggtgaaaccccgtctctactaaaaatacaaaattagctgggtgtggtggcacatgcctgtaatcccagctactcgggaggctgaggcaggagaatcgcttcaacccgggaggcagaggttgcagtgagcctagatcaagccattgcactccagcctgggcaacaggagtgaaaatccatttctcaaaaaaaaaaaaaaaaaaaaaaccgaaaattaagcacagtgagaatgtgttcaattttaataatttagtcactaatattttttacattagcatgaatgaagtaatttccatgacagatcttcagatttctagattgtcatctgctttctctttttttttttgagacagagtctcgttctgtcgcccaggctggagtgcaatggtgcgatctcagctcactgcaatctctaccttccagattcaagtgattctcttgcctcagccttgcgagtagctgggattacaggcatgtgccaccatgcccagctaatttttttttattttttatttttaaaatttttgagacagggtctcgctctgccacccaggctggagtgcaggtggtgtgatcttggctcacggtaacttccacttcctgggtttaagcaattctctcgccttagcctcctcagtagctgggattacaagtgcgtgccaccacacctagctaatttttgtatttttagtagagatggggtttcaccatgttggctaggctggcttcaaactcctgacctcaagtgatccacccacctcggcctcccaaagtgctgggattataggcgtgagccacagtgccggccctttcttttatcttttcatttaatcccttcatttagttcagtgggtctcagccctgttgatacattagaatttcctaaatgctttgtgtgtgtgtgtgtgtgtgtgtgtgtgtgtgtggctttttttttttttttttttgagatagggtctgtctctattgcttaggctggagtgcagtggcacaaccatggcttactgcaaccccaacctcccaggctcaagcaatcctcttgccttagcctcctgagtgactggaactacaggtgcaaatggccatgcctggctaatttttgtattttttatgtagataggctctcactacattgcccaggctggtcttgaactcctgggctcaagcaatcctcctgccttggcctccagaactgttgggattacaagcatgagccaacacacctggccagcatatttttaataaatagcagtctgtgttcccactgcagacaactgaaccagagtttctaaggatggggcaagggcttgggtattttgtaaccatgttgtggttatgcttatatgcagcccaggttgaaaagcatgacgtagttcttgcacatcaaagatttttattttgatttttttctttttgtattcttttcaacattgtattaacatacagtgcacatctaagatttaaagatcttctgagacctgttaccttaaacttttgctccatttagtaaagctccttcttccagccagcttgtttcagaaactacacaaatcatgaattagaacaaaaacatgtatacaaaacctttgattgttagttggatatctttgctatttcattatttactaggcgttgtatggcttttagtgtgctcattttacccttgtgcttatgtctgatcagct

SEQ ID NO: 782 - DNA, 2602 bp, Homo sapiens
agcgccttcgctctttggctccctgagttagtccggttgtttgcgatcgccgcggccggggctgcgaaccgaagggctcgctccgcgccgcctgggtctctacctcatccgtaggtgtggccctgatggtgtggcaggctctggactcctaaagctctggagcgaatttaagattttattcatgtgcatggcatagaagatgaattcttccacttccaccatgagtgaagagcctgacgctctatcggtagttaaccagttacgggatctagcagcagatccgttaaacagaagagccatcgtccaggatcagggatgtctgcctggccttattttatttatggaccatcccaaccctccagtcgtccactccgctttgcttgctcttcgatacttggcagaatgccgtgcaaacagagaaaagatgaaaggagaactgggtatgatgttgagcttacaaaatgttatacagaaaactacaactccaggagaaacaaaacttctggcctctgaaatctatgacattcttcagtcctccaatatggcagatggtgatagttttaatgagatgaattcacgtcgaaggaaagctcaattttttctgggaactacaaacaaacgtgccaaaacagtggttttgcatatagatggccttgatgatacgtctcggagaaatctatgtgaagaggctttgttaaaaattaaaggtgttattagctttacttttcaaatggctgttcaaaggtgtgtggtgcgaatccgttcagatttgaaagctgaggctttggcatcagcaatagcatcaaccaaggttatgaaagctcagcaagttgtgaaaagtgaaagtggagaagagatgttggtcccattccaagatactcctgtggaagttgaacagaacacagagctacctgactacctgcctgaggatgagagtcccacaaaggaacaggacaaagcggtgtcccgggtcggctcacacccagaaggtggagctagctggcttagcacagctgcaaactttttatccagatcattttattggtgacttcacttttgggctcaaggactgtgtgaaccaacaaggggccagttttccattgttgtggtgaactgtcaagtgcaatttgcaataagttatcatgaaaagtttttagattacacgatcgcatatgctgcatttcacattttattggacattttaccccactgagtggtaaaaaggacagaggctacagatggagttgctttgtttatgaaagtattttggtttgttttctttcatttaattgcctcatatttaaaaaccatgggtccactgttaaaaccacatgtgtatgtgcagctttacattttattttacgtgaagcatgtgattaggaaaactcattttcttttcaagcctcaggacctacctgaagagaagttttcttgtagctcaagttgtgcatgaattactgaatattttactgtgcttttcttcatgaagggtacatgctttgtactcttcactgaaagctgaaaacatttcttgttaccctcttttgtgcctttttattttgccaaccgtgtttatagaaaggacattactaatgacattttgcagattaaaaacattcatttgaacacagtagtcccctagaaaaacaactctacaaaaattttgcagccttattcattataattttgataaaattaacacaaaatcagtcaagaaggaaacatgtatattagtgaagtgtttttggagactgtttgaatgtgaccaaatgtggttctagttgacttcttttcactttggcttatatcaattcttgagagttaatgtgatcatgatattgcaaacaactataaatggtctctaggccttactttgtgattatacgttatctccggctagaaaaaaataatggtagtaaagaaactgacaaactgaaaataagaaaacaaaaatcaaatgcctataataccataatgccagtttggtatagagtccaactttaaaacatgaattgctcgacagagttctattcagtaggtgtttctttgtattgtcttttgtgaatttattatgaaaatgctgcgttgtgttgaatgaaaaagacccaaattactgcttatgaagaaataaagccagcattgatcacttaatcctgtttctcatgtccagccagaaaaaagaacttcagtgaaggtaagataaataaatacatacacatatgtttttttggtagataagtgctaattacatatatgtaatgctttattaaatttctgaaatatttggtaactaaaattttctttttggaaattaataaatccagatacatattaatgttgatatgagtaaaaacaaataggaagaaattgaaatttcttttcatcaacatgtagagctgctattttactatttggagaatatgatgtgaaaattggacctcaaagggtttccttgtgttttcattgtaaaataccatcatcagtgagagtcttgagttcactaacattgtcaccttctggagagagagttaatggggggcattgaggatgatatttttttacatgtgtttggtttctgattcaagtgacacgcacaaactga

SEQ ID NO: 783 - protein, 280 aa, Homo sapiens
MNSSTSTMSEEPDALSVVNQLRDLAADPLNRRAIVQDQGCLPGLILFMDHPNPPVVHSALLALRYLAECRANREKMKGELGMMLSLQNVIQKTTTPGETKLLASEIYDILQSSNMADGDSFNEMNSRRRKAQFFLGTTNKRAKTVVLHIDGLDDTSRRNLCEEALLKIKGVISFTFQMAVQRCVVRIRSDLKAEASAIASTKVMKAQQVVKSESGEEMLVPFQDTPVEVEQNTELPDYLPEDESPTKEQDKAVSRVGSHPEGGASWLSTAANFLSRSFYW

SEQ ID NO: 784 - DNA, 47040 bp, Mus musculus
  misc_feature (1)...(47040): n = A,T,C or G
gtgtaaaaactaagagaatatgcttttacttggtgtttagtttctggtttaaggaaacagggggttggaactaatgattcagaattcataaaacttttatgtaaatataagaacttctagtaatattattaacaatgttcagagcctcgaagatgaaactttagtaaataaaagactgggttcaggttctcgggtcaggagaaggctaaagcatgagaagagagaaggctgaagaatgagaaagaaggggggagnnnnnnnnnnnnnnnnnnnngaggaggaggaggaggaggagggaggaggaaggatgagactcctcgggcaaggagagagcacttgaaccaacagcttgcatccactgcacccagcaccgctccatgctcccctttctcaggaccctcctcatccggagcctggaactcagcataagtaaaatcaggaaaactgccacaggcttaaggccaaggtcggttggggtcggagaagatcctgcctcaaacaacagaaataaacctcacgacaaaatcatgctctccacaaactgataagtcgaggctctaaccccacagtgtggctgtgtttgaggtagggcttttgggttaaagaaagtcctaaggatggggccctagtccactagaagccctacagaagggaaaccagaacccagggtacagtacagaggtaggatgtgtgcttagcctactcaaacaggattctaggaaagttcccctgcatcactgagacaaacagaaggaagctgtcccctcttacctgcttgacccccaatatccctcatgtttggaaaagagccctcaccagagactgaactctcctcaccttaactcctagtctggaaactgggacttctagcttctagaattacaagaaataaatagcaatgtattgggggaagattcagttcaggcttttttaaaaatggagggtgggggtggggctggagagctagctcagcagttaggggcactgactgctgtaccagaggacccaggttcaatccccagtacccacatggcagaacccaactgtctgtaactccaggatacaacatcctcacatggacacatgtgcagataaaacacccaccgatgcacattaaaaaataaaactttttgaaaagggtgtgtgctcctagacgtgagctattataaaagctccatggacttgttaccactttggaacatggtatttggggcctcctgaatccatgtgccctggccaaggtcactgatacatgcctacagaccgaaccttctccataagaagagttttttttctttcagtgttgattggagcttcggtaagcagtagtcagtctagctctgagcagcatcccccacccattgttccttctttcattcttttcattcacatagacacttcactgctgttagcatctaagttttgattcatgtgaattactcaaagtaggcatcccgttggcatgacaggaggatgggaggtggcaggcctgaggaaggagatctattggtaattaagtcccaacctcatcccatcatggggtgttgggagccattaaggcaacgctattgtcctggtctctgaattgggcctctccccccgagaagaaaagagggtcaaaagcgggccaccgacacatggattccgagaactacaggatgttccagctctgggtcatcaccgctctcctgaccacaccctgacaccaccaagttcctgcttccccgtgtaactgcctaagaatgtgcaattctattgcccccccctcccactgataattacttccccttttgcttgtattgccctacccctcccactgataagtatctgtacttccccctttgcttgtgcatttaaaccttggacctttctcaatacattggggtcttgatacaacttcagaacggtttccgtgtcgttattcgtacaagaccctcgtctctctctaccccccatttggttattaggaggaggtcccctcgagatcctcgaataactggacctgctggacgggtcaatggggttcatagactcccagagacatagtctcccagagagtcatcatatatcacttcctaaagagcaagcttgttccagtggatcccagtttcttcaggtcctcaatgatgtcatccatgctgcattttacgagagcttgcttccccactccaccaatgcaaatgacctccatcatcctgcctggggccaaagagccaagttctccaacccaaacccagaagtggcaaggagcaacccatctgcagaggcagatgccgctcagggccaggcagccttcagcctatttttattctgtagggttgttttgttttgttttgttttgttttgttttgttttgtttggagacaggctgtaatgtatcctaggctagccttaaacttctgatcttcttgtctccacctccccagtgctggggttacagttatacaccagcatactaccttaagaggcactggggatggaacccaggcttcgtgaatgttaggggatcattctgaacgttttaaagaacagattctttccagacctgacagagaaatgcgtgagatggtttaaggggaagtgccctttagcaaccctggttccttaaagtgggggaaactgggataggagatccaacggcaaccaacagaacactgggattcctagctttcggaggcttgtggaaaggcgcgtctaagcttagggggagggatgtctgagtataacggattagcacaggtactacaaaggatattaaagccataatttaaaagcaaatcctactgttccaccctactccatggctgctacaggcttcagcagtttagggaagttactaaatacataggatatcaggagtgcccctagcaggggcaatgtgtgaccaactgacctacatctgagctctcttttttgttgtttaatttttagatagagtttcctccatagcccacgttggcccagccccaaactcagatcattttgcatgtgcccccaggaccaggcttaagtgtgttgacatggtctcttatagaatctccttgacttcttaatcctcctgcctctacacaagagtgagggaacggtaggccaggaggatctttttatccagagcccatctccccttccagggaatcatttggatctggaacagcagctgtatttctgtttggacaaactaagtcatatgcacagccgaagaggtgaagtggaaacttagggttctttggagagtctgttgtgtcggctggtgttttgctggggcaaacacgtgaaggagtgttttcctgaagtggatacagatggagaagctaaggcagagtcatgaaggaacagttcactgaagcagacacaggtggaaggatgttctgctaaagcaagcacatgcaaggacacatgatgaaggaatctttgctaacaacacgaatgtattggtctgccttacattgcaaagttgagctgcatttgttgagactccaagggctgattggatgcacatgccaaggcaagaaccatgccgaggaaaggcacgtgaaggacactcgatatttggagggtgtattagtcagggttctcaggagtcacagaatttacggatagtctctagatagtaaaggaatttattaatgacttagtcggcagcccaattcccaacaatgactcagtcgcagctgtgaatggaagtccaaggatctagcagttactcagtctcacacagcaagcaggcaaaggagcaagaactaaactcccttcttccaatgtccttatattgtctccagcagaaggtgtagcccagattaaaggtgtgttccaccacacctttaatcccagatgaaaggtgtagcccagattaaaggtgtgttccttaaacttggagatttaatcttctggaatccatagccactatggctcaagatctccataccaagatccagataaggatctccaagcctccagataagggtcactggtgagccttccaattctggattgtagttcattccaaatatagtcaagttgacaaccaggaatagccaccacagagggtataaacaggactccatggagtgacagaaacagggcttggcttgctggtacagctggctgtgcaacgcttgtgagtcttgcaacttcactgaccttcgagaagagaggcacagctgaggacttctgatgttcctattggtcctggtcccacctgctgacttgagctgaggctgaggcctggctgtctctgctaggtcttgtcaccacagttgctaacccgactctaccaaattagaccgctggtgtagccgggaagtgtttgcaagtggatcaagctgccgctgcctgctaacctatgaactgaactgctgatttccagacaacacagacgggaattgctccaaagaacctttctaaacaggtccacttcccccacccccacccccattctttctttcccactatctctggtggatggtggactacaagagaggttaaagtgtttaagaactatcattaaaaataagatttgaaaaaaaatcaaatctacaaagaggggctttacagaaaatctcagtgaaaaacacacgtcattaatagcagcacccacctttcactgaagcatttgggaagcagagacaggcaggtctttctgccttcaaggtcaacttggtctacatcatgagttccaggccagccaaaagctacagagcaagacccttctcaaccaacaaaaaagattagacaactgcaagaagggacaacataaataaaaggaggaatcaaaacagaacaaaacaaacaaacaggtcatcatttcacctcccaacctgcttcccaaatagcccaactgagtgaagttgccctgggtgctttggtaccacctgccccacacacatgatcttactaagtagctccagctgctcaggaatgcagtgtaggccatgggagcctcaaactcacagctggcattaaaggcatagcaactattccttcccacgcccacgccgtggtggagctcagagctccacacttgctactgagctacgcacccagctgcctagagcttaaactgtcatctcctattggttttcggagtttgtcttgctagatgatgtttccaaaaagcaactctgagccaggcttgggggcacaggcctttaatcccagcactctggaaacagaggcagtcaaaactcttatcacccagaggctagcctggtctacacagacagtcccaggccatccgcgaaagcaactctgagctccgaaagtacaacctctctgaactgccctctaaatcttcatgcttgttagaccctccataccctgctgcagaacccaaggctttgtccaagctaagcttatgtttctacccagctagagctgcaaccctcacacttctgcccagttttccctatggacactctgccctcaagccttattaatgctctgtacttgcggtcctgaaacacaggcctcctcccctctatctgtaaacatcctccctggtccctttccacttcaaatgtgccataccagtacatgaagcctctccagtcaattaggactcctcttctgcttccatgatatcttctccatcccttgatcctgcacttaccgggtaaataaaaccgtttgcgataaaacacaacaaaaatattgtatttatgcaatgtctcctctactagacaaattttgttcaattcgtttatggaatacactaacaggggattatataatatttgtctattctgtctaagcaaatagttgctgaattgtatgtgaatgtgtgtgtgctgctatgggtcaaacttagccttgcaacacattagagaagcaaggagtctgccttctcatctacttccccagtccttgaatgtatttttgaagtacataccttttaatttctagctttctgattgcttaaagaagttcgtgtttaacactacagttaggatagcatcctctttgaaaccctttgtttgtgggatgggggtgctggggtatcaaacctaatgccttgtgcatgctaaatatttgttttatatttatatacttttgtttattgagacagggtcttgctatgtagccttggatggcctgaacttgctaagtagaccaggctgccttgaagtcacagagctctgcctacctctgcctcttctagtgttggaatgaaaggcatgcaccaccaggacagatctaaaccttgattacatcgtgaattttgtcaacctaaaaagacaactctcatttcaaaagagataagagatagctttattctagaaccaaatgtaagtgactgtgactcaggaacacagatttaggttctccacactctccatgttctaatgtgggatcagtcagtctagtgaacttttacagtaaaaaacaaacaaacaaacaaaaggaattggaaatcaagccacttttcaaatacaatggtgagaatatcagataggtggatcagagaaaggcagggaaatgggaggctttggctcagatgttatctgaatggcattcttagcctttgggctgtggggtgctaggaatgtgtctgtacattccagaggacttaatagtcacatgagattaagtcacagagccggtactaaggagcctgaaaatgacaggaggtgattagctctggacttgcatcactcctccctctccacgccagggaagctctggccagccaatcgggcttgcagacatttcctgtaaactgaggttctttccaggaacctctgctctcactatgcatatttttgtgtgtgatgctcggggtcttgttcatgcttcaacagtactcaacttcagagcatccttcccaatatgtgactatgaacaacgacaaccacgggaccgacacatcagtacacagttgccgctcagcttagtctcttcactctcgaggttgctgatacaatggcttcttcatgacatggtaatattttcatatatgtacatgatgtatcccatcatatccactctttctctgttgtctcttgcctcctaataactgctccttctcctgccgtgtttgtgtgcctttgtgggttccactgagcctcagtagggttgtttacagtagcaacagttgctttgttgccagagcacaggtgagtgcctcgccaggattctgaagaaaatgtcactccctacccccatcaacacctaactgcctctctgtcctaaatgaggactaggacctccaaagccccttgagtgttgactggccctatcttctgcaaataatctgtgagttgccaaagtcgaacaactatgtcattcaaggagagttccacatgccctctcccctcaccccccccctgcctccccgttttttgagacagggtttctctgtgtagccctggctgtcctggagcttgctctgtaagccaggtggcctcaaactcgcagatttctatgcctccaaagtgccgggatcaaaggcgtgtgccaccacgcctggctactctttgctctctatccatctgctaatgtcccctgaatgttggaggacatgcgacagctgtcctgtttatgactgggcactcaagagtcacttaacctctgtacttttgattagttatgagtctctgcagtcacccgctgactactgcaaaaagaacctcctctcagcaaagctgacggcagcagtaacgggcaggaacattgctatttagaaggtaattagaaaggcacatcatgtccacttatcaaaacaatggaagtagcttacctactggactctacttcaggctttggaacaggttcacaatagcagaaatgaattccctcctatcgggcaggcctcgatgccaatcagaaaacggttggctacccctgtaacagtcctgacacgttgtaccaagaggttgttgtctggtcagttgatgttgcacatagggtccacagcaaaggctgttggtgacaaagctccccactccccaccccacccccactcgcccctgctccagcagcctatagaataccttgtgtgcgctaactgggaggaaccttccagtccggttccagctggatccctccatgttctgtgactaacacatatgtcgacacttcagggtcttatcatttatttctggtaggcagccaatagcagtggcaattgcctgtagtgttttaatggcttcaggagctactatatgtacagtagcccatagctggcactgggcgctctaatagcctatggcttgggtggggaacagctttatctacccaggaaacttccactcaagctactttttttaaagatttatttattattatatctaagtacactgtagctgtcttcagacacaccagtaaagggcatcagatctcattacggatggttgtgagccaccatgtggttgctgggatttgaactcaggaccttcggaagagcagtcggtgctcttaaccactgagccatctctccagccctcaaactacttttaaacttgttaattaattcgctcatggagtatctaatttccttaaggctgtctcattcattacaagttctggttgaccctctctgctccctctgctgtgctttcttggctactgacaaactgcttacaggagtaagaaagggaagggggaggggagaaaatgtggtgtgtggtgggggttgggggagggagggagtcagcatccatagatccattacctaaactgtaaaccaactgctgtattttgttctatctgcaaagcacttgctaccttcttatgaccctttgccttgcctaatgactcatgggcgattgattgctgtacagataagaaaactgagcctcagacgctaataatgaccagctaaggagttcctggccccgatgctgtcatcggcttgtcagctgattcatccgtatcctgtgggtgttagatgttttaggccaggtctggaaagcattttgaatccttggtgacgatactcattcaaagtttcttttccattcccggttagggttagtcactccttacacaacctacctgaggtatttcttcaactcattctctcctgcttccctctccgcctccccccaccccttccctctccatacccccttaggtgagaatgtgagtcttgggcctctcaagtgctgtgtaagtgctccaccactgagcaacatctccagcattttcctggaacatatggcatccgattaaaacacagctctgaccatatcctagcatccctgcaacagagctgacaaaaataagggttttctcaagagaatgtgggtgtgtgcatctgactctcagactattgaaacaatggaccccccaagaaatgggaatttccttcaggaaactcctgctgggaaaaggaaaaggcctttgcttgagggggaattctttcaggaagcgggaattcacacagttctatctagtcagatcgctttgacccggactgctgagatgtgcatacccctggccttctatttgaactttaatctcattttgggatcccagagagaggttaactcttcgtccttctaccccatgtgggcatattaagtacatctccttttttcagttttgttcgtttgtattcttgttgttgttttgagggttttgtttgtttggtgtttttctgtttctttgtttttattttgagacagagcttcactgtgtagctctggccggccggatctctccagaccatgttgaagatccgggcccctgccccagtgctgagattaaaggcggtcgccctcaccgccgcacctgctttccactttcaatttggctttttcagtggtttattggatggataatgctttaaattcggtaacagtccaaattacgtctggcccatcccaagcagttgttttgggtttttttggttttttcgttttgttttgtcccccccaattcccttagccttcattttccataactacagtgctgtctcccaggtgtgacttccagccctccaatcagggcccagctagctccaaggccaattccaccagaccttctggcagggctgacgctcaacgccctgcagtccgtttccgcctctcgtgcctgaggggcggatgcttgtcgcagccgccacacaagtagccagcacttcccggtgcctaatctccttcagcaccgcggagcgtggagcccacagctcggggaggacgttctcccagacacgcgctcgcacacactcagcgctggcaccaacccgggattcccagcctgtggacgctcccattgcagccggcgggaggggacagannnnnnnnnnnnnnnnnnnnctggtcgtgcgcgcggatccccccctctgcagccaccgcgtggtagcgcccgctccgccgccgctcgccggttgctccccggcgctagctccctcgcctcagtgagccgccgctgctgccgccgccgcgtctgcctcccggcacagctcgcccggtcggcgccgagggacgaggaggaaggaacaccccgcagcgcagcggtcccgcgccacccccaccccaccgtcgcccgcccagctcggcccggctcgtcagcgcggcggcgcccggcatgtatcagagcccgcggcggctctgctcggccctgctgctcagggacgcccccggcctgcgccgcacactcgtgcccggcccgcgccgaacgctcgccccgccggtgctcggatctcggcccaagtccccgcaactgcaggcggcggcggcctcgggcgccgcgaggtcgcgtccccgaacaggtgagcgggagcgcggaatgaatgggcgccgcgggctggtcccctgcgttcaccccggcgtcgcgtcgggagggagggaacgccgctcagggggcctcgctttccgcgttcgtgtctgatccccctgaatccccggtggccacagtgaccccagtcgctaacgttttgctttacccctcacccccaccccccgatgcagggcggtaacgctttggttgcagacggcttgtggacatcctcatgaaggggaaaaaatatctaaaaatggcatgatcttgggtttgcagggcctacaggctctgaatcttctcaaagccctggtagtaatagcacatgttaactcgttacgctcattaatttatttatgttttggaagggggggagtcttccacttcgtcttaaatccctggtaaatcaacctttcatgaagtcagttctgtacatcatcttgtgttttttaagtgtctcctttctgcctaaaagcagattgcgacggtcacaaactacatataaatcaagtatggcttttaaatgagtagtttctccctcaaatctagcaattacttaatgtaggcgctccttcagaaccagcaattattccatagtacttttctagaaagtgtaatttggttgttacctcaaattaggttattgccgtctaacattcggatgcagtaaccatccttattttactagagtacattttgagagagtattggttgaatttaaggacagagtgtacattagaacgtataggttccctgtggttgtcttttgttgcctttttttccccccaagacatggccatggctgtcctagaccttgtctatgtagaccaggctgggttcgaatttatagagatccacccgcctcagcctaccggatgctgggattaaaggctagcacgtggcgccaagtttcatgaggctttctttaacgagttatcgcagggcagtggtggcccacgtctttaatcccagcacttgggaggcagaggcaggcagatttctgagttcgaggccagcctggtctacagagtgagttccaggacagccagggctatacagagacagctgtctcaaaaaggtaggaaggaaggcaagacttttgaaagtccagggtcgtgcccccacctcagggtctatagaaccttggtgggttgtggaataactgttgggatggatagcatcccagtaacaccattttcctgttgctcgtctcaaggaggaacattgttaggtttggtggtggaaaggttggctggtaccagccccctccaactccttcagaagccggatttgtcattaggcacatctgtgtgcacaggtgggttatgtagttcagagcaaggacagctgtggtaatggagtcaaagagttggcagtgtgaggcttctgaccgatgtctaatgcatttctttaaaagttaattgaaaccccttggatttatgggtaaaaacctatagatggaaggaggtagggtagggaagtggtagactgtgggttttacaataggccctagcagcaaagaaagaaattgcaggcttttttgtggtacttaaactatcttagacagcacagggtgtaggcaggtttcctgtttcttgcagctttgggggaaagatacagtcattgattcgttgctcattcttatgccgtgtcactcactgtagaagagtctgtaatatattaaattgatgagtctaagctttaggttattcaaagagcttacttcccattaggaagtgagatttggggctaaggagatggtgcaaatggtgaagatgcagaagacctaagttcagtccacatgatggaaggagagaaattaagtccttcaaggtgttgccaggcatccacgtgtgcctacacacatacaacaaactctcgggatttttagatttggttgttcgtttgttttgttttgttttgttttgttttaagaggtgagatttaagcagatgtggtgattcaggctggaacatttcttttttttttttgttttgagagtctcaatgtaacccttgctgtcctggaaccctgcacccaagtgctgggattcaaagtgtagcctgaccaggagcagatcttgaattcgaggccagcctggggtacaggttatggttccagtcctgtgttttttaagggggggggagctctcacaaaggcctgtgtcattaaatgaaacaccttttagtctcatagtgacatttttgctgtgacaaggtggaggtgacctgtagtgctaactcttgatacttccggggttcactcaggcggtcgcagcattcaggactagacttgaaaggagaagatgcagcttgaggtgctgacacaaacctttaacccagcactcggcaggcgggtctatgcgttcgaggccagcctggtttaccgagttccaggaaaccctgacttaaagaaaaagagaaactggttagggttgaaggtgaaccattcaaggaaacaacgcggaaaggaaaggtaagaagaaggacatctaaggcgttaaatgagggtggagaagaagccttttgcagaaggggcggcattcttcaaagtatcttggaaacatttcatttctgctcaagaacaagattattgagtttggtaaatcaaatcgaatacccaggttccacattataaaaaagaaataacaagtcctcaaatcccttttatttcttccttctcactttttaaataaagattcttttatttattttatttatttttttggagacagggtttctctgtgtagaccaggctggcctcgaactcagaaatccacctgcctctgcctctgcctcctgagtgctggggaaaaaggcgtgagccaccactgccctcattttcaaaaaaaaaaaaaaattgggtgcttctcgtgccaagggtgtgggagtacctgaggaggccagaagagggcgtcaaatcctggggatgtttgttgggagtgcaccagatgagggaaggatccagaagagcagctgtgctcttgactattgcgctgtctctaggccagcaccttcccttttttttcttaagattaaaccaagatccttgctcatgttaagcaggtggtggcggtggtggtttttctttctttcttttttgagaaaagggcaaccatgttgcccaggctggtcttaaacattcttttttttttttttttaaagatttatttatcatatgtaagtacactgtagctgtcttcagacactccagaaaggggagtcagatctatacgaatggttgtgggccaccatgtggttgctgggatttgaactcctaaccttcggaatagcagtcgggtgctcttacctgctgagccaactcaccagcctggtcttaaacattcttatgtggttatagataacctcaaactcactgattctcctgcctttgcaacaaaactaggcctgggccaccaggccaagcaagcagattgtctctaaaaagccccgaacttgttaaaaggccttaaaggagctgaaagctgttctacctcttttgtgaggttgtgagtaccaacacacacgttcacagtctaacccgcatcttgcagttaagtgctcagaggatgcgcaccttcagagtcatcacagacttaccacgtgggcttaaaagggaaccttggtggcccatctcagcgttttgctttcctctctaaagccaagacagcagcccacggcaaggcaacagttgccacagttacagtgcggcagggatgcagggagtcctctgtgggctgggagatgctcctcctcctcagttaatgaagagttggctggatcacggctctccaccactggaacacggtgctttttctcttggaacagttttaaaggcaaataccagctcagtagaaaagacatctttatttggtaggccccttaactgtgtgagtaagctgtttatgagaaagaagtgggaaagcttgtaattatcaggtttctccagaatagatgtttatccttatggagaactaagagctatcattctcctgtagtagtcaatggcgacagttaaaatgcagagggggagtgagagtggtggttaggttaggaaccagggctccagatgggaaatcgatgaatgaacttttacaaatcttttgaccttgcttgctttgtcttaatgccagatggcatctagacgagattaacacatcaactgataaggctatatccccaaactttggtgaacagtacactcaaccaagtgttaaaaaaaatgttccatatgctaatgacagcaggagttgagaagaacaagccagattgattgggccagattggttggggggaaacttcaaaggagtgggagagacagggtagtggtggggcacagagagcagtgtcattaaaaacgaacttcttggtgtcaaatgcaaatttggagatttgatttcctcaagagaaacctgataaatattggcaagcaagcgcgtcttgtattccttcaggggttgggagtattctatacacttgagcctgcctttccaaaaggtacttggggtttttttttttttttttaagattcatttattattatatctaagtacactgtagctttcttcagatgcaccagaagagggcgtcagatctcattacagatggttgtgagccaccatgtggtggctgggatttgaactcagaaccctcttaaccactgagccatccccccccccccttttttttaaccacctaattttatgtttacgggtattttgcttgcatatatatgtctgttcaccctgtgcgtgcccagtagctgaggaagaaagtagcaaccttcctggaactggagttactgggtgggtgtgagccctggggaagagcatggagttctcttaactgctgagccagctgcttcttagaacctttgaagaaccatggagaggatctgaaagaatgggctttacttgaaggagaattaggtggtgccctggtatcttgggataaggaggaagggagattgacagccacgtgttaggagttactcttgacctatcagaagtggcatggcctcagtggttatcatacctcaggaaatacttagaacttaggagtgacgcaccttgctggaaccgtctggttagctaagatgtcctggttatctttggtttgcgatgtgccgaggatcgacctgggagcctccccttgcacatgctagacaagtcctgaggcactgagttacatctctaacccttgtatttgttatgttctgtagttgggaaaacagcctccctgtagaaagaagaaagctacagggcctcaagtaaggcttgaagcactcttagggtgagctcagagtgtcagatgtagcaagggttgttcaggaggaagacagataaaggatacagatgtctataaactttttctctttgtgctatcaaaaactgtcaggggcccactctggttttctgaccttaagttgagcctgaacatttggtattctggcatgcccaagtgggtgatgtaaggagactcacttcacttagggctttagaagcctgccctaattttttttattgatgcatttcttataccttcaaaaattagagattggtattagatgatgaggtttgtgcaaaaagggcaactttaaagtactttcactgcatcttgagaatgggaagcccgtgagaggaggagcagtgttcattttctctacacagcccgtctgaggccagcctgggaggcagaggaccctgcctcaaaaagtcaataatacaataaagccagggaatgtagcttagtggtagaactcttccttcagtccccggcaccagcaagaagtactgtgatcacgtgtctaggaagtcccttgctcctagatagagtactgacctctcagtcttctatgtctcccttcttatctgcccttcctgcacctaaatccagtggtgggctttgaaccctgtgtctcttgtgcatgctaggtggacactccccctgagctacagtcccaatttgcacggccttaatttggaagggggtctggaaagtggtagttaggcctgtctgtagaatgaggaagccagtagagaccactttctttgccaaaggtaaggaaggctgcctgtcttctgtgctctctttccctgctcagaaataccctggaaaaatagcaagatagcacaagctggtaatgccagcccaccctccctctagaggttgatgccagaggatttcaagtttgaagcctgcctggactgcacaatgaggtcctgcctcaaaaacaacaacaaccaaagtgaaccaaaggggggaaatctacgtaaacatgcccagggagtttgttcatcgtctgctcctgatctggcctgcctcactctggggacagacctctccaggcctaagttgtgtactcactttctttatagagctttatctgattctgtcctgcaggcagtgagaagggcaggctgaaactagtgcagctgtttaaaatctcctttttacgtagtttgtttgcttatgtgtaggttgctggggaggttataagaggctagaggatcacagggagctggaggttgtaagaaacccaacatggctgccaagaatttgccctattgatggcataacttgtggctttctgactaattctttatggtttttttttttttttagttttatttatgtataggaatgttttgcctgtttgtgtgtgtatgtatgtatgtgtaacacaggtgtacctggcatcctaggaagtcaagtgtctgaccttgtggcactggagttacaggtgcctgtgagtcacggccttgtgtgctaggggccaaacccaggtcctctgtgagagcagtaactactcttaaccacagagacatctctccggccctaagttttttggaatgtaggtgctttattctcaaaagatcttagtatgttccattttgctgtcttgaaccagcagacagagtgacttatggtatgccagataaataaccagtttccatttttaaaagtaatttacaactgtactttagttgtgttttattgtttgtgacaggtctcatcaaatagcccagtggaatttactatgtagcctacctaggctgtcttcagactcactatgtagtaaaggttgaccttgaaccccttgtcatcctggcttccctcccaagtgactacagccatgtgttaccacccgcagaaggttctggaaattcctgtatgagaaattgtctttccttgttttataagtgacagaaaacttggttgatttcatcatatgtgcaaactctccaggagccgtgggtgaaagcaggtaaggagacagacttagaggtctatcttaaggtctctaagaccagctctgtgttaaccaagcagccctgtctggcctggagcttaccagatggacaagcccagccttggattcacagagatccacctgcatctgccttcccggtgctgagattaaagattaaaccaccattcccagggacagtttcattttaataaaggttaaaacatgaattggcagactgtctctgaagagcctcctagtgaatgtttaggctttggcccatgtctaacccctgcagttgcaggtgtgttatccacaggtggtatgcaatatatgtactttttatggacattgaaatttgagggtttttttttttcacgtgtcctggaatattgttctcaacaacttatcaatatagaagaaactaatggtgtttcatagattagcaaccgcacaaggccgggcaggggaccagtagatctggaccatagttgtggaccctgttctagagaactctgttgtcagcagactattcctttgagccttttcacagctgtaagaacaggtcatttttaaagcaactcgggtcttattaattcagggatgtgatggcaccagactgcttgtgctgggcttttccacgtatctcttgagagcattgttctagaacccagcttagggaagcagttggccaggtgataagcaattgcacagcaaacatgttaaagtcagtcttaatttgtttgtttttgagagcatgtgtgtaaaagatttcttgagagatattttctaatagggctgtcatgactgaaaatatggctcagcctcttctggaacatgccctggctgtcttgcctcgcctctgactttctgcctgctcttcatggactatggcactgtgtctaggtgtttgtatttttagacacattagatggagagtcatgaccttcactggctatctctggaaatgccacttgggtcatgacactgctttgtacagtctgtgctgtaccagtgtgtgtgccttgacggcagtgacgtcggcaggtggaggaggtgaaacttgacctctgatgattcctggcacaaagtctgggctgctgtgtgtgcctggcctctccctgttgctggaggcgctgctgtggctcagcagtccagggtgcaggtagctttcttcagggccccagctacagtctcctaacatcagtatccacatgtggacttggggatcgctgggagagtaatgggaacacatagtttgacattgtaacagcctgcttgctctttaaatgttagagagccgcgaatcattcagacaggctaggtacatctgttcagtctcacagagctgtaactgatgtaagcatagtgctagagattgaactctgggtcctgcccacactgtgcaagcacttcaccactggtctacatagcattgaaacttgcggaactatgtcctcatgagtaaagttaaacccagggcagcccgccaaacaccatgggctttgctgataaaaatgtatttattttgccattatgggtaagtgctgtaccaccatatgtctccagcccagttagcattttctaaagcactatgcacggtgcactgtccctgccctcacccaggatacggtggtacacactgctaatcccagcacttgggatgtgaaaggagaaatggctcaaatatccaaggacaactaaagttataaaagtatgtccggtaaagaaaaaaaaaagctagaagctagacctagaggcgggtgcttgaacatttgattccttcaaagtatgcgaagtatgcagtctagttaacatccgcctgtcccctgtcattttgtgtgaactttcacttacttgccctgcaggtggccacatttattcaggaccccacaccagtaaaaccactgaataagctcatcttaacctttagagggagttgagtgcatggccagcagatggcagcattgggctgctggtccttgtcatgccgtgttggtgtgcacttcattgttccaggtttccctaggtctaaggttgatcagcttccaaatctccttaggtgcgtgcctaagacgttcctggattttgcttattacgtcagctggattgtgttgtataacaagagagttggcgaggagtagttgctggataactgaagagagtgtggtgaggagctgctgcttctgattgcgctaggacagttcgggaactaggcagcaccagtgtggatctcagctatgaggctgcctccactgatctagttagaaatataaagctgccttatttaaagtcacactcccagccaggagctgtgaccgctcagtccaacacttacctagcaaatataagaccctgggtttagtctctagctctgaagagagaggtctagataaagctagatatggtcttttatttaatgtagtgtggggcgatgggagactgggtctagctgtgtaaccccagctggcctgaaactgtaaagaccaggtcggccttgaacttgaagcactctttacattaaattctttaggaggagaaggtggtccgtgcctctcatctcagcactctggaggcagcgaaaggctggggagctctgagtttgaggccagcctggcgtctatagagctagttctagggtacccaaggctccacgaagaaatcctgtcaacaaaacccaaattctctgaatttctttgagacaaaatgggttgctgttggccttatggcactgctgactgccaggtcttctgagggacagtaataagatgatgcctcaagacaggacaggtgactgccatccacctgcctccctgccgttccccagcccctgaaatgtgtactggctggtttgtgtatcacctggacactagctaaagccatccgagaggaaggagcctcagttaagaagatgcctccatgagaccccgctggaaggcattttctcaactagtgatccatgggagagggcccagcccatggtgggtggtaccactcctgggctctataagaagcaggccagtaagcaggatgtgaccttccgtgatctctgcaccagctcctgcctccagattcacgccatgtttaagttgctatcgtgacctcctaccaataagactgatatggaaatgcaagctgaatgtcttaggatttctattcctgcacaaacatcatgaccaagaagcaagttgggaagcaaagggtttattcagcttactcttccacattgctgttcatcaccaaaggaagtcaggactggaactcaagcaggtcaggaagcaggagctgatgcagaggccatggagagatgttctttactggcttgcttcccctggcttgctcagcctgctctcttatagaaccaagactaccagcccagagatggtcccacccacaaggggcctttcccccttgatcactaattgagaaaatgccttacagttggatctcatggaggcatttcctcaactgaagttcctttctctgtgataactccagctgtgtcaagttgacacaaaactagccagtacactgaataaaccctttcctccacaacttgctttttagtcacagcaatagaaaccctaactaggacaaaacacaaaacaaaaaaatttaggcaatgtttagatctgagtcattttttatctttataataatcctgaacttataaaaatctgagatatagcatataagatgtagttagatggtagtgtaaactagataatgtaataacagctgttagaaatacgtatttgtaaaattggttgctagctagttgagaaggtaggagaaagggcaggatttctttaggatttgcatgttggtgaatctcagccttgcttgtagagtattgtgaagttttaggtggtccacaccctcgggttctatcaggagtgctaggcttagcagccgggtataattttgacgctccccatgattgaacagtgagccaggctggcgaaccatgggtctgtgatgtcaggcgggtttcgggctagcctgctctatggtgcgctgtgcttaggtgttagcattgcaaggtggtgctgcagggctgcgctctctgcaacaggcgccttccagttaggatgtttcttcactaggctgttgaaggcgttttcctttcatggtgagccagggaagatgtaaggctgttgttcacttttgaatatcctttatccttccagaaccacatagcgcatggctgagaccgtacttagagtccaaaggagacaatggcagggtgtgcttttcagttgaaatgaaagcaacgccatctgtctgcttgtcagcccttcttgtaccttggggggatagctcagtggtaggacacgggcttagcatgacaaggccctgtgttctgtaaacactatagtctgtatttcatagcagcctgtgacagcctgtgacatacttaccctgtattcaggtgataattctgagatattccttttaatcttggagtcttcatttctcttgaattgaaggtaaaattactgtgctaacctgattttcactttttaaaataataaacttttcaaagtagcaatgccattttaaatttgcactgtccataggttcttagggctccaagtactttgttatgcttttttagtattgtgtttaagaactctttgcctaactcacagacaagattttctcctgcacttttcttacaagtttaatttttagctgaacaaggtggcacatacctgtaacagcagcctttgggaacttggtgccggcaggtatgggctaccgtgtaagactttccctctcagttgagttgtttgttgtactgggccagaacctagggctttggacatggtgtgctagacatatttcccatcaccgagttgtagtccctggcttgattaattttactgagatagggtctcactaaattaccttggctggtcttgaacttactgtattggctactcagatatacaactcactatccccctgcttcagcttggagagtaattaggctttttcttcttgggtgggctggggtagtggcactgcagttatggtggagaacgtgatgggtctgggaactgaagccaggtcctttccaagagcaacaagtcaatctaactgataaccaaatctcctaacgccacctagctcactccccaggctggttggatttccagactagcattaaacatgtgtgctacatatgccatgtgtcttagctctcaggaatgtatgtctgtctgtgcacacgcacacaccccgtaatgcatccatgtttgtacatcacaggaaggtaagcgtgaattcccactgctgctacatactcatcttacagcatccctgtcgatctcttcttcctttctagctagggacacttgcacccacctacccttttgtcgttgtattgttttgtttctttataagccagtggtttttggattactaggtccttccctctgagaaaggactttgcctttcagtagaatacagtgcgcatgaccgcagcttctctttttaacccctatgttttgttgttggatattgttttccagagataataaccccctttctcctaggctgctctgagagctggtcattttccttggtcaagtactcttgaagtctccaactgccagttaatatttacatttacatgaatcgagttcattctttatggctgcttctctggattttgatatgaaaaaccatgaccaaagcaacttctaaaagaaagtgtttaactgggtttacagtttcaaagggctagagctcatgatggtggagtgaggcatggtgggaaaacatctgagagtttactgcccaaacctcaaacaagaggcagataggacatgctgggacgtgtgtgtgtgtgtgtgtgtgtgtgtgtgtgtgtgtgtgtgtgtgggtgtgcatgtgtgggtgtgtgggtgtttgtttttttaaacctggaagccccgccccagtggcacaccccttccaatacggccacacttcccaatcctcgtccttcctgactccaccaactggggaccacgtgttcaagcctagtaggctttggctgctattctcattcaaacctcagcccatgtacccaccatcctctgactgtacagaccgctctaggagttccctgtcctgccctggcagtcaccactcctgcaaactccagtttcctgttctgtggttcctccaggcaacctcacagtcaactgtagaacccggcttctgtcactcagagaatgcatctaagatcaacctcttaggagtcgctcatgctcctttccactaataatgtgctgtttgcacactgaaggggatcgtggtcgctagttactaaatatagtaaaagcctattaaattaacagctataagccccactaaaccccgtgtctttcgaaatagttagctacccatgttaataataaaattcacagtgaagccatcaggactgagttatgtgtgggaacctaattagtcttgtttctccgtgtaagaatgtccgccactgtcctgacctgaacttctgttgctttcatgaataatattgtatgctctttgtcttcgttgaacatcgaaataactttttcatggtttgtcgccatttgtagtgtcttggggagggacgcgtgtcttgtgagcttcctcaggctgttgtaccagaagcccgagagtgctccttagtgttgacgcacccgacctcgctcacaaacacagcatctcaaaaacatcacagaaacaaaatgcgcagactagttgtacagttttctccttttttaggcaaatttttctcaaaataacttcttttattccctcctcctctcatactgacaccaaaaataagaaatttctgttgtcactaacatttgctgtgttactaattccagacctctctcccttcatctggcttcaggtgtcagcagtgtgggttcctcgtgaagtgtctttacaagccgtctcccctgggcttgcctttgtggatttttggctttcacaagctgcatctcaccctgtccatctcagtccattggtggtggagtaccaggccttgcacattgcaggcagacctatctccgagctatctaattcaacagtcacactgtcttcccaagggcccatccctctcacatgcccaggccaactctgcatggagttagccaagctgtatccagacaaacctagaactctggatcctgctgcctcaacctcccaagtacctggggtcacatactcatgtgtgtgtgtgtgtgtgtgtgtgtgtgtgtgtgtgtgtgtgtgtgtgtgtgagtgactgtccttcctctgtcctctgatgttttctcttctactgtgttgggagccgcccccacattcgccgttacaagatggcgctgacatcctgtgttctaagtggtaaacaaataatctgcgcatgtgccaagggtatcttatgactacttgtgctctgccttccccgtgacgtcaactcggccgatgggctgcagccaatcaaggagtgacacgtccgaggcgaaggagaatgctccttaagagggacggggtttcgttctctctctctcttgtctctctctctcttctcttgcttcgctctcttgcttttctctctctcttgctttttcgctctcttgcttctcgctctctcttgcttcttgctctcttttcctgaagatgtaagaataaagctttgccgcagaagattctggtctgtggtgttcttcctggccggtcgtgagaacgcgtctaataacaattggtgccgaattccgggacgagaaaatccgggacgagaaaaaactccggactggcgcaggagggatacttcattccagaaccagaactgcgaatcaaggttataaggttcccgtaacacagactgttgagaaggattcaactgccgaattcagaactcatcagctggggaacgacggtgataaaggttcccgtaaagcagactgttgagaaggattcaactgccgaattcagaactcatcagctggggaacggaagtgagaaatggctttaccaggtatgtttggccttgaactttttctagtgttaggagcccttttgttccttttcacatgttatatagtgcttaaggcagggctaaaaattctagaggaaattcaggacagtctatcagaagtaaagcggagagagagagtaggaacaaggagaaacggtaagtatacaggcctttccaagggtcttgaacccgagggaaaagttaagggttaggtaggaatacctggagagagattagaagaaaaagaggannnnnnnnnnnnnnnnnnnnagaaaaaagatcgattagcggaggtctctaggagatactcgtcactagatgagctcaggaagccagctcttagtagctctgaagcagatgaagaatcctcctctgaggaaacagactgggaggaagaagcagcccattaccagccagctaatcggtcaagaaaaaagccaaaagcggctggcgaaggccagtttgctaattggcctcagggcaatcggctaccaggtgcactccccgccctatgcggagtccccgccctgcgtagtgcgtcagcccgtagtgcgtcagcaatgcgcagagaggcagtgcgcagactcattcattccccgagaggagcgggggaaaatacagcaggcatttccagtctttgaaggagccgagggtgggcgtgtccacgctccggtagaatatgtgcagattggggaacttgccgagtcggtccgtaaatatggaatcaatgctaattttaccttgatgcagttagacaggcttgccagcatggcactaactcctgccgactggcaaatgattgcaaaagccgctctccctagtatggccaaatatgtggaatggcgagctctgtggcaggaggcggcacaggcgcaggaccgagcaaacgctgctgctttaactccagagcagagagattggacttttgacttgttaacgggtcagagagcttattctgctgaacctgataagaggtatcaatggaaggtcttaccacagggaatgtccaatagtcctacaatgtgccaactttatgtgcaagaagctcttttgccagtgaggaaacagttcccctctttaattttgctcctttacatggatgacatcctcctgtgccataaagaccttaccatgctacaaaaggcatatccttttctacttaaaactttaagtcagtggggtttacagatagccacagaaaaggtccaaatttctgatacaggacaattcttgggctctgtggtgtccccagataagattgtgccccaaaaggtagaaataagaagagatcacctccataccttaaatgattttcaaaagctgttgggagatattaattggctcagaccttttttaaagattccttccgctgagttaaggcctttgtttagtattttagaaggagatcctcatatctcctcccctaggactcttactctagctgctaaccaggccttacaaaaagtggaaaaggccttacagaatgcacaattacaacgtattgaggattcgcagcctttcagtttgtgtgtctttaagacagcacaattgccaactgcagttttgtggcaaaatgggccattgttgtggatccatccaaacgtatccccagctaaaataatagattggtatcctgatgcaattgcacagcttgcccttaaaggtctaaaagcagcaatcacccactttgggcaaagtccatatcttttaattgtaccttataccgctgcacaggttcaaaccttggcagccgcatctaatgattgggcagttttagttacctccttttcaggaaaaatagataaccattatccaaaacatccaatcttacagtttgcccaaaatcaatctgttgtgtttccacaaataacagtaagaaacccacttaaaaatgggattgtggtatatactgatgnnnnnnnnnnnnnnnnnnnnnnnnnnnnnnnnnnnnnnnnnnnnnnnnnnnnnnnnnnnnnnnnnnnnnnnnnnnnnnnnnnnnnnnnnnnnnnnnnnnnnnnnnnnnnnnnnnnnnnnnnnnnnnnnnnnnnnnnnnnnnnnnnnnnnnnnnnnnnnnnnnnnnnnnnnnnnnnnnnnnnnnnnnnnnnnnnnnnnnnnnnnnnnnnnnnnnnnnnnnnnnnnnnnnnnnnnnnnnnnnnnnnnnnnnnnnnnnnnnnnnnnnnnnnnnnnnnnnnnnnnnnnnnnnnnnnnnnnnnnnnnnnnnnnnnnnnnnnnnnnnnnnnnnnnnnnnnnnnnnnnnnnnnnnnnnnnnnnnnnnnnnnnnnnnnnnnnnnnnnnnnnnnnnnnnnnnnnnnnnnnnnnnnnnnnnnnnnnnnnnnnnnnnnnnnnnnnnnnnnnnnnnnnnnntgcaaaaaaattttcataacaattttcatgtgacggctgaaaacattacgcagtcgtttctccttgacaagaaaagaaagcccgtgacattgttactcaatgtcaaaagctgctgtgagttcttgccagttcctcatgtgggaattaacccacgcggtattcgacctctacaggtctggcaaatggatgttacacatgtttcttcctttggaaaacttcaatatctccatgtgtccattgacacatgttctggcatcatgtttgcctctccgttaaccggagaaaaagcctcacatgtgattcaacattgtcttgaggcatggagtgcttgggggaaacccagactccttaagactgataatggaccagcttatacgtctcaaaaatttcagcagttctgccgtcagatggacgtaacccacctgactggacttccatacaaccctcaaggacagggtattgttgagcgtgcgcatcgcaccctcaaagcctatcttataaaacagaagaggggaacttttgaggagactgtaccccgagcaccaagagtgtcggtgtctttggcactctttacactcaattttttaaatattgatgctcatggccatactgcggctgaacgtcattgttcagagccagataggcccaatgagatggttaaatggaaaaatgtccttgataataaatggtatggcccggatcctatcttgataagatccaggggagctatctgtgttttcccacagaatgaagacaacccattttgggtaccagaaagactcacccgaaaaatccagactgaccaagggaatactaatgtccctcgtcttggtgatgtccagggcgtcaataataaagagagagcagcgttgggggataatgtcgacatttccactcccaatgacggtgatgtataatgctcaagtattctcctgcttttttaccactaactaggaactgggtttggccttaattcagacagccttggctctgtctggacaggtccagacaactgacaccattaacactttgtcagcctcagtgactacagtcatagatgaacaggcctcagctaatgtcaagatacagagaggtctcatgctggttaatcaactcatagatcttgtccagatacaactagatgtattatgacaaataactcagcagggatgtgaacaaaagtttccgggattgtgtgttatttccattcagtatgttaaatttactagggcagctaatttgtcaaaaagtctttttcagtatatgttacagaattggatggctgaatttgaacagacccttcgaggcttgccatcattcaggtcaactccacgcgcttggacctgtccctgaccaaaggattacccaattggatctcctcagcattttctttctttaaaaaatgggtgggattaatattatttggagatacactttgctgtggattagtgttgcttctttgattggtctgtaagcttaaggcctaaactaggagagacaaggtggttattgcccaggcgcttgcaggactagaacatggagcttcccctgatatatctatgcttaggcaataggtcgctggccactcagctcttatatctcacgaggctagtctcattgcacgagatagagtgagtgtgcttcagcagcccgagagagttgcaaggctaagcactgcaatggaaaggctctgcggcatatatgagcctattctagggagacatgtcatctttcatgaaggttcagtgtcctagttcccttcccccaggcaaaacgacacgggagcaggtcagggttgctctgggtaaaagcctgtaagcctaagagctaatcctgtacatggctcctttacctacacactggggatttgacctctatctccactctcattaatatgggtggcctatttgctcttattaaaagaaaaagggggagatgttgggagccgcccccacattcgccgttacaagatggcgctgacatcctgtgttctaagtggtaaacaaataatctgcgcatgtgccaagggtatcttatgactacttgtgctctgccttccccgtgacgtcaactcggccgatgggctgcagccaatcaaggagtgacacgtccgaggcgaaggagaatgctccttaagagggacggggtttcgttctctctctctcttgtctctctctctcttctcttgcttcgctctcttgcttttctctctctcttgctttttcgctctcttgcttctcgctctctcttgcttcttgctctcttttcctgaagatgtaagaataaagctttgccgcagaagattctggtctgtggtgttcttcctggccggtcgtgagaacgcgtctaataacactactgtccgtattgccctacaatgtagtagggtttctcttttgtttttgagacagcgtctcactgtgttaccctggctggtctggaaagaattgatgtataccagactagcaaactcagaaacctgcctgccactgccgcctaagtgctgggattaattggacaatcaactctgagttctcttttgcacttgctctccctctgtccagactgcccttcagtagatctgttgggctgattttccagcctcccgtatctttgaagacccatcctggaccatcacagataagcaagcgatttctctgctacccagattcctacctcacctacttcctgtttttactccattaaagttttcgccaaatgtacannnnnnnnnnnnnnnnnnnnnnnnnnnnnnnnnnnnnnnnnnnnnnnnnnnnnnnnnnnnnnnnnnnnnnnnnnnnnnnnnnnnnnnnnnnnnnnnnnnnnnnnnnnnnnnnnnnnnnnnnnnnnnnnnnnnnnnnnnnnnnnnnnnnnnnnnnnnnnnnnnnnnnnnnnnnnnnnnnnnnnnnnnnnnnnnnnnnnnnnnnnnnnnnnnnnnnnnnnnnnnnnnnnnnnnnnnnnnnnnnnnnnnnnnnnnnnnnnnnnnnnnnnnnnnnnnnnnnnnnnnnnnnnnnnnnnnnnnnnnnnnnnnnnnnnnnnnnnnnnnnnnnnnnnnnnnnnnnnnnnnnnnnnnncagatctgcctgccactacctcaagcactggggttaaagttttgagtgttcaaccatgccagccttttaaaagacttttctggttatttttggcactttgaggctaggtcccaggtaactcagcctctcattcaccttgtatgctagtatgtgatatgctggctttcaggagaaatgtcgagaaactaactgtgatgactaagggacagttaggagttgtttttaacatttgttatatgtgttttctgtgtatgtgtgcatgcatgggagacagaacacagttcctgggagtcagtcctcttctatcgtgtggattctgaggatcagactcgggttgtcagactagagatgagagcaggagctcttcccactgggccatcctgccagcttctgcttttaggatagagtgttcccttcactctgccctcctttgtgttgtgttttttatgtattccttgttgagcagttagcttttgtataaataattttttctttagacttgaatatctaggtggggaggaccaatttgaattaaggaaaattaacaaaaagaagatacctgggccgggcatggtggcgcacgcttttaatcccagcactcgggaggcaggggcaggcggatttctgagttcgaggacagccagggctacacagagaaaccctgtctcgaaaaaccaaaaaaaaacaaaaaaacaaaaaaacaaaaacaaaagaggatacacctgactacaccaattgattttgatactcagggacaactgtgaccagccagggtcactaatttgaaccaactgcttgttattagccagcccaattttttttttaataaagataacttggtctttgtctctcaagagacagtaagttgggaccggagagatggcttaatgaataagaatgcatacttaccgaagccccagttcagttcacagcagttgtgttggacagctcacaaactacctggaactgtagctccaggggagtccagacccttttctggcctcccctcagttacctgcacacactggtacactcacaactggaaattggactcaggacctctggaagagcagccagtgctcttacccgctgagccatctctccagcctcaccctgtacttttttaatgagaatatgttcaatgctgatcacaggattctccaagaagccccatccctgattggacgtctgaaaatgagagaagcgaaggttaaacccaccactaccggggagggggtggtcccctcagacagcacagctaggacctcggctttctacgttcacccttcaaaacccattggagtgtttggttctgttgttggtttgttgagacagggtttctctgtgtagccttgactgtcctgaaacgccctctgtagcccaggctggcatagaactcatagagatctgcctgccttcctttccctctgtgggattaaaggtgtgcagcgtgcaccaccactgccgggcacaaaatccaattctttaagatacaaacttgggagaaggctgtgtctttggttaaaggatgcttgtataagactgggcgggtgtgtcaacacaagaggctattgaggttacaagcataagcttagtttcgcgagagattagttagcagcaatacttaaattacctgcccgtgtaagacgctggaggccagaagctcccatcacccacccacccctagagatggcgtgatgcccacaggcagtggggccctggctcataccggagagggacagtgaaggccctgactgacagctggctatgggactgtttctcctgcagtgagttccatgggaaacggcaccagtcgactctacagtgctctcgccaagaccgtcaacagcagtgcagctgctcagcacccggagtacttggtgtcaactgaccccgaacatctggagcccatcgatcctaaggaacttctggaggaatgcagggctgttctgcacactcggccaccccgctaccagcgggattttgtggacctgaggacagattgctccagcagccactctcccattcgcgtcatgcagtggaacatcctcgcccaaggtaggcctggtgctgtgcctgcgcagcaaaggctgccgaggcttcctgtctgctgctgtgcgttcccagtccctcctgtgtgcacttatgggagctttctgttcagcacctcagcaggacaaccttaggcattctgttgcctacagcctgagtctgtgacagcatgtacaggtcacaaactgaatgagtggtggggacagcagttgagacgagctgtagatggccgtggtgaccatgtgccttgatgactgcctagagtctgaggccagtttgagctgtgatgtgaggccttgtctcaaaacaaaaccagagaggggtactgcttggccagttcctagctcttcctgacatttttatttgtggcagatgagtggaggtggcatctgcctttagtcccaacactcgggaggcagaggaggagaaataagagttctagatcagccggggctatacagagaaaccttgtcttgggggaggggataattaaaaaaaaattgtggcattaaagggcccctcttattatacctgctgatttataaactaggcttatcagccatttatatgtggtagtgccttttatcttgtagttgaattgtgagcaaaggcatctttgcaggtgaagggatggttcggtggttgagagcaggactaacctcccacagcaaacagcttcaggggatgcccggcctctggcctctgtagacacctgcactcagtgcttactcctgtgccccgtagttagacatagacagagggtttttccctttgggtttttttttgtttttgtttttcattctgagacagggtttctctgtgtagttctagctgtcctggaactagctctggaccagactggactcgaactcaggaatcccatagactctgcctccgagtgctagagttaaaggtgtgtgtcgccaccaccacccgactcaccaatctttctttttaaaaagacttttctttattctttggcaatttcatatacaaataccatgtatgttaacctagatccacccccgtccaccctgagcggccgcgctttgattctatcccctggggaatgatcctgttcattcgtaaggagagaaagctactcatttgtcccattcattgagtcctatgtttatatccattcacctggctttcttatagtcggggttacaactagtgtttatttacattgacaagtttttatatccccaggactgtgaagaacggtttttctaaacctaaaagcaaaagtcttatatcctagaatacagctatatgaaatttttttttgtatataaaaaccctgctgcttgcttcagcagatagtgtgaggttatttcatctgggtgttagcacagcttagacagacctgccccagcatccgaggcaaatgtcagacatccaagcttctacccactagagttttttttctttcttttctttcctgttttaacttttcctttgtagtcaggggctcagtctgtagccttagccgaagtcggggagacccacccgtctcagccgtcgcagtacggaagttaagggtgtgcaccaccaccccaggcttccccattgtcttcgaggtcgtggtgtgtagaagctgacaggtgtttggctttccttttcagctctcggagaaggcaaagacaactttgtgcagtgccccgtggaagcgctcaaatgggaagagaggaagtgcctgatcctggaggagatcctggcttaccagccagacatactgtgcctccaggaagtggaccactactttgacaccttccagccactcctcagtagactgggctaccaaggcacgtttttccccaagccctggtcaccatgtctagatgtggaacacaacaacggtccagatggctgtgccttattttttctccaaaaccgattcaagcttatcagcagcaccaatattaggctgacagccatgaccctaaaaaccaatcaggtggccatcgcacagaccctggagtgcaaggagtctgggcgacagttctgcattgctgtcacccacttaaaagcccgcactggctgggagcggttccggtcagctcagggctgtgacctcctccagaacctgcagaacatcacccagggagcaaagatccccctgatcgtctgcggggacttcaacgcagagccaaccgaagaggtctacaaacactttgcgtcctccagcctcaacctcaacagcgcctacaagctgctgagtcccgatggacagtcggagcctccctacacaacctggaagatccggacctcaggcgagtgtcgccacacgctggactatatctggtactccagacatgctctgagtgtcacgtccgccctggatctactcactgaagaacagattgggcccaaccggctcccatccttccattacccctcggaccacctgtccctggtgtgtgacttcagctttaacgaggagccccatgagctcttttaatcacaagcgtcttaaccagggatgttttgggaaactgaactaggataggaagttgcctggaaaaggacacccagtttctgccactactctccatcatttccagcatgcccttgaaaaaacattgttcacaaacctttccagctaaaacccgcattgaaaaggtgtttgcactccagtttgagcttgttgttcatctgtgtaccatcctctaccatttaggggcattagtagcataggctttcttgttttttagttgagggtattataaaaacccagtttgtaagcccttcagaattaaagtaagatgtaggaagttttctagacatcatttcaagttatttatttgtgggatttttaaatgtcagtgggaaaaaaaatgcatggtaatatttatttttttatatcttaatgtaaaataaagtggattatctagcattgtggacattttagaaccatgcaggtacagtcttaattccttaaaaattaaaatgtctctatttgctgatcgaacaggatgtacactaaggaactatttagccctgggggattggtgactttgtgtgtacattcttcacaaataattcctgtttgctatgcctttgacttctctgttgtgttttaaagaaattccgtagcattcagttctttagtttccactgtttagtcactgctaggcacttgtgccttttctgttgtgatgacgttggtagacgtgtgaagattactccaatcacttctcctgggatgtgctttttataagtagctttaggaacagctctggaacagttgctaagaatattagtgagaaaccttgccaagacgacagacatgagcccaacattcagctgagacaagaaagctcacgtcttggaggccagcttgggctatatgtcaagaccctttcttgaaaaagccagatgactggattcaagttttctagaaaaatataagagtcaaaaagataacctggagttctctttcaattgttgaagcctcttccaaacaaaatatccttccagtggtaaaatggtaaatatcttaatgtatgagttctaaatattacttaaggttaataaatggacttacaaagagtgcttttaatatcttgtctctttggtctaaaaggaatctgggagtttgtttggatcttgtaatactatatggtgttacacactatccattagtacactaaattttcatcttgacagttaacagaagtaactacacattctagcttctgggtgtcttggtcccaaggatggagccctccctccaaaatggcttacccctgcattccacccccaggtcaaggtcaagctagtctccccaatgtactagagcacttgagatgtttgtgggcctgatgcactcactcgctcaccaggggccaacagtactttaccacaaggcctgactcagttatggggggacacaatcaagttacagcatcagaggacttggagtaactgaatagttcaaggccatgtggagcggagatagctcagtggtcagcaccaggaaaaacaactactagcaggacatggtagtgtcctgggagtgtagaggcagggtggtccggagttcatggccattctcaaccacaaagcaagttcaaggccagcctaggatatttgaaagccaaaataagaaagagatggctgttcaacagagatttgcagtcagtggctcagccattagtaatgtctttgtttcttgccccttatcatctttggcatgttggctttatcctccttgtttaaccttttttttttttaaatgatacactttgtagcccaggctggcctagtgctatgtagcccaagatgacctcaaatttgcagcagtgctcctgcctcagtgtcccagggctaggatggcagtgtgagcctccacgcccagctctgcccagcctgattctccaagcccagacttggtgcttttctagctccccttcccaacatgccagtccccagcctcagagtagacattccccacccaagtaaggtttccaatgcctactatgggattatttgtttgttctgatgcttaactcccacccagtaagaaaagtaaagatgaggtgggagtggagatgccatggatatgtctcaatgataaaaaggtcttgacactagcaaagagacaagtgggcaggatgctattgaatttaaagaaatcacaatggtgtcatgaaatccacttttatttattttggctttttggcgcactagcttcctggaatcacagcactctagagtctgaggcagaaagacgatgtgttttctgacaacctgggctacacagccagaggagtggaggcaggcacgcacaagaacataccatcaacaggacttgggagaatggccagatgtgcatgatgtgtctgagataatcttacaggtccctggcagaagtaacgcactgtactacagggaatgagtttaatgcagcacttgggaagaggtgtgatgtggcaattagataaagtgagccagtaagagtcaaaatctagtctggtctgaggtttggtaaggaaaaagcatgggcacctatctgaagaacagccttcacgacggaatccctttaataaaacattcagtagagcctgcttgtgcacgcgcactaactcctcccatcccttctacactggtaagccctacagagaaaaccttggttggaagtcaagccagaccggaggagagccatttaggctgagaataagccagaggcatgtcatgggaagccaagttaactttgggaagcaaaactaaggcacaagatttgatggggaggcgagggtgaaggtaagtgggtggagacacggctcatgggttagggctgctcctgcagaggtctcgggtttgtttggttcccagcgcctacatggcagctccaagtttaactccagtttcaggagcgccaactctcctggcctccatgagcacctcgtacacaacatctgcaggcacatcaaagtaaattaggtgtaaaaatgtcgtgtggaatgtttgagaagactaggtaaaggtgcttgtgactgagtctcatgacaggagaagaactgacttctgaaccttgaccttcatgcatgtacacgctctaactttgaaaacattttcagaattgtgtttgtaagctaggccactggtgaccttcaatgagcactgcaggttggcttcccattgaggaaaaaagtggcctggtagaaaatactgaatgactgttaactactgggccagggaaagagacactctgatgggtaggaggcacctctttccgagacacaaggatggttgctgaagtgagatcctctgtagcaaagggtccagcctggggtctctgaagctgtacacggccatctggagagaatgctgaaaagtcacctaaggagtaaacacagaccgttcatcacagtgcaaaggcctggagaggctggaaatgcatcaagccatggttttgtggcttttctccaaaaatgctggacacaagatggaaacattatattgacttatcattcagggggttgaagtccgaaagctggagttacatttgcaaatctagattttatatgtttacctgaaaactttttctgttgcttttagaagagagttctaatcagctgaatgcagaagaaagtatctgcttaaaagttagcacctttagctgttaaccaaagtctgtgtatgttctgcgtggctcaggacgcagagagagcatggacctttgcaaaggagttttagggacttgaccaaaagacaatcctcaatacttgacaatactcaattttgagagatgaagtatttaagaggtaaattttgagggtaactccaaaagtagtaatcaaatcaacctagttttttaaagtatcgttacctaagcttgtggaatgagacctggagagacggtttagcagtggagtggtgaccgcactttcagaagagcaggttcaaaacgccaagcacagctcccaaccatctagtgacctgacctctctccagcctcctcaggcaccagtacacaagtgtacacagccacgcagacaaaacacccatacacagaatttttaaaatcaggttagtttttttaaaaaaggctagaaaaggtaaaaatctttgctgctataaatagcatgttaaagatacaaaggccaaaaatattcagtggttcatctacatttctaaaaagatagacgtctaccatgtacaggaggacctaactataactgtgtgacacttaaatttgtgactctggtccttcagtcttcacctgtacagtcacctgtacaggccaggccacagctctctacccataaaaggtgtgacgggaaacaaactgaacggaagcaactcagtacctgggaggtgctaggccagacccaggggccaggccagacccaggggcctgcacatgccaggcacgccgctaccactagtgctgaaagtgtttcacatgtataggtccattatgattggccaatttcctgacctgtatttcttatgtggttatagttataaaggaagtgggaatgtgcagagagttgtcaaatatttctataatgggacaaagacgaaaccggagtagcatttcttcaggcagtcattaagaaaacaccagacttctgtggcctgactgaaacgacagcctgggctggcttgtgagcattgtgaaaaatatcaccagagaccaaaaccacaagataaatttcacttctatatttcagaaaacctacttgaatacactttgaaacaagagtacaacaaaatagaatatacttcaaatgttgaatatacaaactattatagttcaaatctgaacactggtacttcccctcttaaatgtcaactaaaaaagaaaaagagaaaattagggagaaaaggaaaaagggtgagaaaggaaacaaacaccaggcactggagctacctggcaagttcatgcgggcctgaatgtcgaatgacagaagaactgataccgatgtgtctgcagacagcagggcgactcgagtgacgcaggtatggtacagtaaagggccggagccaactgttaatgtcttcacaattaagaaaccgacagacttaaactaccatagaaaatgttacatggaaattctataacaatactgtgctaggtacaagatttttaaaatttttcttttaataaaaaagctttacacaaacaagccattagcttatttcaagaaaggaaaccgaaaattagtctaaggcctttgttttaaaacagcttaagctatgatatatatatatatattcaaaatcaaaaaataaaacaaaacaaacaaacaaaagcgcactagatcttgctctcctctgtgtgaagcttttggatccactcagttcacattctagatacctgtattagcagagtcttcacatagcaccagttaagtgagcactgcccaagcacagtgctaattgctggtatgcatataaaatgcatcaagaaatgctctttgtaacaatgacgtcacccatcccaacccccccactgaaaactatgtaacctcttacaggtgttagtgttccaactcttagtgtaacgtgatagtgtagtgagctgcttggtccctttcaggcttttcttattgagggttcagttgttcttacttaagaggcagttttctgtcagcatctcaatgtgtagttcacttcccactgaaacatgggataggtcatttacttccagtacgtctgattgctttcttctatgcacagttgtgtgagaaccctcctctggctttcttgatgacttccttgcaaatgtctgtcaggacaaccctgacagtctgcagtgcccgcccggaacgtgcttatttatttctcacacgtcactagcccttcggttttcatagtcacaggaagggcgatagcagacggcgcactgacgaccactacgtgggttactgtcttattgccgtctgcccccttctcttctaccagctgcaaagttttcacatcgtgttcctgctttttggcttctgatttcccctccggcccttttaggagcgcactgataactcgaggaggagtctggccagaagcctgctgagcaggcacagacagtctcattacaggtgtaccgtgggctattgaaacaggggtgagtgccctcacagccagtggggttccaacaatgttaatgcttcctgaccccgtcaggtttgactttgcctggagttgacactgtgcgagctgggtggcggggatggtgataatcttggcaggctgcatggtgattctgtctccattttcagtggaggccggcatcacggtcgggactgtctggatgactacttttggagagctggccgaggctggactggtgctggttattaacggcgagcctgtgcctgcattgactgactgaactgccaccgctgaaatcttttggcccagtgaggtcattaccacagggacttgcattgccacacgaactgtcctggtagattaaaaacaagctggttatatttaacactaaatgggaaaatgagtctcaagttaaatacaaatgcaaatgcctagaatcagcgttcccaacttttacagttgcggtgatggccctagggtctcctgcacactaagcgagggtttaccactgagctacgtcaccagctttttggggcaaggtcttgctagcttacccttaggttagaactcatactctgtagcacaggcaggccttgaacttatgattctccttcctcaacctccacagtacttaggactgtaggtgtgttccactaaatatagctaaaagtatacttaaagatccagcactttaaaagtgtccctatagtgctggccgatacagattcaacatttgttccaaggagcgctcaaacacaaaccctctgctacagctctcccgtctccctcaccttggagctgctgctgctgacacaggtgcagtggtagtaggagacctggaggaaccgtcgtgagtaggggaggtgatgttcacaactctagccacacccttctctgctctggagcagttcagaggagatgagtttttcccacctcggacggcagttgctgccttcaggagactttctgcagatagtgacactcgttctaaagacttgtcatcagcagctgctgccaagtcttcagggcaggtctcacttttgtcatcatcaatgaccactatgtttttgggcatgtccttgaactgatatacaagcctctgtccttcaacctttgcaagaattcccctttggtagtaatatctgcaagggaaaaatgactaaattaatcaaatgtactatcacatcttactcaataaaaccacacgtacatgtgacagaaacatttacttattcctgtttatgagggctccttccacttggcctacacctaagattacagatttggtgacaatgaagttggtatgtcataccacaggaccctgtgatggttaatattgactgttgatttgacaagatctagaagcacgtagggctgactagattcagttgaagtgggaagaaccaagctatctgtgagcagcactcttctcagaatctcagaccaaataaaaaggaagggcaagctaagtagcagcgttcaccgctgttgtcgggctgggaatgaggcgagtcctaccatgtgcccttccctaggttgcctctgtcacatcagtaagaagtagctaatatagctctgtgaccttgatgtgtccaaaacagttgtagcaccaacaagtgaacctagactccctattagggcagtgctttatctccagcaccccacggcccttctcttacagaccaggccagcttccagctgtagactgaccctcctccctccacctcccaagtgatgagatcacagtacattccaccatggacaccttgttctctcccttaagaaaagcttaacatagacagaatactttattggtaatagaagcaactctaatttgttacaaaaacaacctgactttatctggaacaacctgactttacctggaataatcatggaacatgtgaatactgactagtagctcatgcctgaaataccagcattgggaagctgggagaatagatgcaagctccaagccagcctgggctacatagcaagaactgtctcaaataaataaacactatcatgtgtacattggctattttttcattttcgagataaagtcatttacaccatttgcagggactaaaagtacattcactctggaaagtgtgttcttacagatctcattgtagctcaggctggcttcaaccttactctgtaaaagaggatgactttgaaatcatcctcctaacttcaattttcaactgactacaaggcacgggcactatacccagtctgggtttaactttttacaaggcctacaaggtaaacaatttctattctataacagttgtaaatgcagagtcacctcctataattaaggatttcccaatgttaaattatttggcatatagaccaaacttctctttccccatctatttccaagcttaaaatattcttctagattatttcaaagttttcagttatatcacgggatttgttttttagcttttctttaagcaaacactttaacaactagcagacgctctaaagagacaggtcggttctgcttaagaaccagcctgtgttcattctcaccttaacgctcgccccatggtttcatagttcatatctggtttgttcttatgcttcccccagagcttcgagacagcctttgagtccacaagtttgaatatgcccttttctctctgagtccatttaatatacctgggacaagtatttttatcttgaagcaaatctaaaagaaactcccacagataggttgtgtttcctttaaaaacaaagcaaaaacaatgacaggcattaacttgaaatccactaacatgattaaatgcaaataaaatatcctcatttacaactatatattcgctacttctttttgagacaagtctgactgtgcagcctttccaggtctgaaacttgctatgtagatcaggctggcctcaaattcaagcgatccctgcctcctgagagctggattaagtgtgagccacacccagttcttaagatgtaagccctagattctatgctgtcatgagtcctggacccaggtttcaggatcggtcatggcggtgacacggtgctggacaatgtagattctaggtatctacaaaacaggcactcctgctggctgtgttccatcctttagcctctcaatctgcactgaaagacaaaacctaacacagtagaaatgtaatatgacccagggcagaagaggaaatcaaggtctgaaaccagttccaatccaaattcataagaaaagaacaatgaaattggagtttgtccttttttcctttcagatataactaataaccaaaattcactgtggaatcattacacagttttcagtagatttacacaataaacattaaaaataggacaaatttaaacatatcaataaaaagtttaagattatcagtttgaaaacatttacctattaaatagtgataatttgtttatgggatcatcagacacatatgcctaatattactggaaatcatcaaacacaacaaattagaaagcataggggctggaaagatggttgagtgattaaaaacattgactgcttttagcagaggacctgggtttaattcttagcactcataactgcttgtaattccaatgtcagatctttaaaagaaaagaaagaaaacaaacaaacacaccaaaaaattttaaaaatcagccaggtggtggttgcctttgattccagcactcaggaggcagaggcagatggaactctgaattcgagaccagtctggtctacagagtgagttccaggacagccagggctacacagagaaaccctgtcttgagaatcagaaaatatgtagtagaaggccagagtagcttaaataacagcgcctgttgccaagactgaccctgaatgcaatcctaacagttcagagatactggctctcagagactgacttccactcccacacagacggatgagtgtagcctcttctgtgtgaggatgagtgtcacataaacctgtcctctaacacatggtcccaaaacaatggtttgcactgtcctgtggatattaccaaatacaatggctatcccatctctttgaggcatagctattttgctaaaagctccccataatgttggtccacccctaattgagaaatactaagaaatggtattcccatatgtacatatactagaaattatcctgcaaaaatgtcacctaaaatttttttaaaaacttactctcatctctagccctccttctctctcgcccttcccccctctctccacatggccatggcaggcctctctccctctttctgccttctctctttcccccgcctttctataatagagctctaaagccattaaaaaatttaaaaaaataaaaggggtattttatttccaaaatgaccatccacaaattaccttttccttctctggctttcttcttgattcctaactcaggagacccattggaaactggtgactgctgggtctttggtttacggccaactgaaaatataagataaagaaatcatgaactgaaaacagaaataagcagactctctaaaaagacattcctcactaaactagatactaatgtgcagactgaaatcctcagtgccaaggaggtgtggtggcacagaaccacggaaagctaggaagcagactgaaatcagcatgggccacagagtgagtttaagggacagcctcctcagcatggtgggaggtgtggtgtggctcagtggagggcgcctgcccagcatgcatggagcgcattccctcactcaggactcagaatagatgaaagatgcttgcaaaaggagctgtaaacacttctgtaattttaaataaaacatttagtagaaatgacaactgtacaaagcaagtcaggaacttccagcttttctttatggtcaaggacagcatcaatactaaattttggactgatgtcctgaagctcacaatatagaccaggctggccttgcactcagaaatccccctgcctctgcctcccaagaactgggaataaaggtgtgagccaccatccgatgctgctagaagaacttc

SEQ ID NO: 785 - DNA, 2928 bp, Mus musculus
  misc_feature (1)...(2928): n = A,T,C or G
aacgccctgcagtccgtttccgcctctcgtgcctgaggggcggatgcttgtcgcagccgccacacaagtagccagcacttcccggtgcctaatctccttcagcaccgcggagcgtggagcccacagctcggggaggacgttctcccagacacgcgctcgcacacactcagcgctggcaccaacccgggattcccagcctgtggacgctcccattgcagccggcgggaggggacagannnnnnnnnnnnnnnnnnnnctggtcgtgcgcgcggatccccccctctgcagccaccgcgtggtagcgcccgctccgccgccgctcgccggttgctccccggcgctagctccctcgcctcagtgagccgccgctgctgccgccgccgcgtctgcctcccggcacagctcgcccggtcggcgccgagggacgaggaggaaggaacaccccgcagcgcagcggtcccgcgccacccccaccccaccgtcgcccgcccagctcggcccggctcgtcagcgcggcggcgcccggcatgtatcagagcccgcggcggctctgctcggccctgctgctcagggacgcccccggcctgcgccgcacactcgtgcccggcccgcgccgaacgctcgccccgccggtgctcggatctcggcccaagtccccgcaactgcaggcggcggcggcctcgggcgccgcgaggtcgcgtccccgaacagtgagttccatgggaaacggcaccagtcgactctacagtgctctcgccaagaccgtcaacagcagtgcagctgctcagcacccggagtacttggtgtcaactgaccccgaacatctggagcccatcgatcctaaggaacttctggaggaatgcagggctgttctgcacactcggccaccccgctaccagcgggattttgtggacctgaggacagattgctccagcagccactctcccattcgcgtcatgcagtggaacatcctcgcccaagctctcggagaaggcaaagacaactttgtgcagtgccccgtggaagcgctcaaatgggaagagaggaagtgcctgatcctggaggagatcctggcttaccagccagacatactgtgcctccaggaagtggaccactactttgacaccttccagccactcctcagtagactgggctaccaaggcacgtttttccccaagccctggtcaccatgtctagatgtggaacacaacaacggtccagatggctgtgccttattttttctccaaaaccgattcaagcttatcagcagcaccaatattaggctgacagccatgaccctaaaaaccaatcaggtggccatcgcacagaccctggagtgcaaggagtctgggcgacagttctgcattgctgtcacccacttaaaagcccgcactggctgggagcggttccggtcagctcagggctgtgacctcctccagaacctgcagaacatcacccagggagcaaagatccccctgatcgtctgcggggacttcaacgcagagccaaccgaagaggtctacaaacactttgcgtcctccagcctcaacctcaacagcgcctacaagctgctgagtcccgatggacagtcggagcctccctacacaacctggaagatccggacctcaggcgagtgtcgccacacgctggactatatctggtactccagacatgctctgagtgtcacgtccgccctggatctactcactgaagaacagattgggcccaaccggctcccatccttccattacccctcggaccacctgtccctggtgtgtgacttcagctttaacgaggagccccatgagctcttttaatcacaagcgtcttaaccagggatgttttgggaaactgaactaggataggaagttgcctggaaaaggacacccagtttctgccactactctccatcatttccagcatgcccttgaaaaaacattgttcacaaacctttccagctaaaacccgcattgaaaaggtgtttgcactccagtttgagcttgttgttcatctgtgtaccatcctctaccatttaggggcattagtagcataggctttcttgttttttagttgagggtattataaaaacccagtttgtaagcccttcagaattaaagtaagatgtaggaagttttctagacatcatttcaagttatttatttgtgggatttttaaatgtcagtgggaaaaaaaatgcatggtaatatttatttttttatatcttaatgtaaaataaagtggattatctagcattgtggacattttagaaccatgcaggtacagtcttaattccttaaaaattaaaatgtctctatttgctgatcgaacaggatgtacactaaggaactatttagccctgggggattggtgactttgtgtgtacattcttcacaaataattcctgtttgctatgcctttgacttctctgttgtgttttaaagaaattccgtagcattcagttctttagtttccactgtttagtcactgctaggcacttgtgccttttctgttgtgatgacgttggtagacgtgtgaagattactccaatcacttctcctgggatgtgctttttataagtagctttaggaacagctctggaacagttgctaagaatattagtgagaaaccttgccaagacgacagacatgagcccaacattcagctgagacaagaaagctcacgtcttggaggccagcttgggctatatgtcaagaccctttcttgaaaaagccagatgactggattcaagttttctagaaaaatataagagtcaaaaagataacctggagttctctttcaattgttgaagcctcttccaaacaaaatatccttccagtggtaaaatggtaaatatcttaatgtatgagttctaaatattacttaaggttaataaatggacttacaaagagtgcttttaatatcttgtct

SEQ ID NO: 786 - protein, 480 aa, Mus musculus
LPRLSEPPLLPPPRLPPGTARPVGAEGRGGRNTPQRSGPAPPPPHRRPPSSARLVSAAAPGMYQSPRRLCSALLLRDAPGLRRTLVPGPRRTLAPPVLGSRPKSPQLQAAAASGAARSRPRTVSSMGNGTSRKAKTVNSSAAAQHPEYLVSTDPEHLEPIDPKELLEECRAVLHWPRYQRDFVDLRTDCSSSHSPIRVMQWNILAQALGEGKDNFVQCPVEALKWEERKCLIEILAYQPDILCLQEVDHYFDTFQPLLSRLGYQGTFFPKPWSPCLDVEHNNGPDGCALFFLQNRFKLISSTNIRLTAMTLKTNQVAIAQTLECKESGRQFCIAVTHLKARTGWERFRSAQGCDLLQNLQNITQGAKIPLIVCGDFNAEPTEEVYKHFASSSLNLNSAYKLLSPDGQSEPPYTTWKIRTSGECRHTLDYIWYSRHALSVTSALDLLTEEQIGPNRLPSFHYPSDHLSLVCDFSFNEEFLF
